United States Patent Application Publication US 2005/0208558 A1 - sequence listing, part 37

SEQ ID NO: 41273 - DNA, 5190 bp, DROSOPHILA
gttggaatctcaaagcgtttacgtggccgcagcgcagcagagtcacgtttgaaagagtgcgagtgagagatagcgacttagagcaccgcgccgagtgcgagtgagagagcgcgctccatcgcctttgtgcctcgtttcaaatgcccgtttgtccgtttttttggcactgttgttcattcattcactcgcttctggcgctcgcgtgcagttgcagtcgctgctccctcctaacggttgtttcgccgtcgccagaatcccgctaaaaggtgcgtgcgtgtttgtgtgtgcctctaaccaactgaaactacagtgcaatatacacaaaaaaataaaaaacaaaaacaaaaggagcgcgagaaatgaaaaagcaaacaaaatgtaagcgtgatgataattaaaaataaatacaaagaagaaaaaaacgaaatttacgcgtggctacaactccgaaaccgaaaaccgcagcaggatctcagcggatctgatcgcactcagctcctggctgtgtctgtgtgcgagtccgtgtgtgtgagagtgtgtacccagagcaagccaaatcaataaataaaaaccaattacaaaaggaaaaaaagcgaaataagaaagccacgacgaggaaacaacctgtacgacagacgagcagaaggcagcagaagacaacaacgaaatattgatacgaaaaataataagagttaaaatcattcacgacggcgaccataacgaactccgccctagcaatgagccagctgggcaccgtctacgccaccaagcgaaggcgacgcaacggcaagagcctgaagccgccgcccaaggatggcgtcacaaagagcaatccatcaaagcggcatcgggagcgcctcaacgccgagctggatctgctggcctcgctgctccccttcgagcagaacatcttgagcaaactggatcgactgagcattctaaggctgtctgttagttatttaagaaccaaaagttattttcaagttgttatgcataaggataaggaggataacggagtcctgccccacatacacgcacatgacggctacaggacacgagaactaggcgccttcgagcacggcctgttggatggtgatatgttcctccaggccctaaatggatttctaatgatactgacatgcgaaggcgaagtcttctttgccacgcacagcatcgagagctatttgggttttcatcagtcggacatcgtccaccagtcggtgtacgaactggtgcactcggaggaccgcgaggagctgcagcgccagctgctgtggaacagtttcctgcccgccgacatgtccagcatgcagctggcggagaccctggcgccggacaaggcgctctacctggagcgcagcttcaccgtccgcttccgctgcctgctggacaacacgagcggcttcctgcgcctggacatccgtggccgcatcaaggtcctgcatggccagaaccgcaagacggaggagccaccgctggccctctttgcctactgcacgcccttcgggccgcccagcctgctggaaatcccgcacaaggagaacatgttcaagtccaagcacaagctggacttctccctggtatcaatggaccagcgcggcaagcacatcctgggctacgcggacgccgagctggtcaacatgggcggctacgatctggtgcactacgatgaccttgcctatgtggccagcgcccatcaggagcttttgaagacgggtgcctctggcatgatcgcctaccgttaccaaaagaaggatggcgagtggcaatggctgcagacgagctcgcgcctggtctacaagaactccaagccggactttgtgatctgtacgcaccgccagctgatggacgaggagggccacgatctgctgggcaagcgcaccatggactttaaggtcagctacctggacacgggactggcgtccacctacttctccgaggcggaccagctggtagtgcctccgagcacctcccccacggcccacgctctgccgccgccggtgacgccaacgcgtccaaatcgccgctacaagacgcagttgcgcgacttcctttccacttgtcgcagcaaacgcaagctccagcagcagaaccaaccacagacgcagcaaacctcaccacttggtggccaggtgggatcccctgctccggctgtagccgtggagtacttgcccgatccggcagctgcagtggccgctgcctactccaacctaaatcccatgtacacaacctcgccgtatgccagtgccgcggacaatctatacatgggtagctccatgccggccaacgccttctacccagtcagcgagaacctcttccatcagtaccggctgcagggcgccgtcggtggctactacacggattatccccactccggcgctccagcctcagcttacgtagctaatggatttctctcttacgacggatacgccattgcttccaaagcggacgaaaagtggcaagagactggaaagtactacagtggctacagcagtggctatggaagtccaacatctacgccacaggtacgaaaacaaattcctctgaagacgccgaaatcttcaccccaggtgatggaggtgatatcttgctcctcggacggtccatcacctgtgggcggagccacgcccaacggagtcggaagcgttacccccaaagttgagttggccggaacaacggcggcagcagcagcgggtcaagatccctacgagcgtcaaacggtgctgatgtggggcaccacgcactcgagtggggtaccgctaaatagtcatggcggtcgaactggagccggaaaccctgcctcaccacagcgatccactcctcttggcaacggattgggctacgcaagcgccaataataacaacaacgatcttgaacctgccacggctgccaagtggaacggaacaaaggagctgccgggcaagtcgggcagtgccagtacgccggagagctaccagatgcagcatgatgattccggcctttactccgcctcttcgcacacaacctctccgcagcagcaacaacagcagcagctccaacaatcacagcgaggagttggttccaatgttagcgctcccagcagctcactcactagcacgggcacagatcagcaggcggtgcacccatccagttgccatcaacaacagcagcagcagcagcaacaacaccatcacgcccacccgcatccgcactcgcatcatcaccaccatcatcaccatcaccatgagacggcgcatcagcacagcagcgaggtatggacgcccgcctcctacacgcagtactcgcagtacttcacgtaccatcatccgcatccgcacccacaccatccgtcggctggcggcggtggccatgttccggcccagtcgcatcacctgcaccacggccaccgctagaagacgaatagattgcaccagtaatgaagcacccgcactctctgtactcacccacaaccactcaccttcttctgaaaccaatagaaacccacttcagtgcacccaagtgtgctctctcgcctgactactaaccataacgatcctccctagatcattctcaccacccatcatcagcaacagtcgcagcagcagcagcaatcgctcgctggctacccgctgcaccaccagctggtgggagttggatcaggatcaccgccgccgcagccgccagtcgcattgtcccgctcgcccacgaccttgccggcggtcagcagcttgctgaatggatcggcttcagcaggaggagcatcggatattccataccagcaattggccattgtgtccgctcctctggtgatttgcgccgaggaggtgggtggaggcgtcagcagcattggccgcaagtcatccaagcagcaacagtccctgcaacacctgcagcagcaacagtcactgcaacagcagcaacatgcaatttatcagcagcaacatcaccactcgcagcatcatccgcatcatcagctgctctatccggcgaacattacggcgcacaccgcgctggcttatgccccgcccacggccggaggcgcatatgccgatggcagtccgctgctctccttctccgaggtgaccaacacgctactgaaccagtgaatgtgcagggaggaggcggggaagggaaccgttcaacagttttgccaaaatgtggactatgactatcgtatcttccataatctgaaccagcaacgaatggatatagccagcgcacgccattcgtccacccactccttggttgattctcagaaaactgcagcagccgcagcagaaataatttctatttattttactgtgataatttatagatacattgtattgtatgtgaaactaggtttgcccgtcaacaaaaaatccaaaacagccgtatccaatcttccagggaatcgggtatgggtactgcaaccttaatcagcacaaagttacgaagccaatccccgttgatcccaagcaatcatgatgggtagatggcggttagcatcgacatttaatttcagttgtagatacaaccaaagatttctctaacttatacttatcgttttagcataatacgatccatccaattggcttcggtttgtagcgccaaactttagttacattttagttacactcgtgatcggagtgagaaataaatgcctaaacagttgcgattaagagtgcttaagtagcatttaagtgaataacagatgcttgtatccatatttaattgaactttagacgtaacgagtattgcaagataaagtaattttcatgattcctatcgtttagcaagtaactaaattaatccgtaagcggatatacccgcatacatatattgtattgtatgtttaaagttttcttggaatttctagtcgcccgcataaaaacatttacttataaactaaaaaaatacaagagataccaattgatggtagatttatgtataatattttgcaattcggcaggcattactgtaggtagtctgtactaccgactattggtaaccagcaatgtatgagctatccaacattacagcttaagcattgatgattgatcatgtattcaaaaacatatatttaaattgtagataatctgtcagctaataaacgaaatatttaataaaatctcaattataaatttataaaagaatcccgagtgcacgtaaagcgcgcctatccaaaacaatcagagcgaaataaatctagaaaataatcgaatcacttaa

SEQ ID NO: 41274 - protein, 884 aa, DROSOPHILA
MSQLGTVYATKRRRRNGKSLKPPPKDGVTKSNPSKRHRERLNAELDLLASLLPFEQNILSKLDRLSILRLSVSYLRTKSYFQVVMHKDKEDNGVLPHIHAHDGYRTRELGAFEHGLLDGDMFLQALNGFLMILTCEGEVFFATHSIESYLGFHQSDIVHQSVYELVHSEDREELQRQLLWNSFLPADMSSMQLAETLAPDKALYLERSFTVRFRCLLDNTSGFLRLDIRGRIKVLHGQNRKTEEPPLALFAYCTPFGPPSLLEIPHKENMFKSKHKLDFSLVSMDQRGKHILGYADAELVNMGGYDLVHYDDLAYVASAHQELLKTGASGMIAYRYQKKDGEWQWLQTSSRLVYKNSKPDFVICTHRQLMDEEGHDLLGKRTMDFKVSYLDTGLASTYFSEADQLVVPPSTSPTAHALPPPVTPTRPNRRYKTQLRDFLSTCRSKRKLQQQNQPQTQQTSPLGGQVGSPAPAVAVEYLPDPAAAVAAAYSNLNPMYTTSPYASAADNLYMGSSMPANAFYPVSENLFHQYRLQGAVGGYYTDYPHSGAPASAYVANGFLSYDGYAIASKADEKWQETGKYYSGYSSGYGSPTSTPQVRKQIPLKTPKSSPQVMEVISCSSDGPSPVGGATPNGVGSVTPKVELAGTTAAAAAGQDPYERQTVLMWGTTHSSGVPLNSHGGRTGAGNPASPQRSTPLGNGLGYASANNNNNDLEPATAAKWNGTKELPGKSGSASTPESYQMQHDDSGLYSASSHTTSPQQQQQQQLQQSQRGVGSNVSAPSSSLTSTGTDQQAVHPSSCHQQQQQQQQQHHHAHPHPHSHHHHHHHHHHETAHQHSSEVWTPASYTQYSQYFTYHHPHPHPHHPSAGGGGHVPAQSHHLHHGHR

SEQ ID NO: 41275 - DNA, 4955 bp, DROSOPHILA
cctgccggcaagccctccaagaagcccgccgcccctctgcccgctggcacctttttcccaatcgatttcggaggcaccaacggcggcgccattgccattgccaactctttcagcaccggcgagggcggatctgctaccagccacgccatcgcatacggctctccggagtccgccgtccgccgagcccgccccaatcccagcaagttccgccactaatccttgaaccacaccttgatggcgccagcaactgcgagggcacccgaatcaaatcagtctaaaacgattctcctgtaattattagcaaatttgtcaatctttgagcgcaataaaataaagttttatgtttttaaatttcggaagaatatcatagaatatcatggattgactgactagtcatcacatctaattgaaacagcttatagtaaattgtaagttataagtgaactatctcctttgcagcgataacgccacctagcggtggtttcattcattaattaccaattcatggtaatatacaatcttaattttctagcaccgtgtaaagttatagactgattttgacagtccttaacatacaagaatatataattagcccattgaaagaatattatcaatttcaatcaacttattcgaatgatctgctgcaagttgaggaaaaggaataaatatttagtttttggcaaaggtaaacgcttttttttaaatgttactttgtaaaatttttttgtttatctaatattaatgttttataatatccgcgatgtttttttcttggcaaaaaggcattttataaacacttctgttacaagcggtatataaaattcttttgtttctaaaactttgtatgggcgaaaagagagcgcttcaataagtcataattttcaaatagatggagtagttgaaagcgtacgcctataacatctaagaatgctgtcatatgtggacaaaacccagtgaaaatcaggtcacaattaccaaaattacttttaaacggttttatatgctctaaatagttgtatttatatattcataactttttcaatccagttaaatgccgacgttataacgttcaagttaaatttaaaatgatattttctatactcctcaacacaggaatgtttgctatgcagttagtttatttatgtcacactctttgcttaagttgatgataaacggaaaaaattaaaagctgcccagccgaaatgcaaattgtaatttcaaaacataggtgcacatatagtctgcaatggataaaaacaaagtaaaacaatcgaacttagaaaaaagtgcacagacttaatgcacatggttacattcttaatctgaatggtgtatttatgtatatttaaaagacactacgcgtattgtacagctggctctaccgcttcaattttgttttagattcttctgtttctgctatttgtgtatacaagaacgatatgaggcatgtgaagtggttgctcctctgtaacaagactacgtggctatcggcttggagtccttgaaaactttctgcataatcgcgacagctaatatataaaaacgttattactagactgctctctgatgacgctgctgctgcttctcatgccagcgctgctttgcgggtcaccatgggtgtttcgctgatatcagtaaccgtacttgtcttgccacgaggtcatcacatcattggccaggttgctcagacggccggccactttgtgtacaccctggcgtacgctttcttttacgctttccacatccaggtccggtgcactgaagttgaccgaagatgctgtaacataataataaataaatcccactgaaggggtctagtctagagcgccttctttcactcacccctattgcccccagtgccaccaggggagccgtccccaaaatagtccgacgaagatatggctcgcgatccctggaagcggttcaagcttgcgcttacatcggccgaagactgttcgctggcgaagtactggtcggagccgaaacccttggagttgccgaacttttgctgggcgatcacgggatctgtgctcgttcctcctttggtgtgggtttgcgatgaaccactattcttcttaacgggcgccgacgttttgggtttgtcatagtcattgctgcgagaaaacatggacgtgatattgctgtggctacccccaataggctcaattgtctcgtagcccagcgcatcaagttcaaacttatcaagcttgcttgttccgccaactgagctctcccgcttttcgctagatcctcctcctcctccaccgctgctactatttccgtatagggaaaagtcagtgaaaaaattctcgctttccaataaggagagttttgctttaggggcggccgactgctgaatagtctccatatcgccgagagcggagtgggccatgtcggagcctcgcaggttgaagcccatgcccagccgctccatctgtttagccttagcagggtccatggtcttaagcttggcctcctcgcgggtcttctgcatggagagttcttggtatgccaatcgcatgctggccaccgtctctagttcgtcctcggccgtctgtggcttgaccacaggtgctgctgcagctgatgtcttcatctcgttagccgcgttggcacgggcctcgatgtctgcgaagttagtcttaactttcgtggctccaagaccgcccactttgcgagcacccagctgaaagataggaaagtcgattagccagtgcttcacactgctggcgttgacacctactccacccttcttcggctgcacctttcgcgcgcctatggacgacggcactgctgccggcaccacggaattaagcagattcacgctgggggcgccaccttgttgcgtttcaacgctgatgaccggagcaacggtgggtgggtttggatcctgctgaaacaatataagtgtgagggatcagtgaacgtctacaaacgaaaaatcgaaagatggtgcgggtcccctgcgtgtaagtggcgccataccttactgacattgttgttctggacattgaagtccacctcattgtcacactgggcaaagaagtcctcctccctagcggcttcgttgccctcgctcttgtccgtctgttccaaatgcagctggtgggtgcaaagtatacaacatggaggaggaacagagtcatgggaaggaaaggagcaggcggagcagtgaagcaaagcaatcgtcagttagttggttttagtgtaagagaaaagtacatgcgcatgaacaaaacgtttgatttgaactcacctttgtgccgtgcgtcttcatggcctgctgggcctgggcacacagcttgtccctataaagctgggccgcccgcgagttgtacttgacctgggcgtcggtggtgctgcagttgtgggcgcggaagaattgcgcggcgttcgcgttgccgcccagttgcatctggcggagctggagccaggtccagttggtgtccaggttggtgctgcgcacgaaggtcagatgcacgcccaagttgcggtgcacggcagaacagtcgatgcaaatgaagatgccataggtaacggaggaccaggtgggagccttggcagcgcagtcgaagcaggactgcgaatgaggaaaggagagcagggagccccattagtcagaaccccaagggcgaactggcgaaagtaggccactcactttgttagctggctgggcgcgcaggcgactgaagaccgactcgatctcctgcttggagggtcctgctgctggactggccatgtcggatggttcgaactgaaatatctcaactgaaacacgagtaatggtcgacgttggtagacggccttcgaggcgctttctggcgctctccgcgacttcgatttccgctggccgagggaagccctagataccaaacacaaaccttgccaaattgctcgacttttcagaacgtacgtggacgtgttttcctttcgtcgtactcgacggaacgaaccactgcgtgctgttagttcgctcagtgctgttatgcgcactagtgctggacagcgcacaggttctcggagatgccacgttttaccttggattaaatagctacatttcattaggggaattcgattataatcggcgaatgttatccgattaattttcgcattttacagaaacgtttttacaactaaattaagaaataaaaataaaaaattaatagttggttgcttacaattctgtctgtttgttaataacgaacagaaaaagtgaagacaaaaaatttgtatttgctagttcgcaaggactaatattattgtttcttaaatcttaatacaacaaaaattgcacaggtaactcattcaggtgaccattcttatttgggtaagaatgccgtttaaaatgatttttaaaaaatccgacaacgtatatcaactagcttcaatggtttagcaattttgagagcaagctatcgagtgtcttcagttatcgaatatattaacaccaattaataaatacaattaattcaaacgtatggcaaacgtatgaggacgctaagtgcagaaacagtaattttgtattggtatcaactctgactccggcctcacaagtgaaaaaaagcattgtcgcaaggtgtgtatttcaaccggcgtcggcctgttgcgtctctgaagaaaagtcaccagttgcctaaacgaaatatgattcctcatgtatagcccatgagccacaagggcagcacgcacatagcccacagacgggatatcggagacaccacgaaagcacatgtgcaggatggagaagtacttagctcggaaaccaatgaacacgatggatttccacaggaagcttatattaagaccgagcccttatgcgaagatctgtcggaagtcctggacgagctgggggaaatactggacgaggagctggccgatatgttggatatgaggcagagcaacattatatatagggaccagggcgagattatggataaggaggaggccgaggtgga

SEQ ID NO: 41276 - DNA, 2393 bp, DROSOPHILA
tggttcgttccgtcgagtacgacgaaaggaaaacacgtccacgtacgttctgaaaagtcgagcaatttggcaagttgagatatttcagttcgaaccatccgacatggccagtccagcagcaggaccctccaagcaggagatcgagtcggtcttcagtcgcctgcgcgcccagccagctaacaaatcctgcttcgactgcgctgccaaggctcccacctggtcctccgttacctatggcatcttcatttgcatcgactgttctgccgtgcaccgcaacttgggcgtgcatctgaccttcgtgcgcagcaccaacctggacaccaactggacctggctccagctccgccagatgcaactgggcggcaacgcgaacgccgcgcaattcttccgcgcccacaactgcagcaccaccgacgcccaggtcaagtacaactcgcgggcggcccagctttatagggacaagctgtgtgcccaggcccagcaggccatgaagacgcacggcacaaagctgcatttggaacagacggacaagagcgagggcaacgaagccgctagggaggaggacttctttgcccagtgtgacaatgaggtggacttcaatgtccagaacaacaatgtcagtaaggatccaaacccacccaccgttgctccggtcatcagcgttgaaacgcaacaaggtggcgcccccagcgtgaatctgcttaattccgtggtgccggcagcagtgccgtcgtccataggcgcgcgaaaggtgcagccgaagaagggtggactgggtgctcgcaaagtgggcggtcttggagccacgaaagttaagactaacttcgcagacatcgaggcccgtgccaacgcggctaacgagatgaagacatcagctgcagcagcacctgtggtcaagccacagacggccgaggacgaactagagacggtggccagcatgcgattggcataccaagaactctccatgcagaagacccgcgaggaggccaagcttaagaccatggaccctgctaaggctaaacagatggagcggctgggcatgggcttcaacctgcgaggctccgacatggcccactccgctctcggcgatatggagactattcagcagtcggccgcccctaaagcaaaactctccttattggaaagcgagaattttttcactgacttttccctatacggaaatagtagcagcggtggaggaggaggaggatctagcgaaaagcgggagagctcagttggcggaacaagcaagcttgataagtttgaacttgatgcgctgggctacgagacaattgagcctattgggggtagccacagcaatatcacgtccatgttttctcgcagcaatgactatgacaaacccaaaacgtcggcgcccgttaagaagaatagtggttcatcgcaaacccacaccaaaggaggaacgagcacagatcccgtgatcgcccagcaaaagttcggcaactccaagggtttcggctccgaccagtacttcgccagcgaacagtcttcggccgatgtaagcgcaagcttgaaccgcttccagggatcgcgagccatatcttcgtcggactattttggggacggctcccctggtggcactgggggcaatagggcatcttcggtcaacttcagtgcaccggacctggatgtggaaagcgtaaaagaaagcgtacgccagggtgtacacaaagtggccggccgtctgagcaacctggccaatgatgtgatgacctcgtggcaagacaagtacggttactgatatcagcgaaacacccatggtgacccgcaaagcagcgctggcatgagaagcagcagcagcgtcatcagagagcagtctagtaataacgtttttatatattagctgtcgcgattatgcagaaagttttcaaggactccaagccgatagccacgtagtcttgttacagaggagcaaccacttcacatgcctcatatcgttcttgtatacacaaatagcagaaacagaagaatctaaaacaaaattgaagcggtagagccagctgtacaatacgcgtagtgtcttttaaatatacataaatacaccattcagattaagaatgtaaccatgtgcattaagtctgtgcacttttttctaagttcgattgttttactttgtttttatccattgcagactatatgtgcacctatgttttgaaattacaatttgcatttcggctgggcagcttttaattttttccgtttatcatcaacttaagcaaagagtgtgacataaataaactaactgcatagcaaacattcctgtgttgaggagtatagaaaatatcattttaaatttaacttgaacgttataacgtcggcatttaactggattgaaaaagttatgaatatataaatacaactatttagagcat

SEQ ID NO: 41277 - protein, 552 aa, DROSOPHILA; identical to SEQ ID NO: 41271

SEQ ID NO: 41278 - DNA, 4921 bp, DROSOPHILA
ttattgatgtattttggggtttttcgatgttgacaaagcgacgttcatctatatgtctctatacactgttgtcggtcggtgttattcgaaaaccggaatgcactgaggggaattccacatatattatgtatacaaatacacgctcgcaaggagaccatacgtacaggtgggtggggtgttcgcgtatgcggttgccgcttatataattctatatatttatttcaatttgtgaacccagctactggtggttttcggttttgccaagattttgatgccagatcgaacccacgtccacacaactccccacaaacaatgtcaacctaacgcacgagcatcagctgagtgactgagtgactgagagactgctccatcgaccattcagcaccgtactgatatggtcatcccatcccaccgccaccgccatcgtcccacagccgggtccaaatcagttcagactcggattcagatgcgagagccgcagcgagagaacgcggtattgatattggcagacctttgtctgccgctcttgacaatgaagcctcattcgcgaaatggaaatcaggtggaatcactactatgagttgcagctaatccgatggtgaaactggttgaaatgccgggttaactccagtaactcacctttagatcacatctacatcaactgtgcctgaatccaagatattttaaaaggtaactacatgtattcaaatgtatatgcaatattgtaagctcgtggatggatggttaagatgacatcaaatatgagctgtagaagacatatgcaggtagctctcaactgtgttttataatcatacaaatgaatgttttcaataccagtaagtttacaagtgcaataaacaacaaacttcaaggtaaaaaacatttttttttcccaagtgacaggtgcaaactaatgatatactagaaagacaatgcttatggatggactggaatatatgctaggcaccattttaggaaacatcgatggatacgaagagaggatgacaggattaatccaagcgttaactttattaaagtatttgaattggaaatatccgtggtaacgcttgcatagaggcattaccaggatctttgcagtattaataattaaatgtgttgggtcaggtttcagtggtgttgtgtgtttcctggagatcttcattcaataaattcaataattgatttatttattcttgcttcggcctcgacgaccgcgtaatcttcgtcgctccgtcgtaatattatttattggattataattcgctcgtacatgttgatctactaaacatcgttaaaattttgcgagatggaattttctataaatgtgaccctcaagtatttattagaattccgtgtactttttggatatttatcggggtaatcggtaatgtttatgtggacatatattttatttgtaggttgtgtatatgcgtacaatctaaactttaggtttaattttatttcagtgcactaaatggaattataattggtttgaaattcattttcgctaccagggactctttagttaatctcaaaattatctaacacattacacacatagaatgaagttctcaatttattatagtagtggatacagatttctatagggtactttacgcatccaaatggaacatcagctaacccactgattgattggctacttacacaaataacaagagtaacgcaaaaacagacaaacataagtaacacctctaatcactccacattggaaataataaagtttttcttttgaatagcacgtggtagcgcaatttgagcctcggcatctgctgccttcttcattcgttgcataaacgttaaattaaactctagaatacgggaatatagactattccataggtttaattcacgcgtacaagctggccgtcgtttgggtgctttcaggttaagcaatgcaacacgtttaataattttcttttagttatatatgtataggtagattaatatccgaaccgaataaagcatttaataaatgtgtacgcgattttatccgaaaatttaattgatttcgtttatcgcagatcgggatcctcgtccgcagccttcttgatccgcagcaagatggtggtgtaccactgatccaaccgggagatgctgtcgtagtccttgacggcctctgtgaatccctcgatgttctgttcctctagattctcgcacaacacctgtaattcgaaaagcgtcttaaagtaaatatctgcgaaaaccaaagacgacacacacacaccaaagataaaacttaagcaaactgatacccaccttgatgagcttgaactccctggagtcctggaatgctgggtactgctgcgcatacttttcgatggcatgctgggcgttcaggaggtccacgctgagatggcatagagcggccctgaagaagtactccttggcactgtacttgagcagagagctctccagcgaggaggcggccacctgctcgtatatggatattgctttctcgtaatcctccagttgggcggcgtactgggccaccttcaacatgcacttgttggccgaactgaccgactcttcacccttgaagtaatcagccgcctgctcatagtgctgaatagacttggcctgaaagggaaatggtccattaatatgtaattagcatggaggcgcacacgggaacccaccagattattgggatcactttcgtacatctcggcgatgctttggtgatgtttggcagccatcgtaaagcggcccatatccgtgtagatgtcgatggacttcatcaggcagttgacggcgctctccacgtccaccttcttgtagcagttggaagcgtctacgtagcaggttccggcatcgtgacgacttccagcccgcgcgtgtagagttgccgcctcgcagaagcactccccagcctttgtccagtttttggacatcttaaacatgttgcccgcccgctggtagcactcgatggcgtcctccaccttgttggaccctctggaatagtagatatcgataagtaataagccttaatgtaatccaagggatcagaaaagagcattaactttttactaatgataatatttttatattatcatttatatatgcatatacgaaggtggttttgaaaagcctattgtttaaacttggatttgtttctggatgctgtgcaaatatacaattttttgtaaaataccttaaaaatgtagatttttaaaaacaactaagtttttcagcgaactgaggaagtttccaagtacgaattacagttcgaatgggtaaaacaaaaaatgtatttcagcttacatatataatttctttgttttttattttacacgattgaacttttgtgcactatgattcatcgaaacctgtacgaatggcatagtgtacatatattgtgtactacggatattttttaacgacattttgcacactttttgttcttcatatctgaaacttatctctgtaagtcgcacttttgcgctattttcttctctttctgggtggaggcgtagagtccacaactgcgtatacgtattatggtgagtgggtatatacataaaaacaaagtagtaagcatagtgaattggtatccaagtgctatttggaatagggctcagtaccttgtggggttgtggagatgctaggctagaccagacacagctccatttccccactcccacagaaattgcgaaacttctttgatttgatacgcacccgaacagcgatcccagaaagcccttctgctgggtcaacttcttctccgcctcggccatcagctggagcgccttctgttcgttgtcacccatgtcgaggatttatgtccgcctcggcactaattgcatctaagtttaagacttgttcggcttttcagcgagtgtgtgtacgtattgggatcttttttcgagaaaataaaatcaatatgctgacttggtgtgaccgcagaagtggtgccagtgttaccatctcacagcattctcaaataactcatgccagtgttgtgaaatgcaagggctgtaacgtttgttcgttcaaaataattctcagccgcctgaatgcgtcacctacagtctggcaggtgcattttaagaacagctgccctaaacgttgcaaacaatcttttttcagatattttattaaattttatatatattcgcttttagttcaaaagcatttacatattgtatcctatagctacagatatttctggccaaagttgaatatacttgtacacttaaacactttgcagcagtattgtaacttatgtattattttaaatggcgctatagcgcactacgaacgcacaatattacactattacttttataatgtatccagcattaaaattttgttatcagtcacctcggtgaatataggcatttcgaaacacgtttgcttagtttaaacatttaatttgatctctttaaaatgcattaagtgatcggatcgtgtacgaaaaccattaaacagatatattaaattacttttgagggaggcccaacactgacgatgaatataacttaagcagtattttcgatatgaaggggaaggggcaaaaacaaataaattctataaacatcgaacaaatcaatttgaacgggaactacaattttaaaagatgatgggagaggaggatactttctgggctataaatgaagttggccagggcattcgtgaattacgttaaactaacattcggccttataatgatagttgggctggctacgcttatgtgaacatcttctccagcattttcctaagtttctcctgggcatatcggatcttctggtacaagtctttagacacgccgttctccacaatggtcgaaaatcggtaggtgcggaagttcttctcctggtccatataggttatagcactcatgcgcgggcagaggatgagcttcatgtgatctgagaagtttagctaagaaggatagatagtt

SEQ ID NO: 41279 - DNA, 2045 bp, DROSOPHILA
cggtcacaccaagtcagcatattgattttattttctcgaaaaaagatcccaatacgtacacacactcgctgaaaagccgaacaagtcttaaacttagatgcaattagtgccgaggcggacataaatcctcgacatgggtgacaacgaacagaaggcgctccagctgatggccgaggcggagaagaagttgacccagcagaagggctttctgggatcgctgttcggagggtccaacaaggtggaggacgccatcgagtgctaccagcgggcgggcaacatgtttaagatgtccaaaaactggacaaaggctggggagtgcttctgcgaggcggcaactctacacgcgcgggctggaagtcgtcacgatgccggaacctgctacgtagacgcttccaactgctacaagaaggtggacgtggagagcgccgtcaactgcctgatgaagtccatcgacatctacacggatatgggccgctttacgatggctgccaaacatcaccaaagcatcgccgagatgtacgaaagtgatcccaataatctggccaagtctattcagcactatgagcaggcggctgattacttcaagggtgaagagtcggtcagttcggccaacaagtgcatgttgaaggtggcccagtacgccgcccaactggaggattacgagaaagcaatatccatatacgagcaggtggccgcctcctcgctggagagctctctgctcaagtacagtgccaaggagtacttcttcagggccgctctatgccatctcagcgtggacctcctgaacgcccagcatgccatcgaaaagtatgcgcagcagtacccagcattccaggactccagggagttcaagctcatcaaggtgttgtgcgagaatctagaggaacagaacatcgagggattcacagaggccgtcaaggactacgacagcatctcccggttggatcagtggtacaccaccatcttgctgcggatcaagaaggctgcggacgaggatcccgatctgcgataaacgaaatcaattaaattttcggataaaatcgcgtacacatttattaaatgctttattcggttcggatattaatctacctatacatatataactaaaagaaaattattaaacgtgttgcattgcttaacctgaaagcacccaaacgacggccagcttgtacgcgtgaattaaacctatggaatagtctatattcccgtattctagagtttaatttaacgtttatgcaacgaatgaagaaggcagcagatgccgaggctcaaattgcgctaccacgtgctattcaaaagaaaaactttattatttccaatgtggagtgattagaggtgttacttatgtttgtctgtttttgcgttactcttgttatttgtgtaagtagccaatcaatcagtgggttagctgatgttccatttggatgcgtaaagtaccctatagaaatctgtatccactactataataaattgagaacttcattctatgtgtgtaatgtgttagataattttgagattaactaaagagtccctggtagcgaaaatgaatttcaaaccaattataattccatttagtgcactgaaataaaattaaacctaaagtttagattgtacgcatatacacaacctacaaataaaatatatgtccacataaacattaccgattaccccgataaatatccaaaaagtacacggaattctaataaatacttgagggtcacatttatagaaaattccatctcgcaaaattttaacgatgtttagtagatcaacatgtacgagcgaattataatccaataaataatattacgacggagcgacgaagattacgcggtcgtcgaggccgaagcaagaataaataaatcaattattgaatttattgaatgaagatctccaggaaacacacaacaccactgaaacctgacccaacacatttaattattaatactgcaaagatcctggtaatgcctctatgcaagcgttaccacggatatttccaattcaaatactttaataaagttaacgcttggattaatcctgtcatc

SEQ ID NO: 41280 - protein, 292 aa, DROSOPHILA [sequence omitted]

SEQ ID NO: 41281 - DNA, 3907 bp, DROSOPHILA
gatagccattccaccaaggcgacgacatctgaaggaccatcgagtggggaccgcgagtcccagcttaagcattgcttggacaattttaatttgaagcttttaacaggaatttattctacatttgccagtttaatattcgtatacttaagtgtataaaaatatatgtgtaatgtgtgtttaaacagtgcgtttcgccgatgtaagacagttgtggaaaaggcagttcgttttctaaatccaaaggcattcaaaacgaagcagattgcaatagttctatggcctggaaacaacaaaatattaataataataagaccaaacaatttgtgtaagccataaaaataagagatttacaaattcttgagaatacaaatgtatttgtaacagaacgaaatttaagctcataacatttaaggtccaattatcacatactttttgtttcaaataaaaatgtttcaaatatttcgacaaatacagggaacttaaggtcacaactatctttcagtgctgaatcgcttgtttaattcgttgaggcatttttcattatgatttgaaaccaagtgcgcaaaacaaattgtaagtaggaatggctcaaatatgtcaaaaaagtaaaattagtgactaacataacttaggactaggtgacattcgtttccgagtttcgatgctgttgcattaggaataattttgaacacgtggaatttacgtttatgatgagaaggcatacatatacagaattcagcatcttcgcctaaaactcatctggatatgtggtctcatgggattcgttgctttcttcgtgctatcggttgagcatattcgtcagatttgtgtgaaggtaacgcgtttctaaggtcactaaggtgctaaacatgccgagttcatgtccatccagcgggggaatgcatcggggtttcgtcctggccttctattcgagtctttcattgcaggtttctagtgaaatactatgcagtctttgcctgtcccattgtgatagccgatcctacaactgtgccgcgagtccggaggcagagatgttgtcgccagccccagccgtttttctggcttcgcgacacaccagcaccggggccacacagatttccacctctagccgttgccggtgacgaccgtactggatatactcccgccaacagggcacgggactggctgcaccaatgcgcattcgcggcgcatccgcctgagccgaggtggcgaaactgtcatctagaacctgcagcactgcctccgggttaatctgcggatgaaagaattatcagttcaaaactaaaacatactacacataaatgcgtactcacaaattgggatttgcagacgtatcggtgagcagtgagcgctgcctttgcagcggcagcacgtgtgtttttccacttggagcccgctgtggtaaggatcgcctgataggccaacgtgtgcacatgtatgcgcgagatagagcgacgcttggcatcgcttgagcttcggtcttcgtaatcttcaaggagactaatgaaaacctgccgcatctggtcaagggtgtgagctatgcgcggattccagtcggtggctaaggtcgtccgtccgtgagcaagaacctgctgcaggttagagagctcttgttcgttcattcccagggagtctacgtagggcagtacaaagtgtcgaagctgttgaagcagctgcaactccacgtaagaagccatctcgaagtggttcagagtgccctgcggctggctggttagttgcctttgtacttgctgcaggcgcgcctctcgctcaccagacttaaaggtgaacatgtccatcatttgcagcccgctgacaaccaacagctgtggctgatacatcttcaaagcatccgtcaactgctccacggcccgcagatgcggattatttcgatcgttgtgcagaatgtagcgattggcgcgaggtgccacatatgggccccatttgtcaccagccttgtactccagaataagatggatgtcatcgtttggaatctcgtcaccagccagacgaatctcctttggcagcagtggccgcagcctgaagaagtttttacattaagttccatgaaataatttgttattcagataggtaattactttctagacatgtgggcgcccagtagcacttgagctccctccataaaaaagcgcacggccatcagtggggcgttaccacccatgtaccaattgatcctctccttgtccatcaccttggcgtagcccaccagctgtgtgaagagggtactgtttgccatcactcgcctgaaaagtggaccagtatgaaatactttgttagtaacttgcatagccaataaaatattggatatccaagatccttccatgcaacttactccgctgcagcgccgttctgaaagtaataggcaaaggactgcaagagctcgtcctcgttgttcacgaccgcccgagatcctgtagtggctgctgcgactggaatccggcgcccatagtagcgatccagaaattcagtggcgtttatctgcaagtccgtgcaggctccgtagccgatggccaccttgggtgccggttccaacgcggtccgcttcagggatctgaaatacaaatgcatatatagctagtgctgcagtgtagccgaatgaactcacccctcgattgccaggagaccggtgagcaggacagtcgtcctgttaagcgtctgcagggcgatgaatgcctgccaaattatggaaacaaaggccgttaggacggaacagccggtgatccatcccatgtatcgcagggcggtcattgtgggcgtggattgttgtgtgattggttcgcctcagtttgggctttccaaactattttgtatgtgacaatccgccttccggctacgccaactttcttatcagaattatcgctctttttcctttgagatgcttcaaagctagcgatgacactatctgcagttcttggactacagcgatagtccaaccaacagttacatttgaatgctatactgctatactatatttgaatatattaaaataaatttaaattgaaatgtgcacttataagagcgccctctcaatgtgttaatttgttcaatgcatagaacagcttacattgtgtttaaacatctttttttgagcatattttttcgctaacatattgggaatatgtatgtttatttgatcctcgtagtttatattttaattttttaagcaaacaaataaaattgcaattgcttatcgatgacaacaatggtttgagccacagctactcgaagctggacagttcagtattgagcaactgtagtttcgataaacgatatgttccgaaataacgccttctgctatcgaagacagtcttgcgtctgtaaagtgataaaataattttacaattgagtcgccttgggaatttcagtcactctccacacaccaaatacatagctcgtgtaacagcctgatttagtcgaacagcacatcatttgccggaatcgttagcgaatagcagcactctccgctaagtcggcacgctaattggcaaaaccgattcgattccagggaaggagacacactgatagacgggtgaagaacaaaaggagaaggaaaacaacagttaatcgtcaaattttacaggcaaaaggtgagcaactacgccttgcacacaaacaaccgcatcgacgagcaaacgcacgcacacacaagccttatcgcctgcgtagtggttggtgtatataaaaaattaaaacaatatttgcacatccgattattactataatatttcgcgtccacatatattagcaagtgtgcgtgcgcctgccctggatttacgtgccagtgtttgtgcgagcctagcgcgtttgtgtctgtgtgtgtgtgtaatgaaatgcaattttctcttggcattttgcgcgcctccgattttcgctgcccctctgcaat

SEQ ID NO: 41282 - DNA, 1644 bp, DROSOPHILA
ctttgaagcatctcaaaggaaaaagagcgataattctgataagaaagttggcgtagccggaaggcggattgtcacatacaaaatagtttggaaagcccaaactgaggcgaaccaatcacacaacaatccacgcccacaatgaccgccctgcgatacatgggatggatcaccggctgttccgtcctaacggcctttgtttccataatttggcaggcattcatcgccctgcagacgcttaacaggacgactgtcctgctcaccggtctcctggcaatcgagggatccctgaagcggaccgcgttggaaccggcacccaaggtggccatcggctacggagcctgcacggacttgcagataaacgccactgaatttctggatcgctactatgggcgccggattccagtcgcagcagccactacaggatctcgggcggtcgtgaacaacgaggacgagctcttgcagtcctttgcctattactttcagaacggcgctgcagcggagcgagtgatggcaaacagtaccctcttcacacagctggtgggctacgccaaggtgatggacaaggagaggatcaattggtacatgggtggtaacgccccactgatggccgtgcgcttttttatggagggagctcaagtgctactgggcgcccacatgtctagaaagctgcggccactgctgccaaaggagattcgtctggctggtgacgagattccaaacgatgacatccatcttattctggagtacaaggctggtgacaaatggggcccatatgtggcacctcgcgccaatcgctacattctgcacaacgatcgaaataatccgcatctgcgggccgtggagcagttgacggatgctttgaagatgtatcagccacagctgttggttgtcagcgggctgcaaatgatggacatgttcacctttaagtctggtgagcgagaggcgcgcctgcagcaagtacaaaggcaactaaccagccagccgcagggcactctgaaccacttcgagatggcttcttacgtggagttgcagctgcttcaacagcttcgacactttgtactgccctacgtagactccctgggaatgaacgaacaagagctctctaacctgcagcaggttcttgctcacggacggacgaccttagccaccgactggaatccgcgcatagctcacacccttgaccagatgcggcaggttttcattagtctccttgaagattacgaagaccgaagctcaagcgatgccaagcgtcgctctatctcgcgcatacatgtgcacacgttggcctatcaggcgatccttaccacagcgggctccaagtggaaaaacacacgtgctgccgctgcaaaggcagcgctcactgctcaccgatacgtctgcaaatcccaatttattaacccggaggcagtgctgcaggttctagatgacagtttcgccacctcggctcaggcggatgcgccgcgaatgcgcattggtgcagccagtcccgtgccctgttggcgggagtatatccagtacggtcgtcaccggcaacggctagaggtggaaatctgtgtggccccggtgctggtgtgtcgcgaagccagaaaaacggctggggctggcgacaacatctctgcctccggactcgcggcacagttgtag

SEQ ID NO: 41283 - protein, 501 aa, DROSOPHILA
MTALRYMGWITGCSVLTAFVSIIWQAFIALQTLNRTTVLLTGLLAIEGSLKRTALEPAPKVAIGYGACTDLQINATEFLDRYYGRRIPVAAATTGSRAVVNNEDELLQSFAYYFQNGAAAERVMANSTLFTQLVGYAKVMDKERINWYMGGNAPLMAVRFFMEGAQVLLGAHMSRKLRPLLPKEIRLAGDEIPNDDIHLILEYKAGDKWGPYVAPRANRYILHNDRNNPHLRAVEQLTDALKMYQPQLLVVSGLQMMDMFTFKSGEREARLQQVQRQLTSQPQGTLNHFEMASYVELQLLQQLRHFVLPYVDSLGMNEQELSNLQQVLAHGRTTLATDWNPRIAHTLDQMRQVFISLLEDYEDRSSSDAKRRSISRIHVHTLAYQAILTTAGSKWKNTRAAAAKAALTAHRYVCKSQFINPEAVLQVLDDSFATSAQADAPRMRIGAASPVPCWREYIQYGRHRQRLEVEICVAPVLVCREARKTAGAGDNISASGLAAQL

SEQ ID NO: 41284 - DNA, 3932 bp, DROSOPHILA
ggagactgtagtcattggccagcgtctcaattcctccggatcgggctgccgcaacatagcagctctcgttgccaaaatcgatgccaatcacggacattttttactcgactccttgtcgtctgaccgatgttccaaataaaattgattcagagcagacacacttcttgggcgtttgctgatttttcttgttttccttctctctttttgtttttgggggcggaacaacgcgatcgcagagttttctttgttttttttttcagctactgcaaaatatacaagttgtaaagagagggagacgtgaattagatataatgtatactgaacacacagccacgcacgtgtcggcttgctatctgttcttttcgtttgacaaacaagtccagaacattcgattcgatatatgcttttcacattcacatcaattatggattcgcttttcgcctgcgaatggaaatttctagcgtccggccttcgtagctcttttctctcgctcgcacgcacaggaaccgtggcggaaaattttgcgataaaatcgcctacgcttgtttggctttccacgattttttttattacttatctgtactcaaacagattggttacgcacgttttagttgataaagagcaatcacctttggattcacggtaatagcacagaaacttcaattcgacaccgcacgttttttttttactgattggtctgcaccatagagctggactaaccactagcgataggatcgatatatcgagcttattggtttttggagaaactatctaggtatcgtttgcgacatttatcgatagtgcaaaattggcaaatctttagaagattccaatttaacttttaccgccgacaattaaaaatcttttaatttattataaaattgttagcaattaccggtatataaatgagtatgagatcaaaagctacgatatctggcgataccgattaaagaagagtaactactaataattgagaaaacattgtttatccagtttgtggttaaatagtaaaaacgccactgcaaatacatttattgtaattttgaaacacccgccacccatcagcaagctcagggaaacgtatttgatccacgcatgggaggtggaccatcaacagtctcctcgatgagcagcggcgagctccagcgcattaggaagtaggcagatccggatttatcgtttgtcccggacaaccgatttccaccaaagggagtcagcccgtacgtgctacccgtgcatcgctcattcacgtagagattactagcggacattcgcagttggttcaggcagtgaaggataacctcatcctgacttgcgaatatggagccggagagcgcgtatctggactgattggcggcaagcttgagagcctcactgaaggaatcgtccgaatagacgaacaccggcaagaacggtccgcagcagggctcacacagcagtggatccaatggatccgacacccggacaatcgttggatcaacgaatctaccagtgctgtcatcacagctgcctccgcacaactgctccatgttcttggtgcgctgcagtagtttctgcatccgccggaagtcatttatatgcaccatcgctcctatatccgtttccgattcgatggggtctccgatggtcagttgctccgtggcctccaccaactcctccctgaggcgtggccacattgacgagggcacatacatccgggagagcgagttggcatactgtccggcaaagccaaaggccgcctgcacggtggctgagacgacagattccaccttagcgctggcatggacaaaatgaaagttctgacccgggcactcggccaccagacgaggaaaacagatgtatcgctccattcgatcgctcaccagcttgtgcacatgcctgtaaaaagctgcactcgcttgagtattcagtccggcaaagtgcacggcatccgtgatggtgtccaagaacagacgctcgttggccggcacaaagttgataacgccgctgggcaaacccgcctcctggaaggctctgaaaattaaatagctcactggtgccacttccaatgagggattccacaacaccgtgttgcccatgagcgccggacagagggccaagctggatgacaaggccaccgattcaaatggtgccagtgcggccacaaatccatccatgggtcgcaaatgaaagctggggaatacattcatatcaccctggatctcaaagcgcagctcggacagatgctccaaatagtcagcattggccctcagcgatgtgagtagccgccgaatgtcccgcgtcgcatcgtcggcggttttgctcagcgtcatcatgaggaacactctcagccgcagctcgtcctcctcgataatggtggcggcacgtcgccaaatggccagtcgctgggcgatgggaactagactccaagttccttgcgccgaaagagcagacttaattgccgcctcgatttgcttgcgattggcgtagtagacgtgagccaagttcgtctgcaggtgatgcgggcagcaaacacgctgagtgtccatggtgtacactgtatcatcgccgataattgtgggcacctccaacggcctgtgctgaatctcctgaatggcatgattaactaatactctctggttcctgtgaatacttggattttcttccgccggctgggaatccggctcgacctcttgttggtcctcatcctgttccggctggactgctttctgcttgtccacggagatttttgtctcgcctttaatgatagccattccaccaaggcgacgacatctgaaggaccatcgagtggggaccgcgagtcccagcttaagcattgcttggacaattttaatttgaagcttttaacaggaatttattctacatttgccagtttaatattcgtatacttaagtgtataaaaatatatgtgtaatgtgtgtttaaacagtgcgtttcgccgatgtaagacagttgtggaaaaggcagttcgttttctaaatccaaaggcattcaaaacgaagcagattgcaatagttctatggcctggaaacaacaaaatattaataataataagaccaaacaatttgtgtaagccataaaaataagagatttacaaattcttgagaatacaaatgtatttgtaacagaacgaaatttaagctcataacatttaaggtccaattatcacatactttttgtttcaaataaaaatgtttcaaatatttcgacaaatacagggaacttaaggtcacaactatctttcagtgctgaatcgcttgtttaattcgttgaggcatttttcattatgatttgaaaccaagtgcgcaaaacaaattgtaagtaggaatggctcaaatatgtcaaaaaagtaaaattagtgactaacataacttaggactaggtgacattcgtttccgagtttcgatgctgttgcattaggaataattttgaacacgtggaatttacgtttatgatgagaaggcatacatatacagaattcagcatcttcgcctaaaactcatctggatatgtggtctcatgggattcgttgctttcttcgtgctatcggttgagcatattcgtcagatttgtgtgaaggtaacgcgtttctaaggtcactaaggtgctaaacatgccgagttcatgtccatccagcgggggaatgcatcggggtttcgtcctggccttctattcgagtctttcattgcaggtttctagtgaaatactatgcagtctttgcctgtcccattgtgatagccgatcctacaactgtgccgcgagtccggaggcagagatgttgtcgccagccccagccgtttttctggcttcgcgacacaccagcaccggggccacacagatttccacctctagccgttgccggtgacgaccgtactggatatactcccgccaacagggcacgggactggctgcaccaatgcgcattcgcggcg

SEQ ID NO: 41285 - DNA, 1932 bp, DROSOPHILA
gcactgtttaaacacacattacacatatatttttatacacttaagtatacgaatattaaactggcaaatgtagaataaattcctgttaaaagcttcaaattaaaattgtccaagcaatgcttaagctgggactcgcggtccccactcgatggtccttcagatgtcgtcgccttggtggaatggctatcattaaaggcgagacaaaaatctccgtggacaagcagaaagcagtccagccggaacaggatgaggaccaacaagaggtcgagccggattcccagccggcggaagaaaatccaagtattcacaggaaccagagagtattagttaatcatgccattcaggagattcagcacaggccgttggaggtgcccacaattatcggcgatgatacagtgtacaccatggacactcagcgtgtttgctgcccgcatcacctgcagacgaacttggctcacgtctactacgccaatcgcaagcaaatcgaggcggcaattaagtctgctctttcggcgcaaggaacttggagtctagttcccatcgcccagcgactggccatttggcgacgtgccgccaccattatcgaggaggacgagctgcggctgagagtgttcctcatgatgacgctgagcaaaaccgccgacgatgcgacgcgggacattcggcggctactcacatcgctgagggccaatgctgactatttggagcatctgtccgagctgcgctttgagatccagggtgatatgaatgtattccccagctttcatttgcgacccatggatggatttgtggccgcactggcaccatttgaatcggtggccttgtcatccagcttggccctctgtccggcgctcatgggcaacacggtgttgtggaatccctcattggaagtggcaccagtgagctatttaattttcagagccttccaggaggcgggtttgcccagcggcgttatcaactttgtgccggccaacgagcgtctgttcttggacaccatcacggatgccgtgcactttgccggactgaatactcaagcgagtgcagctttttacaggcatgtgcacaagctggtgagcgatcgaatggagcgatacatctgttttcctcgtctggtggccgagtgcccgggtcagaactttcattttgtccatgccagcgctaaggtggaatctgtcgtctcagccaccgtgcaggcggcctttggctttgccggacagtatgccaactcgctctcccggatgtatgtgccctcgtcaatgtggccacgcctcagggaggagttggtggaggccacggagcaactgaccatcggagaccccatcgaatcggaaacggatataggagcgatggtgcatataaatgacttccggcggatgcagaaactactgcagcgcaccaagaacatggagcagttgtgcggaggcagctgtgatgacagcactggtagattcgttgatccaacgattgtccgggtgtcggatccattggatccactgctgtgtgagccctgctgcggaccgttcttgccggtgttcgtctattcggacgattccttcagtgaggctctcaagcttgccgccaatcagtccagatacgcgctctccggctccatattcgcaagtcaggatgaggttatccttcactgcctgaaccaactgcgaatgtccgctagtaatctctacgtgaatgagcgatgcacgggtagcacgtacgggctgactccctttggtggaaatcggttgtccgggacaaacgataaatccggatctgcctacttcctaatgcgctggagctcgccgctgctcatcgaggagactgttgatggtccacctcccatgcgtggatcaaatacgtttccctgagcttgctgatgggtggcgggtgtttcaaaattacaataaatgtatttgcagtggcgtttttactatttaa

SEQ ID NO: 41286 - protein, 560 aa, DROSOPHILA
MAIIKGETKISVDKQKAVQPEQDEDQQEVEPDSQPAEENPSIHRNQRVLVNHAIQEIQHRPLEVPTIIGDDTVYTMDTQRVCCPHHLQTNLAHVYYANRKQIEAAIKSALSAQGTWSLVPIAQRLAIWRRAATIIEEDELRLRVFLMMTLSKTADDATRDIRRLLTSLRANADYLEHLSELRFEIQGDMNVFPSFHLRPMDGFVAALAPFESVALSSSLALCPALMGNTVLWNPSLEVAPVSYLIFRAFQEAGLPSGVINFVPANERLFLDTITDAVHFAGLNTQASAAFYRHVHKLVSDRMERYICFPRLVAECPGQNFHFVHASAKVESVVSATVQAAFGFAGQYANSLSRMYVPSSMWPRLREELVEATEQLTIGDPIESETDIGAMVHINDFRRMQKLLQRTKNMEQLCGGSCDDSTGRFVDPTIVRVSDPLDPLLCEPCCGPFLPVFVYSDDSFSEALKLAANQSRYALSGSIFASQDEVILHCLNQLRMSASNLYVNERCTGSTYGLTPFGGNRLSGTNDKSGSAYFLMRWSSPLLIEETVDGPPPMRGSNTFP

SEQ ID NO: 41287 - DNA, 3305 bp, DROSOPHILA
atcccccactgcgccaaatgggcagcgctgccagctgttttatgagctgcagaatatcgcaaacttatagttttgctatgtaacgccgtctgcacggcgatgtagacttggtgtccccacttttggtgtgccccatgcgatacgccgccgttctcgtagaggtaggcggaactcaccgctgcctgcccttggattccgatgtgagtttgcacattgctttttcgcagcttgattgttaattgaaatccttgtttctcaccagggcgacttgaacatcgtggcttctttcgatcgcagaggcaaacacatctacacaggcaacgccaagggaaaaatactcgtactggatgctgaaacctttgaggtggtcgccagttttcgcattattgtaggcacctcaagtgcaacggctgtaaaaagcatcgagtttgcgaggcgtggagagtgggtactaataagtaatcgggatttcataacgtaacaaatttatctttcagcgcatttctaatcaacacctcagatcgagttattcgtgtttacgactcaaaagaaataatcattctaggcaaagacggcgaaccggaacctatacaaaagctacaggacttggtcaataagtatgatatgaaacaaacccttgataaacatttgattgaccaatattaattccatctagaaccacctggaaaaagtgctgcttctccggtgatggggagtacatttgcgctggcagtgctcgccagcatgctctttacatatgggaaaagtctattggaaacctggtgaagatcctgcatggcaccaagggtgagctgcacaaacagaaacgcatccgctcatttctagaaaggctagcaaaggacgtaccaagaattaaaaaccatttgacattgcctaatcggtttctttttagctcttatcgatattatatacgaacaatataaaagtgtttaaagtgatttgtcatagaaaaaaccaatgtattttctgcttatcttcattactggatctcaccttcccgaaagactccggagtgaatgagcaatttgtgtttcttttgtaggacaaggtatgcaaacggcctgtttacatggaacttgatgttattttttccagaagacttctgcggaacagcattaggcaaaccctcttcatctacgacgatcctggcgaattggtggtagagggtgaggcacgcacctctgtgaccgatagcaatcagcaatttatctagatctgcgaagtcgtttcctcagatccgttagtccagcctttggaagatgttcattatgacgaaagctttgtattttttagagacttttacgtacgtcatatacggtatcttcgagtgaaagtacggatcgcgtatcgaacttgggaagcttgacttctacatcagtttcattcttggaggcctcgagtttctcaaggaggcgatgtagtcccaggttcttcaattggtagagcaccaggttaactccctgggatgacttcggcagtaagacgatcattactagctcatgttccccaaaaggtagctccaggacatccgcttgcagaccctttacattattgacgtaggcatacttccccgtttgcaccatcatctccaccttacctgccggcgagccgccgtcgttgtaaaactgttccactttcgtctgggacttatcgaatggatactggagtcatgatatcagatatattaaatacaatacaagcgaggatgaatctggctctgggtcttaccttccatttggccttaaagtagctaacagtaatccccagcacagttactgtactattgaacgaacgacggctataagaactgaagattttcgcatgagaggctttgtcgatatcgtcgttgattattatactcgccccctggtcgaagtccacaccccttggccgaccctctcgaagaaccacatttccttctcctactccttctaggactacactgttgtaccctttcacgagttctaaatctcctacgtcgtcgtagtaagcgtaacgcagcgaaaacagttttgtgttttccgaatttaaactagaatttaaagaaaaagacattgaaaattctaatagatgtagtttctgagtaatgtggtacttactagtgataagctcggacatcctcgtaccacctgcgcagtgttggataatcgacatagatccccaggacatcgcgcagctcattgacggtatacccttctgctccctcgtagaacatgatcatgagcaccatgccaaaaagccccagaaatccgagcttcatattgtcaacaaaatttacttggctagaccgataagaaatatttcagctgaagcaaaaatatcatttacttttcttacctctttgtgcacccgaagactactcaaaactgtttttttatttacaaaaaactatatttatatgatttactttcgttaatttgtggagttcaatattccaagccatgtatactttatttttatgttcccgtttttttgcacgtgccttgcattttttatatcagttactcgtagattttgtcatgagtatgtaaaataaagtaaaaaaagtaaagtaaaaaaatgtttcagtaaagagttttgttagtaaaaacttccaaaaaacggtccttctggcggcacaagcacgtttaatagctgcagcttatgtttccttatcttcgtattgctttactccttcgtataccttccgtattttgcgatctggagaatagtagtggccaggtcacgctattaacgttttagctcgaaataaaagacattgctaatcgacaaggaattgaatcaaacagatattttaattttgggaatacggactccagctctactcttctcccactctatcgaccacaagtcggtcaaatctggcaaaatttctgaaagagaacgatttttttggatttttttagtttccttatccataatatccagtgacatggcgaaggaacaccaaaagtgcccgaagttgttcagaccattcaactaatttgcagctgctaattttacagtgttcattacagcagtttttcagctgtactacgcgttttattcgatattttcaaagattttcaaagccgcaagagggcgctgatgtagaaagcttggcatcagtaataccaagatcgtcgcgtaaattaatattatttatattctttaataagaatacgttaacaacttttacatgtgacgaaaatatagcggtacagtgagacttccccattgtgctgcttacttgacgtatcctgacagattttagttcctggccgtgacgttagaggaatcttttg

SEQ ID NO: 41288 - DNA, 999 bp, DROSOPHILA
agccaagtaaattttgttgacaatatgaagctcggatttctggggctttttggcatggtgctcatgatcatgttctacgagggagcagaagggtataccgtcaatgagctgcgcgatgtcctggggatctatgtcgattatccaacactgcgcaggtggtacgaggatgtccgagcttatcactatttaaattcggaaaacacaaaactgttttcgctgcgttacgcttactacgacgacgtaggagatttagaactcgtgaaagggtacaacagtgtagtcctagaaggagtaggagaaggaaatgtggttcttcgagagggtcggccaaggggtgtggacttcgaccagggggcgagtataataatcaacgacgatatcgacaaagcctctcatgcgaaaatcttcagttcttatagccgtcgttcgttcaatagtacagtaactgtgctggggattactgttagctactttaaggccaaatggaagtatccattcgataagtcccagacgaaagtggaacagttttacaacgacggcggctcgccggcaggtaaggtggagatgatggtgcaaacggggaagtatgcctacgtcaataatgtaaagggtctgcaagcggatgtcctggagctaccttttggggaacatgagctagtaatgatcgtcttactgccgaagtcatcccagggagttaacctggtgctctaccaattgaagaacctgggactacatcgcctccttgagaaactcgaggcctccaagaatgaaactgatgtagaagtcaagcttcccaaaggtgcgtgcctcaccctctaccaccaattcgccaggatcgtcgtagatgaagagggtttgcctaatgctgttccgcagaagtcttctggaaaaaataacatcaagttccatgtaaacaggccgtttgcataccttgtcctacaaaagaaacacaaattgctcattcactccggagtctttcgggaaggtgagatccagtaa

SEQ ID NO: 41289 - protein, 324 aa, DROSOPHILA
MKLGFLGLFGMVLMIMFYEGAEGYTVNELRDVLGIYVDYPTLRRWYEDVRAYHYLNSENTKLFSLRYAYYDDVGDLELVKGYNSVVLEGVGEGNVVLREGRPRGVDFDQGASIIINDDIDKASHAKIFSSYSRRSFNSTVTVLGITVSYFKAKWKYPFDKSQTKVEQFYNDGGSPAGKVEMMVQTGKYAYVNNVKGLQADVLELPFGEHELVMIVLLPKSSQGVNLVLYQLKNLGLHRLLEKLEASKNETDVEVKLPKGACLTLYHQFARIVVDEEGLPNAVPQKSSGKNNIKFHVNRPFAYLVLQKKHKLLIHSGVFREGEIQ

SEQ ID NO: 41290 - DNA, 37687 bp, DROSOPHILA
cccacttttcagccatcccatgtaattgggcaaagggcagtgtcgacaattgttgtttgtttatccacgttttagcgttgcatgtgttaattatatcgcattacgttgccatgtttgcactggcatttcgaatatgtattttcattttgctgccagccaaacggggcaaatgcactctggctgcaccgcgtggtgtagaatccgtatatccatttctttggccactggtcagtggatcgattggagttcggtcttgttggcttgtgggctgtgggttgggtatccaaaaaatatggctaaaaccggctttgtgccaccgcagccagtgcgtaaacaaacccacaatatttgcctgtgcggccaagagatgttcgttcatttaagttgtattgatacccagtaatcgtagatggtgagggtatatggttttattttggcttctttgctgcaagaacataatgtctttataccattaagaacgaagataaaaacttcagactttaaagctactaaatatattacattaaaattaagtttggctcatcacaatgaacaaatgtaaacaatcaatatactatttattcagtatattgccggtttttgcaaagttaagaaatttcaatgtagcttttgaaatccccatagatcatatgtttccaaggacatctgtgcagtgatcaaaaagtgataatcatcagctgtgcacccaattcctgggtacttcccagtcggttatcaagcttgagtcattccttcttgactctttctgatttagtggaatcaatgcgattgggactttggctgcgagatgctgacgccggcggaacgctggcggtacgcccagcagagcagctgacgctgcgctgccgtcaccgtcgactgcggcgttttacgaaccttccgcgacgacgaacaagatcgagccaacacgctgaggagaaataaatgccgcccaagaggcagccgcgcagctggagatgaaaacaaacccgtcgtggcgctcgcagacacaagacgcagttcgcagttccgaatcgatcgatccgtgcagcactcaaaatccacatccacttcagtccacttcaaaatcgcacccgaaaccgagttttgaatttgtgagaaaaacaaaaacagaagaaaaaaagtaagaagaaaacggaagccaactactatcgccgtcgcaaaacgcaaatgaaattattatttttaatattattattattattatttgcttgtcatctcggcgtgccacaaaaacacaatttattcacccaatgcaatataaataattgtggggagagaaaacaacgaggtagtggaaaaagtgtaggcgataaatggaaaattgattgaacaagttcggcattatcacaggggctttgcaatcacgcgatccggctgaccgagagttcaatcgaaatcgaggcatttacataaccctttctgggctcgcgatggcccttgggtcactcgtgcggacgtgacggaaatatatgataacgaaggtcgaatattcgaccagccacccaccgaacttgggatatggaaaattttcgtatgcctcttatttcgaaaaattgcgcgaccaaactgacaaaactaagcggaaaatttgaacaaacaagctggggtgatggggttgggtgttggtcagcgaaaatgcccctccttttcgaagaaattgaatatccaacctgacaatggcaataaaacggccgatttgatgtgtgctttttatggcctatagttttcggattttgataaattaatacgaaacgccaaatattgtatttacgaacttttcacatggtcggggccattaattctggactggacccctgggctcgctcattagcaatgcaaacgagctaccaaaatataatctaaacggtttttagacaaacttttcaaatatgccacataaagcgctaaatactcgtagtcagctgccagtggaacgaacaggttctctcgaaaacgcctcactctgactaattgaaaacagatttcgaccagggggatattttacaacaaatacatatattcatatttgattatgtaaatgcatcaacgaaatcaccgaaaagatctgtccaacttattccggtccattctctggtggcaaataaattagtgttcgtgttcgtgttcgtccatacaactacacactacaaagaccatataaatgcgaatctgggaaattaataaccgatgacaatggggacagggagtgcgggggccttgagcttgagccctacatatagccaggtgcaattacctggtccccagtgtgctgtgtcacagtttccgcaaattatattagtcgctcgtagtcgctcggccggcttatcccccaatcacaatcgcatcagcatcaccgttttcatttcatttcattttcttttcactttatttccatttccattcccataccattttcattttcggaccagaccccccccccctccccgcaaggcgaaaagagtgaaaattaattagtgctgttataaatacagcataaccattgggcggccaaatcatttgacattcagtcccccatcagacgtgggacagacgagacgacaagtgcgcgaaagagtgacgaatgttgggcgaataataatacaaaaaagccagccgaataggagacaactgaatctgaaaagcggaaagcgtaaaccggaatcaaaacaaaaagtaaaagattttaaaaaaaaaaaaacatattgtttgacgccggctaaacaaaatcatcagccagtcacgtgattatgatttcgcctcgtttttgagccaacaaataaatactacacccgataaaaataaatctctcattttgtgttaaaactaaatatttcattatttaaatggtgaagttgtatattgaaaaagtaattaacatgtgtattcaaaatcaaaatacgattactaaatcagcacattttcgtattgaaaaacattcaaaaatattttttttctttcttcgtcacctcagtttttgcctattggctactataacaaaatcagctgctagtcacgtgattataatttcgcctcgtttttgtgccaacaaataaatataaatatctctaggtccacgcaacatgtgcgtttttgaactatatatatttcattagataaattctaaagatatattttcaaaaagtaattaacttaaaaattcataatcgaaatacaattgccccttcagtaatgaaacaacaatatttacttaatgagagatacagataatttttattccttcgtcacctaagtttttgtctgttgggtacacaataacaaagtcatcagctagtcacgtgctatgatttttcaccctgccaaaatatctcaatatcatgtgcgttttaaattatattattagttgttgagtaaaataaaatgtacatatattatcgtgcaacccggcatttcttaaaatccaatgttttcttatcatagttccgtttcgagattcggtttctttggcgatgaaggaatttttataatatttttttaaagttttatagaaattgttctttgtgcctccctcctcacaagtttcgccttgaaatgcactttcctatgtcactgtcatgtttttagctttcgcagtcattgttccttgttctgcacttttcctttgtttatcgcttaatgcacttgggatgatacaaagatatagggtatagagtagatcggcgggggaatgatatgtccgagtgtcgcgtgtgggggccattggcacaaaatttaaattctattgaagagaaactgggcagatagccagaaaatcggaagagtggcaaaaacagaaagataaatgcatatatacatatacatatataaaatgatcagcatatgaacggattttaatgctacaacgattgcggatataaaacatttttgtgtggcggtgaaatcaacgattgatgcgtatttttgtcttcggcaaataaagttaaaaagtatttttatgtcgcgctaattaacaaatcaaactgtttcttctcttattcgctgacgtaccaaagactcaacgagacgcaacggattttgtgctaactaaaattagtgacaccttttcttcacgtttgactaagggtaagtgtgaattgatttccttagatgggtttcgattaaagaccatgaatcaggtgaaaaagtgattcaccatcgatggctatgtacatacatacatacatatgtataactggggcagtctccccattgtggatgcaactatttatcgagcttggtagtgggtactcgtgggcgctaaacatgcaaaccccctttggcaacactttttgcgaacgcgacgcgcgtttgtcatgcaattttaatcgcaattgcatttttaattttcctcttccacctgacggcggcagaagagttctctattcctcctcatccttcgcgagctggaaagggaaaaaagaaaaatgtgctcggcagtgggtaaaaagggaaaataaaagcaaataaatattaaatgcaatacactcaatacccagacagacagacaaccggcagcgagctggcaagcaaactgggctgacagtgcggaaaaaaagcaggagaggagcagcagggaggagcagctggaaggagcagggagaagcaggcggatcagggcggaggaaggaccaaggaacgcctggcgggctactaacacattggcatacagggaatgcgagatgggacaggatgcgagctatgcgttccatttgcataaatctacattttaactattttttcccctttttttctgtaccccccctcgcattcttgtccatttgcccccccaccgtacaccctgtaaaagaaaaaagggaatatggagataggggggtgtgttgagcaaggccgaaggacttgcggactagggtaacttgataaatattcgctggcgtgctgggcgtgaaatatgcaacgatatatttcttcttgtgcaacttatgtacatacatatgtacatatgtatatacccaggcaaaaggaacaactgtcaaccaccgagttgccgattgcaattgcaatcgaaattggttttatttttagagctgccgcgctgctgctgtcggccaactgaggcttttaaatgagctgcatcgattgaaaggctcatatgtcagaatttgtgacaaacatgactaattaaacatgagcccgcatcggacagactgtcaagctggtattaacatttatctgccataataaggacactgcgaaaaaaagtcgattttaagaaagaaagtataaggagttttaaaagaatactttcgaaaatctattcaaacgaaaaagttaaaatatgtaacacaacaaatttacaatcaaatcaagttcatagatgagtctatcagcttgtttgaatataactaatgtttattggactaaatgcgtactttcgaacataaatttatgctatatttatgtatttttttttttgcgtgtagccacgtcggttaaatataaccgcatcgaccacaacctgccaccgcaccgcaagccaaataatgaagtcaaatcctcacagcactcgtagagcatatttcatgaatactttatcgagacgacagcattgttgatggcaatttaatgccgatactcgacatttttttttttttgttgccgttgttaattttgtatattcctgttgacatccgacatcagaagtcatgaatgaaaggttttttttttttttgttgctgctcattcacccgccgccgccccctttgaattattccgctacttgccatgcgaacttttcttacgtcgaagtataataattttacaaagtagtcaattagcataacaacaaacaggcccctttgcgtgtcaagtgcacaaggcgcgagctttacattgtttattcagccgactttaagtcttagaaatgcatccatttggctggcacatacaatatttctgcaacatgcaacctatcaagttatttgtgtttatgtaagttttattcttatacgttgacacctatttagttaagggaaagcaatacttaaatttgaaattaatatataattttgaagtagtgcagtaactggtgtgtatgaatatccgctttgagtgaaatcgaaatattcccaaaaaattgaaaaactcgtttaaggaaaaccaacagcaccacaagtcacgggttattttacacatatgtatatcagctatctgtgcagcagcatacaattctccttagcaatcaggcaatggaaaacagcacatgaccactatatcaaccactcggaaaacaaaccaaacccgattgccaaaccacgtgactgactcgataccggttgcttcaagactccaagactcgaagactccacgcaaataatctgcaaattgatttccagtctgaaaatagcttttccgagcgagacgaaaataacattttgcagcggctctgtgatttgaatagctcgcatttaaatactcgtgcttgaatataaaatatgcctatttactattaaaaatactgcaaatatggcaacgtctgttgattgacttatggccttaaattcttgacattgacacctcgcgagtggcctggttgaatgaactgtttgcttttcttaattatttggccattgcaggcggtaaacagtgttaagtacacaaaagccagagcttgtgactcatgtggaatactgcaagttgtatttactcggatttatttaataattgctagtgcagcaattccaaaaaacgtggtagcttctagtgcttactgctgattaattgccatcacatgaggggcgacttaactatttttgaaacgatttcggccatcgcccatatacataggtgtcataaaaacttaataaactagttccaaaagagcaaaaatctcgacagatgcttgaatactataaagcttttgctgatgttgtttttggctaatcaatacagatcgatgacagaatttgcagacactttacgaaagttgaacgactggctgggagagttcggttaccttttgggccaaatgattgcaaatgacccaaattggatttaagtcgattaaaaacgagcaccaacaacagaacagcatacttatgccccggcatgcaatcagaaatcgaatcggattgccatcgaacaaacaaacagtggggcaacattgaggagggccatgcatgttgcaaggagcatttatcaatgaaattcaataaaaatacattttgcatgccagttcgttgaactgcagtgagcacaaaagacagacgtcctcgggccaaatgcaacttacctgttctctgttcttttgcgttctgttccaattcatttgcctgcctaaagaagccggcaaggaatcagcgacgaggcaaacgactcacaagatcccacttggccgtaacttgacctgcagcaagttctgcaaggcactgcaatcagacagccgtgataaatgtgacaacaacaggccaataggcggcatccagctgggcatcacatcccattcgcatttcgcatcaccgaccgatcccgatccactcctttacactcgcctgactgcacactgagagaaaagtagtggcagtattggggggaatcgatttaaagttcatagagtattactcaaaaattatgaacataaaaagcttttgggaaatcccttatgaaccagatgaaccagattcttctcccttgagcaataaggtgtcagtctgttatgaaaggctgcaacttttctctcagtgcccccaccagcccgcgtcttgtcatttcaattcaatttggccaaagttgagctccagtcgctgtgccgcttaagtgcaggcccaattccaattccaattccagaaacacccagctccgcaccagcggaccatcctcaacaatattataaacaggcgtcttagtcgtggtagtgtgcctgctcgtatttcaacttctgcctaattgttgttggcatggcgatggtgatggcgatggcgatgtggatgtggatggtgacggcgtcgcgacgccgcctgaatattattcccggctaatgcgctccggctatttgatgttgaatcgccggggctacgtgcataaaattgcggcgatctttccctctaatcataaactcgggcatggttcgcattttaattgcacattgatggcgcagaaagtggcgctgcatgcgacttaaacttcaactggatttggcaatttaattctatcttggatttaagatttaagaccacatcccttgccgcccaaagcaactggcttaaaccgagttgttctacacattgaatatgaaattacacaaacttttggcaccctttcgttaactctgattgccacaatcaaaggagcgtctgcagttgcactgctcgtgttgcaaataggtccaacatggcccacaaacacaaaaacacacacacactgagtcccccgaagagaaatgaaaaaaaaatccataacaaagtaatcaatgagcggggtgggtgggaatggggcgaagtgtgtaacccagaagcgccagacggaagccgaacccagtttcttgtggcttccagttctgtactgtttggccaacacgctaagcagacagcgaaccaacccagcagacccggccaactcgagcgaaatcaaatccggagtccccagtaagcactgaaaagcactgaaaaaatcaaatacccaagtttggtgaacctcatcgattcgaaacgattcctaattggttgtcctctgaatatcttcatataaaggatatctacatcttgctactatagcaaggtatatcattttatgataaaatttataccttgagtgaatgaaggtgtcccctgttttttgtagtgcatccccgccccgtccgacattcgggcttccctttttgagcagcttctgccttctgcgtcacttgaacaacaaaaacaaggattgcagcaatgaagtggcagtgttgctgatagttttgtggcaaagtttgcagcgctgaatgccctcctccagttatcagacttgcatttgctttgctctatttggcgggggccaaaaatgattgcaacttgccgctggcaactgatcgaattgcttgccacatgcaacacacaggcaaaccagggccaaaatcagagcaaaccaaagtgagcccaaaacggcggcaaaaagagctgaccgaatgctgttttcaatttcgtcctctcggtggggtggaggggggggggtcgacgcgacgtcattatgtgtcctaatttttattgttcgctgggcatttagtgcaacgggcacacggggcgtatgggaaatgtgccgtaggccaagaacatgataaagcaatttaaatttgtctgccattgccagcattaaatcacacaagtgtacgaaccgaatgcaaagctagcagtcgactcgattcctaggtcctttgctgctgacgtcaggacaataaagtgaaagaagcagcagcagcagcaacagcagcagcgggaaaagctcgggggaaaagcgcctcgaagtatgctgcattgcctgccctccagctgcacgcaacatgctcataaaaattagaacctcgagtgttgaagctgaagctgaagccaaagtcaaagaaaaagccacacccaacggggccgaactgaggcgctcttcaagttgcatgcaacatcgctatttatgaactcaacaagcaggatgtcctgggcaccgccccttaattcttcgctaccatctgcgatgttccgaacgtccgggttgtgtgtgctctcgacatggtcccaaaacatgctccataaatcgccacaggtaaatttgtgttctgttcctttgatttcgttttgctcctcatggcttgtcgtgtgttctggacttacaaaaatattattattgctgcctcgaagagaaaggtattgcaacttatccattgggtttgcaatatactatttatgcgcttacatatcatacattcctgctaggaaagtagtagtatcaaatatatttgtttataaacttttcagttattcagtattatatttaaatgatggttagaattgctttcccacaactttttgtttgtaatttttgaaagtatgcatatatgtttaccaatgttgactttttacaaacaagtaaataaaaaaaaaaagctcataatggcataaccacataatgagtacacgctttacttatccacaaatagagaaagtaaacctggcatttctttatttgtgttgacagacttcaaagtgctaaaataaatagttagcgatgagctaaataaacgccagctgttcaattttttccgtaacactcgcttgaaatgttttactttcaatttcgaagcccagtagccgtttaagtgtatcgaactttcatctttcgtcgccacttacatttgtctcctttttgtgaatgcagcgcagcacaagactggccaaaagtacgggccgaaattgttttcatgcttcttggccagccagccagccaaccaaccaacaagcctccatcctacagacccttttatttatgtcaatctccgtcggctgttggctgttgggtgtttaatgccctttgcccaggaacaccgcccttttggccgacgatcataaatcttggcaagacagttgggcgctgaaagtgcatatatagaatataaataatgagcgggtggccggatcagaggagcacgcccattgtttcgtatatatgcatcgaatgcatttaattatttattatattatgtatactctgtagtcttgtgcgcgaattccactctttttgtttatcaacgctttgcctttgtcctttgaactgggcttattttgtgcggttattgctgtcgtttaattcgctgtggcgcttcattgacacaagctcgaattaattacattcttaatatggccataatcctcgattttatgctaaatataatccgcgttcaatgcccattccatgcaatgtggtccatggtctgtgaaccttgttccaccggagggatttagcagatatgcgatcacgtgctagccaattgcaattggataaatatttaatgatctcgactcgaaataaatatcaaaacagctgctgagtgctgagtcagtctggttggggaagcaccaataaaagtttgtataaaagaatcacatgacaagttgtgcaaaaaacaaaaatatatatatatatacagaaaatacaatttagtgagccgtgagtgccagacattattagcgattaaatatggagagccagagttaaacaaacacattatggtgtaatatttgagtaagcaaataaacaaaattttcaattttaatatttgcccaatgcggaaaataaaacacacaaaaaaaaattaaaaagccaaagaacacagacgtgtttaaattgaatgctgttttttagcatcactcgtttttgtgaccatcacagtgggggagagccattaaaaataatgaataattaatggaaaaatacagttttatagaccggagtggcaaattgaaactgtcagtgtgtgtggcaagagtgcgtaaacacacacacccacttttgggccactcgactgctgcttgagccgcctcaattaaagccgcagtgttttaccaattttttataccggccacatatatgcaacgcattttaattgcttgtcagagatggctgcggaactgctggtctggtggactgttgaactgaccccggagctatgcacatctcgcactgcactgttattgtggatgaagcatttaatttgctgcacagcgtgcgcgtgtcacaataaaaaatcactcaagtgcaatgctccactcgacttcgtccgtccgacaaatgcaacgccgtcatcgccaccaaagttggccagacgcacttcgttagcttcgacggtgggtcctccggcggctttcagggttttccacaagtttcatccttgtatattcagtgttttcacgggcttttctgggatcgcggtcagcagagccgtggcaatgccagtgacaatggatagcgcctgctccagagtgcttcaagtggtttgcttgttcgactgtcggtcagaagtgcaagtatctcactgccgcgaacgaacatgggaactccatttgttgataaaaaaaataagtaaagactgtaatgcagaaacgcgacaactgccactgggataaactttagcaacgaagaagatcggccataaaacctcggctatctttagggttttcagcagataagatagattaaataccaagttaggaaagacatatttctcaaacgtaaaagattattcctgggaaaagctgtcataattaaatttggaaatttctgaaaaacgtgccaggtatttcatgggaaaaattgactcaatcttattcgccgaatcattcgtcaattaaatctcagcagtcagttaaattaaccatgaatttgttcagttaatcatatatatctactatataagctgacaataaaatgtgatgataattaaataaatatattcacaaacaaccatctagttctatctaaatgcgtacattggcagtgcaaacaaaaagtcttttaaaataatatttgcctagctgtcgtcgaataactttcgtcattcatctgttttaatatatcaaaaaaaaaaataatttagcaatgcgagacaagtaattgtggtcacgagattagaaaatcaatgagtggtctattttcagtactggccactttagtttctagcattatttaccactcaaagataccaagtcaatcaaagctaaaaataattgcttctcatttgataagcacgtgtaaatataaaacgtttcggggaaaaacaatttcatattgaaatttctgaagtactggtctgataattagattagatagctggagtttttcggcgaaaaactaatatggcacccaagatggcttttcggttatatggttataactgattttaatttgcttatcgcatacttagaatatcaccataaaggtgaagcaataaaaaaccagtgtcacgtgatcaccagacccagtcgaaataggtacttagtagtcttatttgacgactatgttaccaattaagaatgacaagacaaggacttaagaatgagtcactaaaatgtctgggcgaaagaaaaaataaatcaatcgaataattcgtatcaatctattaatgccattctaataataatttttaagtacagacgtctggttgatatttttcaaagatatacactgagtcatgaaaatgtaagatacgacattgttttcagagatacattggttgcaacccaaagaggaattccatttgttctacggggaaaaaccatttcgaaatcaatggcaataattttaagtaattgcaccaggaagcagactaatggacaggttaactgattttaatttcggaaatcacataattaaatcaaaaccaaagcacttgtgttgcaaacaaaatggcgactggcactgaagtgtttttatcaatcgccatattgtttccattaggtgcataagttgcgaatggttggtagaatcaattttcgatattgttttggtgttggggttggggttttgtattatcaattagtttcggcacacggaatattcacaatggtcttgtgtggcactttacacgcgaaaacaggcaaatgaatgccgatggcgatggctgatatgcgatgcggttcgtagagagatagcacccactcagggcatccagttgattgcttattgttatcgctcccgggagtctggtgactaactccattattttctgccagcccgcactattttgtttttttgtgtttcgagttatttgtttcgactaattgaaacgatgatgatgcccagtgtgatggcgatgatgatgatgaagtgtctgttggacaaatagatttaatttggtagacatttttgattactttaatttacttgccctggctaaatttgcttttaatgcggccagcggcgattgtttaattcaaaatccgaaatccaatttagatccactcgacacagaaagcaatcaaaatgtgcagtcaaatggactacaaaagagttgtgctttttgctacatctgcgcccaaggcgagcagagtgatcaatatttgaatcaatatttgaacacgtctagtagacacactgcactcagcaaatactcgccataagccatattcaatgcacagccagccaactaactaatcgatggtaataataccaacaattaggtggcgaacaacaaacgctccacaatagccacatcacagcggagtctgctaatcatctaggctccccccccccccttcagctgtgctgtaatttaattaacttggcaacgcggcgcaaaattagcataaatcatttaattaaaggtaagtgctgacgagcggcatgctcggcactgctcttgtcgtcatttacgcgtcgtttttgggtatgctaaaaatgttgtgttcctcctgcgagccgccgaatcatgtgttaattttttaatagcatttcataaatatatttcaagatgcctagcttgaggcttgaacgaacttaattaattgtttaaatgctgcatttaatttgcaattgatacgtttttaaagcatttcacagcttgaaattcaattttttccaattagcctagtgaaactaacaaacgcttaaagcagatacaacaaatgccgatttaggaatcatttcagtgctcgttgagagctattcaagcaaaaaataaacgcaacagctgtaaaattttaactaaaaacacaacaatgtgttttaagggaaattgttgctttaatcgttgccagtatcgctattgtggtatataaataaaaaccgcatcaaaactattgtaataaaaacatttccattcgcattctcacaatgagcacaattgcaaattgatttgtgtggttcggtgaaaatttcaactcttttccttcagtattttgcattgaatacagtgaaccaaaacaaaataaatagtattgcaaaaaaaaaaaaaataaacattgaaaaacaaactaaagtataaccaaaagaacgacagcaaaaatattcagcaatgaattcgatattttcgcaaagcttatgaatctttgataacgtttttcctgttaaatatttaagcattaaacaaacagcgttttcatcactgcgaccaaatatataaagctgatgtttaaattaacttacttttaatccgaaacatgcgaagtatattgtgtgcaatcaaatgagttaatatttgccctgggttagttgaagtaaatatttacatgatgaatgttaaatatgttaagtacttaaacttcaaatttttttccaacgcaatattttgttctctttgttcttgcacccttttttttaaaaaatttatcgattgttgatgaactcgcaaagtcaatagaacttttaagatttgagaaatcgcaggctcatacataaattagaaatacgaaaagcgtttgcctcagcgtaaatttcaattagttagtcatgtaaagagctcaaacttttttgggccattttgctcagagtttttattttgtgcggctaagtcggcgaacctgcaacagcatccgcataaattttgcatatttataggcacataaaaccccactcgatgccacccacatatatatatttttatatgcatacatatattcggatatgtacttgttgaaagggcgtcgggagcacctttggcgattgccagtcgacctggcctcggtgtgaaaaatgaaacataaattaaatctgctacaccgaattcagcgcagagtgtcgggcttaggatacttaagcggcggccgcacctcctctttcactttatgatttcagccaaatgaaaatttatgaagcagatggcacaagctgatgccaaagccaaagccgaggctaaaaagaaagccagtcggttgcggcgaaaaatatgaacttcaaattcggtggtcttcaagttttgtgtgtgtggcaaatgaaaattatgactcattaaataatgaagtggtggccataaattacactttacattgcagtagccgccgtgtttacctaatgtctaaatcttataaatcatatatatatatatgcatatatcagacaagcggagttaatcatgactgcagtttgcggagaaaaactctcgaatagccgtgtgccgccttgtattccattaataccacttaaaactagtaattagttggctaaaacgacgcaggcactacagctttcaaacacgactatgagttatgagctccctttatccagctaatttagataagactctgtacgcggtctgggaaaaatacttccgattaagtactctaggtcgaggcaacttcccacccgccgagcaaggccgttgggtctatcatcatcatcatcatcatcatcatcaccaccactgacgaactgacgttagcttattatatgattttactgtctggcaaacatttgtgtctagcccgattccgtttaactcgatacaccgaccagtacaacaagagcacgttctgcgtataaaatgaaaacacctggcgaaacacccgacaccctagtatttgctttggcattatcagcgtagatccatatcgctcggtcttataaatgagggcacagggccagaagctgcaagcattccttgagcgatcttagacaaggtcggtcatttagtttatttttcaattcagtggtcaacttgaaaggagtttgaagtaatctatctactcgaaacatttccatattcacgtgagtaattggttaaaattcacattcacatcggatcgtttaaacagctgtcagtggtttttgagttgacccattaaaggtttcgggtcttttgtgtgcagagagaaacttctggacggaaatattatttttttttttttaagcttatttttggcagtcgcgtatgcctaggcagatattattctcagttgtcttttagctgtgctcggtgaattattatagctcaatgtttagctcaatgaatattccatatggctatcctccgaaatttccgtttgccgagtaagccacatgagtgttaaacctttgaatcgttgcaagtgtttctactttgcggaagcttcggcttaaaatctatgccgttggccttgccaggcagcactcgaaagtttccagacaatgttcctaatgagttctcaacaagtggactagcagtggcaaaagcataaactctatgcaaattgattcactttcaacatcagcaacttcatttgagttcgttacgtatgcggccagttgtcggcttaagaacccagcagccgtgtagtaagcaggctaagtaagctgctttagttatgacaaagcacagcgtttcgagaaacacacacacacacacacacacaggatcacaggatgttccacggacacaggacccacgccgagtggcaacacgagttgcctaataaatgatgtggcggccacaggagacgacttaagagaaacctctcaaaacgttgtgcagtgaaaacaaagaagttttaatttaagatacaaattcagcttacagactattaaggaatatttttgttcgtatcttatgtacgaaacaaggccttgagttgtacttgttttcttttcacataccaaccaaatcatactagcctatttctcagtgcatctcccagaagtaaagatgacaaaatgttgtagtagctgtagttgttttagctgttgctgtcaatcaagacaagctgaatttttgcgacattgttgctggacaagctgctgctgccaaacgagtttactttgtcctttccgctgtcattgttccgctcccgatgcgccagtgactgccgctagtcctccagttggtcatgtaattgctatactgctattactttgggccaagttattaagtgattgttattcctgctgccgctggtgcttttgttccgttgatgcaaaagcataatctaacgattatgcgaagcagctcggtctggccaaatgtaaattaactcgtgttcgagctgagcatccgttgctcgtggctaattttgtgtagtctgctttttcgggcaggcgagttgcaaattaatttcgatttttgcgaacagttcggccatggctgtccgaaacaatttgccaaattgccattgcgaatatgtgtgtgtatgcggtgtgtgtggcggcacaaactgttgcagctggctcaactaattgcctttaattatgaatggaactggcaactggctgcctcgtcaccaaaacacacgcactaaggataatcgctgtacgctgcttgtcagacatggcgtttgagtaatggctgtctaggtaataatgcattatcgatttaaagtgtcaaccgatacgaaaagtgccatttgcattgaagtgcggacaataactaattgccccccatccaactggaatattttcctgtcaattaagccgataaaatgtggccaggagtcaggagccaggagcagaggagtcgagcgagccgtatttatctgtaaatatcgtttacatgacattaattgcatattgatagtgtttgctcaattgtttgcccttgtacgctctatttgtgtttgctttgaacgactcgctccgctccgttgatgcaactttgtccggtcggagtggccatcaatcaatcaagcgatccatagatcaatcaatgcgccaagtttgttaccgccaactttggctcccgccgtatccaactaattgagccccaactcggcgagcttgtcaaacagttttggccccgagttagctgcaatttgcgactcatgaatatttatgcgcgatataattaaatatgctaattacaactgattgtacgcacaatcatttgaaattataattctcagcgaagcggagcgagttcacttcgcgccggcaaaagcaacacgagcagccaggacacaaacagccaatccgccaggataacacgcattgtgaaactgacaatttagcataaattcaaatgaaatcaacacaaaaagggggcgtgacttagcaacagttgccagcttaaattgctttgcagtgtgaaaaattaggggcagtagggtgcgggggatgtgctgggaattaaataaattacattgttgccggcataaagttgacgctgccagctaaacaatttgtgcagctatcagggctacccagccaaatgccacccctatcccacaccctttccccctttcacccatcgggcaacattggccttcgggatggggtccttgcacatcctgctgcacctccactttgattattgaaccacccacatcagctgccatggccagccggatgagccggatggctaattttttgtgctccaagtaagtgaatttaagttttaataactgacattggccatcaaagatcgagctgctacaagccaggtttatccgggttaattgaaaatccaaaaaggcaaccggtgaaggccagagcatattttaacatagttttgccctccctcaattgcgccaacataatattcgagagcatgtcttaagctggcctctatatattgccaagaaattgcgcataaattgcgaaagaaattagttttcgtgttctgtagaccgacaagagttttgccattaaattaagcagctcagcatgcaaatgaaaaggaggagcttaaaagctgcattgggagctaaataatcctaacttaaaactaattctacacatgtgttcaactaaagatccaacacatttcagattggagatattcgaaaaacataagtaattaaatacattttgatttgtatactaaagattacttctctggatttagaaaactttaaactcctgtactacgcaataaattcccaaagtcagcacacaatcaggcagcaattgaaggccacattaaagcgtgctcatacaaaacatcgatgaataattaaaatttgtattgccatatgcacactcattacataaatacttcattaagcagactggacgggccaaaagcactttgtccccgaccggacataaagagcctcccaaatgatagccgttcacttgaacaaatcaccagcacgtggccaataaaatggggatgggctctagagcttctgctcattccgccatccagtggaaatagtttaccaaacgtagatagccaaaagggaggcgttgcagccataaatatccatttgcggcatttccatggtgacaaaaatgtagccagtctaatttattatcaacagcctttgtgcaaacaaagggaccaaacaagctttttaatttccacaatctcaaaggacgaacgaaggaccaaggacttgggtactggtcactggacaggccaagaccagaccgtttcattagttcaattagctggacaggtgctggctggatgtcaagtggcagctttttaaacgatgattagtggccattcgttttcgtcctgggccaggacgaaatacaagacaaattgttgtttgtttagctcccgacaggaggcacttgaatgcaaatttatgtgcccgaaaggattccccctgtcagccggtccttagcattggcaggtcgcagctgagggattccccaacatgttttctaatttgctttttgagcgctggtctccggggtggaaactaaaatttgttgacacaattttaaagaacatgaagtctaattaagatgccttcaatattaaaaataattggtaaacgattatttaacaaaaaatattaaacagagaaaagtggatagtggtttaatttcaaactattttttgcacaatccttaagagcgaaaagaagccattatcatattattttaaagtggataaacaaacaattttttgttttcaaataccttatggtctacaaattttgtcactgccacaggtggccagtggccagcacaatgagctaatggccagaagtcggaggtgttagagatagcaaaagggccaacagacactgcacccggagactaactaacccaattatttgtaaaatgcgagcacagaaaaaataactgagaaaccaaactgaaaagaaaccgcagcccattgttcctacgccacagcaggtgaaacccgagacacagaaaagttttccaggggttttttgcagaaggggatcggaggagatgggaaaagcgggaaaactggggaaaacttcgcacagcacgcgtaatgaaaactttgttagggcacacaccaatggtgcacagagcgagcgaggaaaatggcacagaaatagacaaaaaaaaaaatatatatatatatatatgagagggaaaaacagcttttcccggcagtgccactcgatggtgtcgagtgctccggctgctggacacaaaagtggcgacaacgggaaattagttgtgcacgcttgctagttgcaacgcaaaacccgggcattagccggctgtcctagatgccctgccgctggggttgaccactaaattgccgagatgaagtcgccgctccggctccggctccggcttctggctgatgttgatcaaattatcagcatgtggcgactgccaagtggctgatgaccgtcgcttaatgcgctcccaacgtccttcgtccttgctccttttgtagcatacttttcagagaccagcaaattgcttaagctgaattgccgagcatcgagagtggaacgttcacgcagaaaaatggcaattaattggtagacttatataaatacgagcagctcaatagccatagaatctaagaattcgatcgatcacatcatgacaggcctttaaaaaatgaatagatagactagtaataaagttggaatttaaaggcttgacgacttaattgaaactgctataaacaataagtttgcattttcataaaccaagtatgtgcttttgtttctcgtgctctttgcctgctcaatacgacattaagaagttcaaaagttccaatcacgattttttaaacaatattccgccgtgtaattcaaacgaagcctgcctaattgtttgacaggacaacttgtaacgcgaaaagttttgctttacttcacgtctgaaatgcgacggggccacaatgacaggcaacaacaagttgcaattgtcacttttgttgaaactttctcgaaatttacaaagtaccagtaacttactcccttttttttttttttgctcattttcgttttgaccaaggctacacactttttgccaaagtcatgctggaaataaattataaaaatgtccgcggaaaattatgttttttttttttgcggcgtgaggcagtgggagtgaaaggagcatttgattccttcgccggtcaagcgccactcgttataaatgatcgcaattgaaagtttaaaccccatacagggctagttgaaaaattgacattattttcggttggcaacaaacagtcaacggacgataaataagaggcaacttaagtcgagtatttatttttcgggcatcctttgataaatgactttgacctggccgatgtgcaaaagtaaaaaaaaaagtggtagaggaaagccgcacatgggcgtgccctgccacgccctccgagtgacttttctcattaagcctggccaaggcgaacgtggtcgaaaagaaatcaaactaaagttttgcacaaaattcttggggtcgccggcccgaagggacgtgaacatgtgtaaagcgtcgagcggttaaagctaaacaaacaattgccaaatgcaatcgagttggttttggcctcgcccccaaaggagcaggcgggtggaccctgattggtctaaaggacgaaaaacagtagaatggggtggtaaggggcacagttgcatgttggcaaatggcaggaagaagtttgccaaccgcatgcttcaacttcaatttgctggaaggattgttacggggaactgggatcgctgcttacagcttgactcgtatttcattactcgaactggtattaagtggcaaacttttgtatttaacaacttttagcagccgagcagcaaaaatgaagaagatgaaccgaccaaagtttgccatggcaaagccaatggaaaacaaaaaaaaaaaaaaaaaagaaatgtgaatcgtagaatgaggaacaaaaagtaagttgcagtcacttgacttaactgcaattctctcgaaattcacttgtcaaaatttcgctcagaaacaattaaattttctttaggttttttgaacttgaaatgcattgaacatatttaatattgtatagtacagtaggtataacttgtttaagaaaagcaataagtataaatacaattaagtattttatagtgtaatatcgctagggattttaatgaatcaggagagctaaccgtttttggtggtgcaaaagccaattggcaagaacatgtggccaagagcacagaggtggcagttaaaagctccaaagattcccgaaattgggacaacactttgcactttgcaatctgtgaaagttgttgcatccccccacttcgggaaatctgtcaaataaaagtttgattggcacacccccctgttgcacgggagttttggagccatgactttgccagtgcattaattagcaaatgcagcgaactgaggaaactttcgagcattgccatgaactgcatgccgtgcatgcaactttgtggcgccccccatacacgcatccaactcatctgaagtggcgcataaattgagtgcatagcgaatgcgtacatatacgtatatatgcaacaatgtggcatatagtgtaatttcccccgcattaccataattatccctgtcatgcccacagctccgccatcaccatcaccatcaacaagctgatcaggcttcgcggcaggcggcactccttaatgccaggtcatgcaaggtagtggaaagcgaaagttttacatacgttctgcgtcgacagaaggcggaaaagcggaaaagtggaaaaacggaagagcgcacccactctcacagctccggccgtctttactttttgctggccgttggccaatgtcggcgctgcactttggctaaattacattttcaatttgtcagctggcggcgaactgcaggccattaaatggcaaattaagttcagcttcggcttttattttatttgccaagctgctgatgctgctggcgtgcttgcaatttttgcatttttccattctccggcggcaaatgtgtttttgatatgcgtttcattgtctgacgatcttggcgcattaacgtggcagattttcggctctgcgtcgtggagatggtgggcaggtggaatatgctgaatatttcatgagtgtcataaatttctcctttacacgcgcttcagttttgccgcccttttatttttaataactttccattgtggctgtcagtggcaggcaggcaacagcaacagcaacacacgtgcttttcctgctcgccaggactgaggactcaggactcctcgagtgtgaggacatgtcagcgattcgttgttgcttttgtcactccttcaagctgttttataatttatgatgcttggcatcgaagactcctttaagcacacacacgaagacacacccacccacacaccacacatgtcgccaacttttgtataatttttcaaaaaaactgaactgcatgaatattaactgcaagtggcagaatatggcggcagcagcacatcctgccatccgaaatcctggcccatcttggctgccacttttttttattgtgtgtgcgcccggcgaaagtttcaagtgccagcttgatccggaaggggcggtggccacgccctgctaacttatgcatacgtgtagctaagtctccttttttttacccgccgccagccagccagccatcttcagcatcaacctccactcgtccttttgttttcggcaaaggatttttcatacatatttgatgcaaatgttcgcaaattgtcgtcgctgtctattggacattttgtggccgcattcggttcgcacattcgcccatcaaacaaaagagcagatacactgggaacaaacttgtatataagcacttaaattgtgcttagtttaacaaaacaaagtttaaataatatttttcgaaggtatttaaaacatttgttgaacgtccgaaggttaaggttatatatatactttttatgcacttgtggacatctaagtggagtgcaggtggcacttcgcatggattacggataatttgcttaagcttggcaagctgaaaataacaatgaggcagccacaaagcagatccttggaactgtccgtttcgactcctggctcctgcgtcctgttgcccgactcctggcttttgtctcccggcttatcacatggccgaaaaagcgaagggacaaagatgagctagctggtcaggatcctgctgcgacggctgtcaggcaagtgacacggcagctgtgctttaaacaaagctaagctcgtggtaaaaacaacatgactaatagttttgacagagccaggcaaaacaaaaggccagacagcatgtcagataaaagccaaagcgatggcaaatgatggtgttcgctgggaaggcgaaactgcatgctaaatgttgtcaattagttgtagttggtgagccaaaaaaaaaaaacgaatgaccgaatgacttggcgaattggctcgcaaaaagttgaccagttggcgacccttttgcaatgggtattttacattatccagaggggcaatagtcatctttgtacaacaaatcaattatttctaatcatgtgaaacgtatgggaatttcaagacttgtaaacgtatctctgacttgcagatttatttgatttaaaacacaagcttgaatacgatttcttattagacacactacatttcaatactgtcaatcaggttgtcaattagtgttagtgtatgctttctagaatcaatcagtatttatgacaaagctttcttttgttcggaaatttaagacaatctcaaaaataggaactagaaaagggtggggcaagatgttaatattcgcatacataagccagcagcaaccataactttaaacttgaataactacaagctcttaacataaaaactaatgaaacataacttccaattatttccttctctaacccctttgaatttgtaacatcgacttttgagaagatacacattgagcaagaagtctgctttacgacagcttcaggtgaaggagaaaatcctaagctgggtgggttatgccatttcttttggtcgccgggatccatggacctcggaatcaccaagaatcacagggcagctcaacagcttggcttggctataaaaccacaaagtcgccgccaaagtcacacttaagctcaactctgccctctcttctgattacacccactcatgcttacagcaactgaagtacagtggaatgtccttacggcgggacgtgcatacagatgtcagcaagtggggcgaagttcataaattcaaagaacgagccaaattttccaagggtgcaccgtaagcaaaaattgggaggtttttgaaaggtgaaagaacattgcagttatgaaattttgaaaacattttctaaattaagtttgcgtttatggatttttaatggcagaactcctaaacctaaactgttgaacatttttggctttgtattatagcattagcatttaaatgcagtataatttttagtcattgcgcttggggttttacgaatttcacccacaaagaaagttagtttattgtcactctgtgccatctttttgctccctttaagttttgtgcagcctcgtctttttcgcctggctcatttcgcctggcccctggcccccatgttaatgttgatggggttcgtttggatgtgggttgttgcaagtgttatgatgggtgcaggcaatccacaccacaaggcacccacaccattcgcctgcggatatgcaacaatgttgtcaagtttcctgcttgacacaacgtggccgccgagccacggagcgctcagttggcattatgtccatcgggcgtgactaaaatgcacatgctcaactgtgctggaaaacgttttatccagctcacatctcacctaaaagccaacagccccccccccccccccttccgccactccgaaagttgaagagattgtgtttgttttttgccggtgaccaacttgaattttgattttgattctcatttcttgcacactttttttttcagcagaagcagaagcaatagcaatagcagcatcaacatggccaaggacttgagcactatgggatgggattatctgatgtttgtactgtttatagccctcaccgttttgggcccgttgtggaaacgcatttttggcaaaaagaaggagcgcagcaaggccgactatgtttttgccaccggcggagtttcgatagtggcagtcatgatttccattgcccgaggaaccttgggagtgagatccgtgctaggtgagtctttaaatgccttaattacttcttattaaatcttaatcttgtaacaattttaacaaaggctatcccagtgaattgtactaccgcggatcggccatgtgggagatcatctacggcatgatgagcgcctatcccatcgtttgcttcatgttcgtgcccgtgtactttaatctgggcatcacctccgtctatcagtacatcgatctcaggtaagtcgagctaccaactcgagctaccaagtccaagaaaagccactccccaaagcgccacatcgtttaattagtaagaagcgaaacgaagcgaaggaaaacgatgcgaagtaaaacggcaggcaacaggacaggaaaattgttatttaaacattcgttttaattccgccaaatgcgacgcagaagcagcagcgactactgtccaagggtcctgtgtcgcctctcttatcgccgaaccgcacacaattttattcttcattaaggaccccaaatgaaagtgaacagaaaagcgccacggggctcagttcagttcagtttagctcaggttctgcttttacttttgccaggctgcgagtggcacaggttcgctgcgttgctaaataaatttgaattacatttcacacaaaaaaaaaaaaatcggccaaacagaggagcacaacaacaacaatgagtcgctaacaaatggccaaacaaaagccaagccggcagagcaaataatctatagatttgtccttgccccgccatggaaagcaactcttggtcatggagtcgcagtagtgaacttggtcgcttggatgctatcgtccagttgtcgtcagcgctgctattgggccacctcgtttccctccgcccctcaccctaagtttaactgctcctactattccatttccatttccatttccatctgtcgcaagttgtcgcctcgtgggcctaattgttttttaagttcgaaattagttaacaaatttgttatcaaatgttttgcagtttcgacaacagaattcaattaattgcaaaaacagacaaggcaaaaaggaggggggttggctgtttggtcagagcataatttgattgaaatttaattggcatgtgccgcacattgacaaaattctcggtgggttttctcacagggcaaaggaactggtcgtgggcaaaagctgtgcagaattgacaaattatttaaatgtttgcttgaagaactgaatgtaatttgttaattagcataaacaaactgaaatacaagaagaactaatggggagtctaagagaaattaatgataaaatcaatgccatgtttctactactgtgatgagtctcaaaagtccaaggattttgccatgtttgaataaattttttacaagtcctacattaaatcctgcttaacaagaatttggttaatacctaaaagtaaaatcatgcaatctaccaaaaaaggtttaattgatgacttcttcttcaatcacctatagactttcattaagcaattcaataaattgtttaatgggtttaaaactcagttaaattaatgaccatatcaatgactgataatgctggtttccaaaaaaaaaaaataccattttataaatgtacattttactcggttcggacgcaacactcaaactaattgaatagcgaacgagtcaagccacttcatcaatcttagtcaattggctttagccccaaaagcgggcaaatcaagaaggcaggaagaaggaggaagggcgtgggatacgaagaaaagggttgcggatgcgcaacatggccaaatgttgccccaaaaagttgggcgcacaacatttggatgcctcattgtcgcttgtcatcgcaactggcgcccagcgacatgtttatgcatacaacttcatcaaaataggctgagcctctcgactggcggatgaaaatggatgtggaaatggaaatggggtctagggcacacacagacggaggccgataagtgaatatgctacaaattggcaaaagccacttggccaaacacatccaaccaggccaaataaagcaagtttgaggctgagaaaaaatgaggaaaaagacaaaagcatgacgaggacaatgccatacatgaagaatggtatagttaaaccagtgggccaagtcatacccattctttcttaatattactaatatgattatcaaaatgattaaatatcaaaagaatgcatatgaaattgctaacattctaagatactttagatatgatgtaggcacctaagtgaattgtaggtatcctgatacctactctatctttcccgttgcatacaatcccaacaagacaatatacctttgaagccaatgactaccgggtatcaagccaaaaaaaaaaaacccattgaaagaagcaaaggaaaaagaaggaaacacaaagaagccactcggtctgaggctgttgacaaattgtatgacaattcgtttgtgccataatgtttataaatagcgcgtgttgttgcctgtcactggcatcaggcatcaaggatcaagcaccgagccccaggatctccgtcctacgaaaaacttgcgaaacaaaaacccaagacatcccaagcacaatcacacacacacacacacacacacgcacatagccgcccaaaagtcgtggattctctcacttgtcagtcgcctgtcgcaagtgatgtctgccactcaaatctgtggaggagtgggtggattgggcggatcgggtggattgggcggattggttgaatgggggaatgtggcatgacccttgactcgctgccaactcaagtgttagccaactcgcacagagatttgctatctgggcaaccatcgagttcaatggtcaagtaaagttcggctttgttcgccccggataattcatactgccggtgatttcgtgatgggggaggagctagtaggagatggcaattacatgtaaataaattgataccgagcttgtgtgccagaaaagcgggagagatcaatgccaacagtcgttggcacttagcaaatggaaaaaatgcattccggcttccaccatggtttatttacgagtacaagggtggccaaagtgcttctgagtgaatgacaaccaaatgaaaaaaggccacgcaaaaaaccaggttggctgcccaggatcggaggtttggggagaggtgaaggagttcgcaggggtcggtgttttaggacgacatgcatacgcataaataaagacgttttcggcggcgctacaaagtgaggccgtgatttgcaattcaaaggcaacaaagttgttttttttttttgtgggagcaacacacatgacctgcggtggtaacaagaatggggatattgggaccaagccaagaatgatacaaaataaaggtagttagataaagatacaaatgggtgagttcttcaacaaaatgccaacagagttcagataaattaggcgattttagaactaaaacatcgagcttaatttaaactgacctttatttacaaaacgtaaaagaattatctcaactgcacacgataaatcaatttcaagtgatttgaacatcaatcctaatcaataataatccttaaagccagtttgctctgggtatcttgaagtcgattaaatcaagcgaaaccattcacctttgataccttctctgccaccctttttatgagcggcttttagcgcattgtaggcactcacaggacaccgacttcgtatggctgattatgtttatttatgcatgacagttaatgcattcaaatgtgtcacccttgttgttgcctcagattggctttgattgtaaaattaactcgatcctccccacaggagacacgaaagtgtggagctggaagcgacttggattgggattggctggctaaacggcgattatgtggccattgtacaaaaccactcgtcatattaaatttgccattaatttatgcctttgtcgccctggccgaaaattggcttagcggcttcccatgataaatgatgacaccgagttgcagagtaaactcaattcgcaggggcgttggattcgaggagcacgaaaagtgggggatacttaatcccccagtacggccagggttcaattaatggaagggggtggtggtggtgctgacctgctcattcgctggcaacctattttcacaccctccagtgatggtggtcattgacgttgtcctgccagcttgccagccagcctgcctggtatcctgccatcctgatggttaagtgagtgtgggatggcggtgtaaatgggagcgcagccgccagctgcgagtgtccttgctggtaattgcttgcccgctggcatggctgcagcaattattgcatactttgcggcacttacatttcatttaaagttattaagcgacaatcgcatcgcagtacgtctttaatcaactcagccaagtaaattatgccggccaagcgatccgctgactggttaaatcaattaaactaaaacaaaagccaggagcaggccaacgttcaatcaactggacggcggtgacagccccaggtcattactcaaacacacacacacacacacacagtcggagtgagatggagatgaaatgacagacagacggattggacagaagaggagaggtgagtagagcagggcaaatcctgggccaggacaactggccgagcacttattgtgatgaacacaatgttaacaggctaaatgagaaacaaatgccacaatcagacaacgttggaaaaacaaggagcagaagacgaaatgaaaggcaaccgaaaacaataaatcgcataaatcatattaaattgacatatcaggctaaaattgaccgcaagcagtgtggatgtgtgtgtgtgtgtgtgtttgtctctgcttgtgggatattttatcctacaataatatttctttatcaatttccacaacaagctcaagctcagagcttagtcctgggaaaagcaagaagagcaagaaaatctagaaaaaaccaaagaacacgaattagatgagacgcagcaaagagggcggcgaatgcctaaataaatgtttgaccaacaaagcaagccgaatcatatcataccactccatatcgcaccgaaattcccgcccaatgccacgcccactcaatcaacacatatatgaggcgtgtgtcatacagtccctgtccctgtccatgtccatgtccttggccaaattggccaggcttttacgatggccctgaagtttcctctgcggaattttccgattgttttcctccggcccacagacacagctgtgtcgcaattaaaatgtgtatcaagcatacgacgcgttgtcatgtaaaacgcttaagctgctcatccccccttccaccacggacaagcaatgtaaagtcgatcgggtaaatatgttaagcccgcttaatgcaaacctagcctgagggcgtttcgggggcgtggccccaacatcccgcatatgccaattgagagagggaaaagtgcaacatcattaattaatgcacagtacgatggtttgcagcctgcggccacgttttataataaccagaacattaaggcgattaaagatgaaatccagtgcaactcgtcccacatctaagtgtgcacttaatcccccctgccgaacacctgggtcaccaatcgctcataaaccttccccccgccaccagcaccttcaagtccaggacctcagccaagacacggcccgttgacagcccaactcgtctcagatcaatattggccaagggcaattaatcatttagtgggccatctcacacacgtcgcccaatgcagagacaccgaatgacaaacagagaggagcagagcaggagactgggcaaatggagcggagttgggcacaggacaaaagtggattatacagtcagcccagatgttcaacaagaaattacttgtgattacaatgcacagttcggtgcaaggatatagcaactatcaatagagattgtccatagtcctgcattataaatcatgttggaaaacccaaccccaatagatttgtttaatgatttacagtcatattatatgacaattatgcagattaaatattgatattaataaaaacaaaatcgcatttgccgagcgaatgtgattaacgattatttcattaatctcttaaagagaatgcaattattgttaaaaacaaaaaaaaaacgaaatcataaaagccaacacaagctataaagctgaatattcctggcaaaatacaaccacttcatgctttaaaattcccagcgtctaaccgccttttataacaatttaatagcttcggaacggactgttaactttatgcgccaactagtggcttaaagctcaggatgccaatcaaaggattacggacgcaaagccatttatttattaagagccatgccgtgcccgctggatgcgtgtgcgcaggcacttcagacattcgaccatggccacataacgcacactaaacgatcattaggtggacccccaaagcagtgaccccccccccacctcctcacccatcttgtcgcacatttcgcatcaaattaacacacaaatttttacaacctagtccataaaagcgctggtctgaactataaaaacaatcaaaacgagttacagagccgccaattttcttaggtttttctcgtccatgtcgtaaactcgacccgcccgttgctcccgattccacatagcttctttacagcggtagtaaatcataaaaaaaagggggctagagcaataatgaaaaacaagaaatgccacccgagcaggggacacacattaaaagttaaaaaaaaaaatatatatatatatagaacaagcaaaaaaaaaaaacggatggagctgcttaaatttagtagtacgatgcactcacctgctcctgttttcgtccatattcttattcttcattcttatccttatccattgcttttcctttcgttttctaggttcaagagccgcacggtgagatgcctggcatcggcgacatatatcgtgcggcagatctgcaaccttggcatcaccgtgtacactcccagcgtggccctctcgacggtgattggcataccctactgggcctccattacgggcatggccgtcatttgcatattcttcaccattatggtacgtactgtgctcatcgctgtgccacgggaatgccagcgatttaatgatgaaaatatttaaattcctcttcacccttgttccaactcattagggcggcctgaaggcggctatcaacgcggacgtcatccagacagtgaccattctggttgtcactgtggcggtttgtatccagggaactatctctacgggcggcgtgaagaaggtttaccaactaaatcgggacaatggtaagcagtggcagtgggtgtgggatttgtttcgattgatcatggcagcttattagccagctgccaggatgtgtgcgtgtgtgtgtgtgtgtgtgtgtatagtgctgacgaatgatgactattaaaatggcatccattgtggattgccgttcgctttgcttctgttcctgcgtcggctcattatgcacataaatgatgatgataaaagtgtcataaaacagcggcatccgaatccgaggtgggaaggaggaaatggcagcctcgcatgacgacagtaataaatgtgtgtcggcggagcgtttgtcactcgagtttgagttgttggctgtcattgtgcggcaatcgtagggctcctgggaatcccttcacgtgctcctcctctaacggcagctcaatctttttcccgccataaacatgcactaaggacttcgttccttctattttcaggacgtctcaacttttggaacttcacgggcgatatgactgtcagagtggataccacatcggcttggctgggccaactgttcatgtccctctcccagatcggctgtcagcagaactttatgcagcgttatgtcagcctcaagtcgctcaagcaagtgcgtcggtaagtgactatcttcggcgaaccacctattaacgaaaatctattaattaattaaaaaatcttatctgattttgcagagttatgctgaccaatgtgcctttggtcttcttcttcttttccatctcctggatctctggcatggtcatctattccacgtacatcaactgcgatccctacgccgagggctacattaagaaacccgatgagattctgccattctttgtggaggatcagctcggttttctgcccggtttcgtgggcattttcatggccactctgttcaatggcgccctttggtaaatagctcacattctcacaaagttctttcactaatccaagctaacattccagcatgatggtgtcgaatctgaattcattggcaacggttatttgggaggacttcatctcacagttgccgaaattcaagggactctccgacaaacagcagctacgaattctgaagtcgatcactgtcgtctgtggactgattattatgggcgtggcctttggagttggtctgctggcgggcgttattgagtcctcgctgctggtgttctcggccacatcgggtcctttgttgggttgcttcatcctggccatgatggttccgattgcgaattggaagggcacctccgccggcatggtcaccgcctgcgcctttgtgctttggatcattggcggtggcatgaccgttaccaaggacaatcccctgctgcccacctccacagatgtgggtttttaaagcatttccgttttaagcttgatgcctaatactttgcttctttacaaaatgtagggctgcaccaacgataccttcgcgcagtccattggcaagcccatcgtggaacagggacagatgccctggctgttgtcgcacacgcctattgatggtttcaaccagagctttgtgcccacacagcccacaattgcacctgaaaggtgagataatttaattattctaaaagtattgcgtaagatagtacgtcacctggtgaaaatgtgcactagaactttgttatcctgatattaatgtacgcttaattccaatgcagatccggactggagaccttctactcgatcagcttcatgtactacagtttaattggcacggcactgaccgtgatcattggcacagtgatcagcttgctgactcagcatccggatgacgcctacgacggcaagctgctgcatccgttgatctttcggctgtgcgagcgtttctccggccgaaagccgtactacgtgaagcacgaggaggagtccggactgaatgggcggagcagcagtgactcctcggccacgacaaccacatgcaaggcggagaaggtgaatcacggctacgagtcctcgccggaggacaaggagaagagcagtcccatcgccgtggtattcaccacctccgagggaacgggatcagcaggggatcagcagtcgatatgcgacagcagtaggatccaattggacattgtgccgggcgagggcgaaacgggagtgtatcgccaactggccgggcgatctgcgctctgagggttaactatgttgcatacgtagatagtctgaccctaaaacttagtccgtagtacgtaagctaagccgtagaatagagcaagttagttagccaagtgtttcatgtctataaagatgctgtgattttctgtgcgcgactgttgttgagcaattgctcgcgcatttcattcgcatgtacttaacgcatatgtgtgtgcgtgtcagcatgcaataaataaagacaaataaacgtattttttataaaaaacaaacacaaagaattacatttctaacgtcaatttttacttttcgcgcgctgaaactttctaaacttggccagtgctgcccatcaaattggtctatcgataactgcgatgaccagggcaacgagagtgcagcgtgagtcacgactgttacgtgacgtaagttaagcggggaatgaagtggatttgtaattagatatccaaagtataagcatgaatataaaaatataaaataagctgtttaggtattttaccaagcattgtatttgacataaacatgaattttaaagcagctttatttactcgtgagccatcgtgactgctcccagctgttctccggtttctcccatcactattatatttatgggtctttttgtttggcgtttttgcggccccccaaagaatgcgaaaataaaacgcaaaaagtctgatccctaagcaatcaaacgtacaacatggccacgttggagaagcccaaaaaggaggtgagtcgtgggcagtaaaaagtaacgaacctaataatgaaattgcagaagagcaaaaagtctcgcaacagagtgccgatcgaaaaagaggaagaggaacctgctgagttatcaacaagtgaagaacaaagaccagcggagaatgtgtctctgttggaggaattcgagcgcgttgcgaccttggccagcagttccagtggcgaggcaatcataagccacgagtgctgcatttccagcgatgtaggagtaacgtcgcaagagccagaaggaaca

SEQ ID NO: 41291 - DNA, 2294 bp, DROSOPHILA
ctcgcagacacaagacgcagttcgcagttccgaatcgatcgatccgtgcagcactcaaaatccacatccacttcagtccacttcaaaatcgcacccgaaaccgagttttgaatttgtgagaaaaacaaaaacagaagaaaaaaaactcaacgagacgcaacggattttgtgctaactaaaattagtgacaccttttcttcacgtttgactaaggcagaagcagaagcaatagcaatagcagcatcaacatggccaaggacttgagcactatgggatgggattatctgatgtttgtactgtttatagccctcaccgttttgggcccgttgtggaaacgcatttttggcaaaaagaaggagcgcagcaaggccgactatgtttttgccaccggcggagtttcgatagtggcagtcatgatttccattgcccgaggaaccttgggagtgagatccgtgctaggctatcccagtgaattgtactaccgcggatcggccatgtgggagatcatctacggcatgatgagcgcctatcccatcgtttgcttcatgttcgtgcccgtgtactttaatctgggcatcacctccgtctatcagtacatcgatctcaggttcaagagccgcacggtgagatgcctggcatcggcgacatatatcgtgcggcagatctgcaaccttggcatcaccgtgtacactcccagcgtggccctctcgacggtgattggcataccctactgggcctccattacgggcatggccgtcatttgcatattcttcaccattatgggcggcctgaaggcggctatcaacgcggacgtcatccagacagtgaccattctggttgtcactgtggcggtttgtatccagggaactatctctacgggcggcgtgaagaaggtttaccaactaaatcgggacaatggacgtctcaacttttggaacttcacgggcgatatgactgtcagagtggataccacatcggcttggctgggccaactgttcatgtccctctcccagatcggctgtcagcagaactttatgcagcgttatgtcagcctcaagtcgctcaagcaagtgcgtcgagttatgctgaccaatgtgcctttggtcttcttcttcttttccatctcctggatctctggcatggtcatctattccacgtacatcaactgcgatccctacgccgagggctacattaagaaacccgatgagattctgccattctttgtggaggatcagctcggttttctgcccggtttcgtgggcattttcatggccactctgttcaatggcgccctttgcatgatggtgtcgaatctgaattcattggcaacggttatttgggaggacttcatctcacagttgccgaaattcaagggactctccgacaaacagcagctacgaattctgaagtcgatcactgtcgtctgtggactgattattatgggcgtggcctttggagttggtctgctggcgggcgttattgagtcctcgctgctggtgttctcggccacatcgggtcctttgttgggttgcttcatcctggccatgatggttccgattgcgaattggaagggcacctccgccggcatggtcaccgcctgcgcctttgtgctttggatcattggcggtggcatgaccgttaccaaggacaatcccctgctgcccacctccacagatggctgcaccaacgataccttcgcgcagtccattggcaagcccatcgtggaacagggacagatgccctggctgttgtcgcacacgcctattgatggtttcaaccagagctttgtgcccacacagcccacaattgcacctgaaagatccggactggagaccttctactcgatcagcttcatgtactacagtttaattggcacggcactgaccgtgatcattggcacagtgatcagcttgctgactcagcatccggatgacgcctacgacggcaagctgctgcatccgttgatctttcggctgtgcgagcgtttctccggccgaaagccgtactacgtgaagcacgaggaggagtccggactgaatgggcggagcagcagtgactcctcggccacgacaaccacatgcaaggcggagaaggtgaatcacggctacgagtcctcgccggaggacaaggagaagagcagtcccatcgccgtggtattcaccacctccgagggaacgggatcagcaggggatcagcagtcgatatgcgacagcagtaggatccaattggacattgtgccgggcgagggcgaaacgggagtgtatcgccaactggccgggcgatctgcgctctga

SEQ ID NO: 41292 - protein, 681 aa, DROSOPHILA; identical to SEQ ID NO: 27141

SEQ ID NO: 41293 - DNA, 4643 bp, DROSOPHILA
tcgttaatttgtggagttcaatattccaagccatgtatactttatttttatgttcccgtttttttgcacgtgccttgcattttttatatcagttactcgtagattttgtcatgagtatgtaaaataaagtaaaaaaagtaaagtaaaaaaatgtttcagtaaagagttttgttagtaaaaacttccaaaaaacggtccttctggcggcacaagcacgtttaatagctgcagcttatgtttccttatcttcgtattgctttactccttcgtataccttccgtattttgcgatctggagaatagtagtggccaggtcacgctattaacgttttagctcgaaataaaagacattgctaatcgacaaggaattgaatcaaacagatattttaattttgggaatacggactccagctctactcttctcccactctatcgaccacaagtcggtcaaatctggcaaaatttctgaaagagaacgatttttttggatttttttagtttccttatccataatatccagtgacatggcgaaggaacaccaaaagtgcccgaagttgttcagaccattcaactaatttgcagctgctaattttacagtgttcattacagcagtttttcagctgtactacgcgttttattcgatattttcaaagattttcaaagccgcaagagggcgctgatgtagaaagcttggcatcagtaataccaagatcgtcgcgtaaattaatattatttatattctttaataagaatacgttaacaacttttacatgtgacgaaaatatagcggtacagtgagacttccccattgtgctgcttacttgacgtatcctgacagattttagttcctggccgtgacgttagaggaatcttttgggctgccacagtagtacagaagtggtacatgagggagttgcaaggatccgtaataaaattcccccttttgtcttaacgtaacgtatttattgtggtatgtgagtaaagtgtgagtcggtggacttttaggccgccttgggattccgcacttgtccggcgaagaggagaagtccggttgccttctctacgatcatgtactggaagggccggttgagcaggaacttgggcggtgtggccttgttggccagcgctgcctccgtgacggctcccgccgtggttccctgttcgtccacaatgatcttggttgagtggacgaccagcttggcaaacaagccggaagacattcggtccaggttggctgtattctcgtcgaacagatcgcgaatgcccatctagaattagaagttatttacaaatgtatttccagattggatttagaagttctgtcacctggatgaggactcccttaagagtgaaatctgtggcagtcacaaacttgggcatcatgacctccacttcgttgtcctcggaggccctgttcctgaatgccgccagtcgctggaggatgggcctcaatcccaaggccttcagattattggctacgtcgtttagcttgaatccgcgcttgggcagcaccacgatcatcgccagacgatcctgggtgccgtagggcagctccagcacatagccatccaaaccctctacgtttgagacgtaggcgaagttcgcttcctgcaccatcatgggaatctttccaatgacttcgccgctctcgctgaaaaagggttcctctcttgtcagcgttttgttgaagggaaactgcaagcgaaaacgatatatcgaaggatttgcaagtggacaagttcacttcccaccttccattggcccttgaagtacagagacgagagcagaaacatcttcgctccatatacatcctgtggcagaatggtataaggaatcagaccgcgggtcgtgcgatttgtgtcctcgttgatctggatcaccgaatccgggctatagaagtccacttccatcggctggacattgtagttttgaatagcatcgcggtagttgttcttgatgggataccccttgccggtgtatatggcctgcagggtggctacttcgatggtggaagtggtgatgcttagaagagggaagggggtcaccgcgatccataaatatgcaatcctataaactcacttcagaaatgagctccaaaccttgtaggcgccccgaagcttttcgtcctcgacattgatccgcaggctttttttcaactggttgcgggtctctccctcggatccctcgtagagaagcaccaggagtgaccagacggaaaagggcgatatcatgaaatccttgttggccttctccacttcaacggatatgcgctgcaggagatcgagggcgaagtcctggaccccctgcgaaatgctgaccaggacatccgtgtcgaagttgcttctcatggactggatatggctgacgccactttggaaagccgtgggagctgtgaatgcggtaaggggattgcccactgaaagctggaggggcgcttggttgttctgaggatccgccgagcacaggaagatggctcccaggagtagtggaatccatagcatcaggcaatctggattaagatgtgcattagaacgtcatttcattaaggatcatgatgttaaaagccgcactaaaattattgtattattttacaccaacatcattttaaaatgcgttaaagatggataattttataaatttcgagttaaataatcattttacggtaactgttttccatcggaatataattttattattcatttcagaatgtaagtttaaaccatatacatatgcagttagccaattgtccttgaactccgtatgagttaaaccaacaactcgattttgaaaaactgcctgaaaatccggcatagctatttccggtctaatcaaatcgaatgaaattcaaaggcactcgcgtgagtactatgtacatatagtattcccagatgcgtaaaaataagcattttccaattgatagcgatgatccattgacgacctcatgtgtttgtacgtaatacaaaatgtatatatgtatgtacataatatgtgtttgctgtgcacacacgagtacttgtaaattttaaatctctttattgattgcctctaaaacaacatccccgcctctgggaaatattccataattaattgaccacgaagcttacctgcgattttacccattttttgtggctgcgatcaagaattggctcaagcctcgcttatcaggccttcaggccgggcttttaatattatttataattgggccttcaggcagggcttttaaaatttttataataattgcgcacacaaatgaatcacacttttgcttaaccatgtgggtgtgcatcaattattgagaggcttttaaaccttttattgatgtattttggggtttttcgatgttgacaaagcgacgttcatctatatgtctctatacactgttgtcggtcggtgttattcgaaaaccggaatgcactgaggggaattccacatatattatgtatacaaatacacgctcgcaaggagaccatacgtacaggtgggtggggtgttcgcgtatgcggttgccgcttatataattctatatatttatttcaatttgtgaacccagctactggtggttttcggttttgccaagattttgatgccagatcgaacccacgtccacacaactccccacaaacaatgtcaacctaacgcacgagcatcagctgagtgactgagtgactgagagactgctccatcgaccattcagcaccgtactgatatggtcatcccatcccaccgccaccgccatcgtcccacagccgggtccaaatcagttcagactcggattcagatgcgagagccgcagcgagagaacgcggtattgatattggcagacctttgtctgccgctcttgacaatgaagcctcattcgcgaaatggaaatcaggtggaatcactactatgagttgcagctaatccgatggtgaaactggttgaaatgccgggttaactccagtaactcacctttagatcacatctacatcaactgtgcctgaatccaagatattttaaaaggtaactacatgtattcaaatgtatatgcaatattgtaagctcgtggatggatggttaagatgacatcaaatatgagctgtagaagacatatgcaggtagctctcaactgtgttttataatcatacaaatgaatgttttcaataccagtaagtttacaagtgcaataaacaacaaacttcaaggtaaaaaacatttttttttcccaagtgacaggtgcaaactaatgatatactagaaagacaatgcttatggatggactggaatatatgctaggcaccattttaggaaacatcgatggatacgaagagaggatgacaggattaatccaagcgttaactttattaaagtatttgaattggaaatatccgtggtaacgcttgcatagaggcattaccaggatctttgcagtattaataattaaatgtgttgggtcaggtttcagtggtgttgtgtgtttcctggagatcttcattcaataaattcaataattgatttatttattcttgcttcggcctcgacgaccgcgtaatcttcgtcgctccgtcgtaatattatttattggattataattcgctcgtacatgttgatctactaaacatcgttaaaattttgcgagatggaattttctataaatgtgaccct

SEQ ID NO: 41294 - DNA, 1877 bp, DROSOPHILA
ctcgtgcgttaggttgacattgtttgtggggagttgtgtggacgtgggttcgatctggcatcaaaatcttggcaaaaccgaaaaccaccagtagctgggttcacaaattgaaataaatatatagaattatataagcggcaaccgcatacgcgaacaccccacccacctgtacgtatggtctccttgcgagcgtgtatttgtatacataatatatgtggaattcccctcagtgcattccggttttcgaataacaccgaccgacaacagtgtatagagacatatagatgaacgtcgctttgtcaacatcgaaaaaccccaaaatacatcaataaaaggtttaaaagcctctcaataattgatgcacacccacatggttaagcaaaagtgtgattcatttgtgtgcgcaattattataaaaattttaaaagccctgcctgaaggcccaattataaataatattaaaagcccggcctgaaggcctgataagcgaggcttgagccaattcttgatcgcagccacaaaaaatgggtaaaatcgcagattgcctgatgctatggattccactactcctgggagccatcttcctgtgctcggcggatcctcagaacaaccaagcgcccctccagctttcagtgggcaatccccttaccgcattcacagctcccacggctttccaaagtggcgtcagccatatccagtccatgagaagcaacttcgacacggatgtcctggtcagcatttcgcagggggtccaggacttcgccctcgatctcctgcagcgcatatccgttgaagtggagaaggccaacaaggatttcatgatatcgcccttttccgtctggtcactcctggtgcttctctacgagggatccgagggagagacccgcaaccagttgaaaaaaagcctgcggatcaatgtcgaggacgaaaagcttcggggcgcctacaaggtttggagctcatttctgaacatcaccacttccaccatcgaagtagccaccctgcaggccatatacaccggcaaggggtatcccatcaagaacaactaccgcgatgctattcaaaactacaatgtccagccgatggaagtggacttctatagcccggattcggtgatccagatcaacgaggacacaaatcgcacgacccgcggtctgattccttataccattctgccacaggatgtatatggagcgaagatgtttctgctctcgtctctgtacttcaagggccaatggaagtttcccttcaacaaaacgctgacaagagaggaaccctttttcagcgagagcggcgaagtcattggaaagattcccatgatggtgcaggaagcgaacttcgcctacgtctcaaacgtagagggtttggatggctatgtgctggagctgccctacggcacccaggatcgtctggcgatgatcgtggtgctgcccaagcgcggattcaagctaaacgacgtagccaataatctgaaggccttgggattgaggcccatcctccagcgactggcggcattcaggaacagggcctccgaggacaacgaagtggaggtcatgatgcccaagtttgtgactgccacagatttcactcttaagggagtcctcatccagatgggcattcgcgatctgttcgacgagaatacagccaacctggaccgaatgtcttccggcttgtttgccaagctggtcgtccactcaaccaagatcattgtggacgaacagggaaccacggcgggagccgtcacggaggcagcgctggccaacaaggccacaccgcccaagttcctgctcaaccggcccttccagtacatgatcgtagagaaggcaaccggacttctcctcttcgccggacaagtgcggaatcccaaggcggcctaa

SEQ ID NO: 41295 - protein, 442 aa, DROSOPHILA; identical to SEQ ID NO: 25179

SEQ ID NO: 41296 - DNA, 9005 bp, DROSOPHILA
tcttgaaacttacttccttatagctgtcaggatcatcgttaagttggctccccattgtaatgagttcctcgtgaagcaaaggtttgtggacttgaatgagcaaattcaggagaaaatactgacgatcttgcctttgattataattcacttctacatttgatgatccgaaatacttccaaggactgccaaaactttctgttctattttgaagaacgagaaaacaaaggcacacaaacgttaatcttaacattttgacgcagactgatcgatgacatgaactgacttctgcatatattcttaaatgcgattgttttgtttcatacccttactaagggagcattgatttccacgtaaactagtatataaatgcctgccacttttcttaaaaacttctatatattcccggtaataagaaaagatatcatagatccgtgcttttttatcataaagtcttctttttcgtataaatatagaattactgcaagggtatataagcttggaattgccacagctagcttgctctcttgttttcttttcatataaaacacactgaacttggttatcgctgcggttgattatgagcggttcttgggagaaagtgagcattatttgtggtgatcaaaattcttagttacagtaaaacaaattcgtttttattggttcaacaagaaacactatgaaataaatgtagcccaaagacccagaacaaaacattgtagatatacaaagatacatatgaactttgtaaaactaaagaatgagattgctaagtgcaagttaagtctttgtgattaagccaaaatcgtgtagcattggatatctgatatcggatttattatttattatttattaaatacaccaattcaaacaatgcgaagtttagagcttgaaaaacttgttctgatgtttctgcttctgcgatcttttctttggcactttctgggatgagatgatggttggcgatgcttcgatgggatctgattgactcgttggaattctttttggtctccttatactacgaactaattaaacttataggtgtactgatatctaagcggggacgtttcccggaatgtttcggtgtcggagccatcatcctcatcccccgatgagggcggcgtctccagcatcggcatcgaaaggtccagataggcatcgtttggattgctactagcctgctgcaggatcccatcgaaactctctaccagctccgcgaacgtgggtcgtgcacaggactcaaagtgccagcactgtcgcattaccacgtagatgttcagggagcacttggccggtttctccatgcgctgacccgtaatcaggtagctgtagagctcctcggcagacagtatgtgcgggtatggttgatccccgtaggtcatgatctcccacagcagaacaccatagctccagacgtcgctctgtgagtcgtacttcttctcctgcagcgactcgggcgccatccacttaatgggcaaccgtccattggtattttttcggtagtactccgtatcttggatatccctcgccagaccaaaatcggcgatcttcataacgtatccatcgcttacaaggacattacgggcagccagatcgcgatgaatgcactgaaagagtaagagttataagtatctttatacatagttctgggaggggaggttttaaaagccagacattcttggatgaacttacccgtcttgaagcaaggtactccattcctcgagcgatttgaaatgcaaacttggtgagctccttttcgccaagatgttgagtggaaatcagtggcttgtcatctagatagccatcactgtcactccgtcgctgtggagcaccaggtcgattctgcttgaggaagtccttgaggtttccgtgtggagcatactccacgatcacccacagaggaccgccctggctgcagcagcctagcagattgatgatgtttatgtgcttgccaatcattttcatcacctccatttcacgcaccaaactggccatgtccgtatccgtgtgctcctccttgaccatcttgacggccacgatggtttcggccagttgtggactcctgggaagcccctccgcctccgccatcactacgcgtccaaaggcgccctcacccaaaatggagcccaagctaagctgctgcctgggaatctcccagtttgagtccagcgggaactcatactcattaaagccctgggcgggatcagtaccgccagttcccgttgtggaaacggttgttctctgcttctcgatccttatcactggcatctgaagatcgccggagctgcagccacttccttcttctccacccggtcggtatatgatcacctttttagtccactgatgaaccgtttcgatgcggagcttcaggagcttctccctcctcagccgacgcagcatgaacgttatgaaagcactgcccaaaaggaacaaagccactatcgtaatagcggccaaggtgaatccgagaggatgggcgtgcagcagggcgtagatctccaaaggtggcagaggactcactaccctaaggtacacactggagttactccttcccagaccacttgaggccaaacaggtgtaccagccctcctggtcaaaggtcacattacgaagcgttaaaactacggagtcattcgtcacggtgaagttgagattctggatttccacagacttaaggccgtccaaggaggcattcttgaggacaacccttttccagctgactgttggatgcagatcagagtagacggtgcacttcatcaccaagctgccattgactttcaccgtctgattttgcggcaccacgattattggtgcggatctcgtgcgatcgtttatttggacactgaagtcaaactggatgcagccccacgcattgcacaccttacagttgtatagtccagaatcctcgctggtggcctccacgaagcggagtgtccagttcttttgcacatagacgccgagttcacggtttagcggcttcttgtccttcgtccaggtgatgttcgctttgccgtacactggacaggctagattgacagtatttcccgataatgagtgctgtaatcgtttcagctcttttctgaacacaggtggaccaacgccgcctgatgcttccgctgctggattttccacgtcgtcatcgttgtcctctccggtggatgcagtgggtattgggctggccacggtggtagtagtggtcgtgcgaactgtggtagtatctgagggactgtaaagatccacataggaggcggccacagtgcgtccaacctggttctcggctatgcatatgtaccatccgccatcctccatcaggacatttccaagacgaagtacctgcggttcatccattcgggtaatcaatcgggtaacatccacaggtagctgggactgctctcttaaacgctgcaagaggtcatcgatgttgtccgcattccccttatgtagccacgtgatcttcggctccagggcagagtcctcaagtaggcattcaatgctcacattgtccccgagggcaatgctggtattgcggggatatccgggctttagcatgggcaccgtgtgctttctgcttatcacctccaattgggtcggattactcctttggcagtcctgttccacgcacagctcacagtgatagcttccagcatcctccggctgcagttgccccactgttaatgaccaccttttaagcttaatgcgtccacgtccaccaaggatttgagtatcattgtgcagccaggatatattaacaccctttgcatccggatccatgggactgcagttcaactgaaaaaggccacctgcggtccgttgtacggttttgggtaggggttgcagcaacttcagggatcgactctcattcaggggctgaaaaaagagatctgactccgggagggccggtgcatcttccaacttgacaaagctggcgatatcattgccaactggttccttatggccaacaacaagggaaatattgtaccatctgttctgactatccaggcagccgtagtttccagaatttccggactgtgctcgttcaagtcgcaaaagggtagccctcagttgaaacttatcctcatagaaccatttggccatgggtcggacgcactgcagcgtgatgtccatgtcggagagcagatggcgctggcggggactgttttccacagtcacatcgatgtagcaacgatgatggccataatcgcatcccaggtccgcagcggcagagacgatcgcaatgatcatcaccagcgtgatcggcacttttgccatgattcaagtggattctcttgagttcaacagccaccaagatctcgtatctggatgggcacgatcgtgtacatatgggttacagttgcggtcgaaataatatcacttcctgtgggtatcttcattcgagttcctcgatttcaaatcgagcgttctccagctaaaggaaaggattaaatatatgaattacatggcattgattgatatattatactttaaaaataacactttggaattttgtttaatttaactaaatttaagaagttatgaatgcaaatattattagctattcgttacttgaataccactattgtgccactattcttttgaccgcagctgtataagtggatcaataaatattgccaaatctccgcttcactttttgcccctcccttagttcccgatctgtgtcattttatttatttattattattgtttaatattttattgccaacacggcacacagccaagtcaagtctgtccgcaccgatatgcaaaaatccaaaggagaagcaactgaaacaaacgaaaactgtgtgccctgccttcgtaatgagctggaagacgtggtcgaagccaccgaattgccggacacactcgtcgccacccactaccgaaggggatctccattataacttgtctatattcgacgttcgccaaatgcttttgttgctgcggcctgcgctcctcgatttccattcaactaaatgccgaacagttagaaaatcacttagctatttgttgaaatcagttgttacagtggtgtcacacttttcagttattccccaagtactatacttgcacttacaaaacaaacagacaaggtgctagagaattgcaacaacaaatcgagaaatacctaaatgatttgccacaatctgaaatagcaactaattaacattcaaattctctgtgcaatatgagctcagcattttaatcaattaaaaggtatatttataataaagttatgctttaaacactgaataacactgctcgaaaatcctaatagcagataattatttcaaaattaatttttagtataatcacgtaaagggtataggacagtgggtattccatctacttgggttcgtcaaatgtttgccaaataaaaataaacaatttttagttcaatgattaatgatgatagggtaaattcccaaacttgttgtctgcgaatgtaagctttgtacaaaatgtaaagttttaaacgaagtttagaaaatattgataataatgggggcatagcatagttcgactattttttctatcagaaaattaaaatatttttaacttttataaaatcgttttgaccactgtgctgtttaatgaaaagtattttattgtttgtaaggcttgggacaaccgttgcgattgtcattgttgttgttaatatggtgctagtgctgccagtaattgttgttgttgttttagccgatattgccgctagccgctagccgtttgacttcaggcccgatttatgtatgtatgcacacgcgtcgcaggttttaatttattcaattcctttttttctcatttgttgccaaatacgagtcgatcgctgtatttgaagtatgtattattgctatttttatttaatttttttctcagtttgtcattcattcaatattattcgattcgattttaagccacaagcgcacatggccaaaaccgtttagctcacacctttttatcttgtgaattattatcgagcgtataaatctaatgcatgaacgatttgatatttcaacttggtcaatcagctatatcgagaatagaataagttctttatttggaaccctgggtattaactccccattcagttttctttctgcaaacattgacttaatgtaaaaggaatgtttggatcaagacataaattattcattcatacaattgacatcactttaattttattttcttatttatttcattggtgtttatttaattatgtatgaatcagttttatcacgtttctttgtctcaattaaaattttatttttaacatttggttactttgcagactttttgtttttatttatctgtggtttatgatcttttggctgcacttggaaagatttgtatttattttactgctggaacaattcactcttaaattattttttgctttattttggtttcactgctgcttgtcagttcgcagtgggaacacaattcttttctgccatgccacaaccccaaatctttgaccaaaaaaatcacgttctttgtcttttattttcgaggagccggagaaggcaaataagattgcaaaaaacattgtcactatgtttattcggctgtcaatcgcggttggggcttgtataaaaatcttaagactcggcaagagggcagcggaaggcgccttgcatttccgcttcgttgccaacttttatttccctttaccaggcataaatgaaaagaaatatgtgatgggtagctggtgttgggcggggggggggggggggggttcacttccgttgcactaaccgtaatccgtaaagtttgtggaaggagccaaccgattggcttgaatgtgcgcaaacaactgaaagtaacgatcgaaacggaagaaacttttacgcggtacgatacgaacgatccgaacgtgccgatcgaaccgaaccgatccaatacgatccaatacgatacgaaacgagtggatatctgtggttccctgcgataatgtttgctaggatcctgggcacagggtcttcggatgggatggtatgggttcggacggctacctgatcgaggtggtctccctcccgcatgttgcaattgttttcgctggtagttttcctgagcggtttcctttctttttattgctggtttgctgctgctgcttctgctaggttcttgttggttttattctaagcatgtttgcggtggcttcgactcgttgaaattctttattatctggccttcgggttccctccctgtttgtttgcttggcggcttaatttatgcaaaagaaaatgtgtccattgtcttagtggtgtgcagtacgtgcgcatgcgcggtaatcgcatatcaataaggaaatatccgttacgtgactgatatccaaaaatctcagttgctgcatgtggcatggcagcagctagctcccgcataggccaaaatccagatccagatgccgggcacgtaatctacccaaaaatagttaaatgcatttttgatgcacttgttaggggctatgggaacaaatgcgaaacagttgggaaatacgaaaaggagggacatactatccaaactagctatcaaaaacttgttatagctaaacacaatttccggtgaattaataaccaaactcacctgatgtcttcatttgttaaggagccaccccttaacagcactcatgtttaccgaggtcagaatgcgaaaagatattagttcttaaatttgaacatctctttctcttttttatacatgtatgtacattataattaaaatataatattctttcaatttaacactccggagtggtatatggatttatacgaagtaatcataaaagaaatttggtttttatttttcaacaagaaaaattatgaaatatgtactacctaagacttgcgtcttccaacaaaatgttccattttccagatgtacaaatatgcaaaaaacaatttaaaataataataatgctaagcttataagtctttgtctttaagccaaggtcgcacgcttggctacaaactccctagaagtcttctccttgttggtaaagcgagcatacctaccaagagataattaaaaaggtaagaagaacagaagaacaaagaagacattgttacgtacgttctgtgatatttggccacatcggaggcgctgagcgaaggacgagtggtttggaacgactcaatcaggtgcttctgcttcaaggaaattttctttgccagtttctgggaaagcaataagaaacaaatggtattttatactgtggccagagactaagaactacgtgactaatcattgttgcaggaagtagcatagatttcacttttgatttaaaagacaaacacgtaaaggagtttttacatagaagttacatttgaaatcaggatgagaaacaataaaacatgaaagaaacggttgaaagcttgcatgacccataaagcagattgtttccggtgaaaataattcccagctcacctcgtgtccgaattgagctagcgcctccttaaccgccgccatgttcgccgaggtcaggatgctctggatatcggcgccagtgtagtttgcagtttttcccgcaaaccaatcgaagtccacgcactcatcaaggctcagtgttgaactgagtgcttcaaatatacgtactctggccggagcatccggcaaaggacactccaccaagcgatcaatgcgaccggatcgaagaagcgcgggatctagcagttccggtctggaggtagctgctatcacggtaactccctgcagtccttcaacgccatccagttctgtgagcaactgatttaccactcgatcggtgacccccgtggaatcgtgaccacgtttcggcgccaagctgtcaaactcgtcgaagaaaagcacacatggtcgggcactgcgagctcgattgaacaggtttcgaacattttcctcgctttgaccaatatatttggcgagcaactcaggacccttgacggaaatgatgcgcaggttccacgatgtggccaactgagagaccagataggttttacctgttcctggtggcccatatagaagtactccggcct

SEQ ID NO: 41297 - DNA, 3514 bp, DROSOPHILA
taggtatgctcgctttaccaacaaggagaagacttctagggagtttgtagccaagcgtgcgaccttggcttaaagacaaagacttataagcttagcattattattattttaaattgttttttgcatatttgtacatctggaaaatggaacattttgttggaagacgcaagtcttagctggagaacgctcgatttgaaatcgaggaactcgaatgaagatacccacaggaagtgatattatttcgaccgcaactgtaacccatatgtacacgatcgtgcccatccagatacgagatcttggtggctgttgaactcaagagaatccacttgaatcatggcaaaagtgccgatcacgctggtgatgatcattgcgatcgtctctgccgctgcggacctgggatgcgattatggccatcatcgttgctacatcgatgtgactgtggaaaacagtccccgccagcgccatctgctctccgacatggacatcacgctgcagtgcgtccgacccatggccaaatggttctatgaggataagtttcaactgagggctacccttttgcgacttgaacgagcacagtccggaaattctggaaactacggctgcctggatagtcagaacagatggtacaatatttcccttgttgttggccataaggaaccagttggcaatgatatcgccagctttgtcaagttggaagatgcaccggccctcccggagtcagatctcttttttcagcccctgaatgagagtcgatccctgaagttgctgcaacccctacccaaaaccgtacaacggaccgcaggtggcctttttcagttgaactgcagtcccatggatccggatgcaaagggtgttaatatatcctggctgcacaatgatactcaaatccttggtggacgtggacgcattaagcttaaaaggtggtcattaacagtggggcaactgcagccggaggatgctggaagctatcactgtgagctgtgcgtggaacaggactgccaaaggagtaatccgacccaattggaggtgataagcagaaagcacacggtgcccatgctaaagcccggatatccccgcaataccagcattgccctcggggacaatgtgagcattgaatgcctacttgaggactctgccctggagccgaagatcacgtggctacataaggggaatgcggacaacatcgatgacctcttgcagcgtttaagagagcagtcccagctacctgtggatgttacccgattgattacccgaatggatgaaccgcaggtacttcgtcttggaaatgtcctgatggaggatggcggatggtacatatgcatagccgagaaccaggttggacgcactgtggccgcctcctatgtggatctttacagtccctcagatactaccacagttcgcacgaccactactaccaccgtggccagcccaatacccactgcatccaccggagaggacaacgatgacgacgtggaaaatccagcagcggaagcatcaggcggcgttggtccacctgtgttcagaaaagagctgaaacgattacagcactcattatcgggaaatactgtcaatctagcctgtccagtgtacggcaaagcgaacatcacctggacgaaggacaagaagccgctaaaccgtgaactcggcgtctatgtgcaaaagaactggacactccgcttcgtggaggccaccagcgaggattctggactatacaactgtaaggtgtgcaatgcgtggggctgcatccagtttgacttcagtgtccaaataaacgatcgcacgagatccgcaccaataatcgtggtgccgcaaaatcagacggtgaaagtcaatggcagcttggtgatgaagtgcaccgtctactctgatctgcatccaacagtcagctggaaaagggttgtcctcaagaatgcctccttggacggccttaagtctgtggaaatccagaatctcaacttcaccgtgacgaatgactccgtagttttaacgcttcgtaatgtgacctttgaccaggagggctggtacacctgtttggcctcaagtggtctgggaaggagtaactccagtgtgtaccttagggtagtgagtcctctgccacctttggagatctacgccctgctgcacgcccatcctctcggattcaccttggccgctattacgatagtggctttgttccttttgggcagtgctttcataacgttcatgctgcgtcggctgaggagggagaagctcctgaagctccgcatcgaaacggttcatcagtggactaaaaaggtgatcatataccgaccgggtggagaagaaggaagtggctgcagctccggcgatcttcagatgccagtgataaggatcgagaagcagagaacaaccgtttccacaacgggaactggcggtactgatcccgcccagggctttaatgagtatgagttcccgctggactcaaactgggagattcccaggcagcagcttagcttgggctccattttgggtgagggcgcctttggacgcgtagtgatggcggaggcggaggggcttcccaggagtccacaactggccgaaaccatcgtggccgtcaagatggtcaaggaggagcacacggatacggacatggccagtttggtgcgtgaaatggaggtgatgaaaatgattggcaagcacataaacatcatcaatctgctaggctgctgcagccagggcggtcctctgtgggtgatcgtggagtatgctccacacggaaacctcaaggacttcctcaagcagaatcgacctggtgctccacagcgacggagtgacagtgatggctatctagatgacaagccactgatttccactcaacatcttggcgaaaaggagctcaccaagtttgcatttcaaatcgctcgaggaatggagtaccttgcttcaagacggtgcattcatcgcgatctggctgcccgtaatgtccttgtaagcgatggatacgttatgaagatcgccgattttggtctggcgagggatatccaagatacggagtactaccgaaaaaataccaatggacggttgcccattaagtggatggcgcccgagtcgctgcaggagaagaagtacgactcacagagcgacgtctggagctatggtgttctgctgtgggagatcatgacctacggggatcaaccatacccgcacatactgtctgccgaggagctctacagctacctgattacgggtcagcgcatggagaaaccggccaagtgctccctgaacatctacgtggtaatgcgacagtgctggcactttgagtcctgtgcacgacccacgttcgcggagctggtagagagtttcgatgggatcctgcagcaggctagtagcaatccaaacgatgcctatctggacctttcgatgccgatgctggagacgccgccctcatcgggggatgaggatgatggctccgacaccgaaacattccgggaaacgtccccgcttagatatcagtacacctataagtttaattagttcgtagtataaggagaccaaa

SEQ ID NO: 41298 - protein, 1052 aa, DROSOPHILA
MAKVPITLVMIIAIVSAAADLGCDYGHHRCYIDVTVENSPRQRHLLSDMDITLQCVRPMAKWFYEDKFQLRATLLRLERAQSGNSGNYGCLDSQNRWYNISLVVGHKEPVGNDIASFVKLEDAPALPESDLFFQPLNESRSLKLLQPLPKTVQRTAGGLFQLNCSPMDPDAKGVNISWLHNDTQILGGRGRIKLKRWSLTVGQLQPEDAGSYHCELCVEQDCQRSNPTQLEVISRKHTVPMLKPGYPRNTSIALGDNVSIECLLEDSALEPKITWLHKGNADNIDDLLQRLREQSQLPVDVTRLITRMDEPQVLRLGNVLMEDGGWYICIAENQVGRTVAASYVDLYSPSDTTTVRTTTTTTVASPIPTASTGEDNDDDVENPAAEASGGVGPPVFRKELKRLQHSLSGNTVNLACPVYGKANITWTKDKKPLNRELGVYVQKNWTLRFVEATSEDSGLYNCKVCNAWGCIQFDFSVQINDRTRSAPIIVVPQNQTVKVNGSLVMKCTVYSDLHPTVSWKRVVLKNASLDGLKSVEIQNLNFTVTNDSVVLTLRNVTFDQEGWYTCLASSGLGRSNSSVYLRVVSPLPPLEIYALLHAHPLGFTLAAITIVALFLLGSAFITFMLRRLRREKLLKLRIETVHQWTKKVIIYRPGGEEGSGCSSGDLQMPVIRIEKQRTTVSTTGTGGTDPAQGFNEYEFPLDSNWEIPRQQLSLGSILGEGAFGRVVMAEAEGLPRSPQLAETIVAVKMVKEEHTDTDMASLVREMEVMKMIGKHINIINLLGCCSQGGPLWVIVEYAPHGNLKDFLKQNRPGAPQRRSDSDGYLDDKPLISTQHLGEKELTKFAFQIARGMEYLASRRCIHRDLAARNVLVSDGYVMKIADFGLARDIQDTEYYRKNTNGRLPIKWMAPESLQEKKYDSQSDVWSYGVLLWEIMTYGDQPYPHILSAEELYSYLITGQRMEKPAKCSLNIYVVMRQCWHFESCARPTFAELVESFDGILQQASSNPNDAYLDLSMPMLETPPSSGDEDDGSDTETFRETSPLRYQYTYKFN

SEQ ID NO: 41299 - DNA, 3748 bp, DROSOPHILA
gctatgtaaaaaaaacagaagataaatagaactgtaaaaatgtttttgaaatggaaatcctatataacatcacatttgaacgtacatatgtttttcgtttttcctataatacataaacataaccttttcattaattcttgaacatgtactgcccttttttaatcaatttacataaacactgtgtttagaggcatttcaaattttcttgattagcaaccgtggctaactgtaaaccacccacgtgtggtaatcgccagtttgcgattcctccgcgtaccttggcattctgggagtgattctccggcttggtggtaaggatgttgatcttgtccagcaactgctcactgtcgatcagcgagtgggtcttcttgggggttttgtagtcgatgtggacatccgattgcgaagtcgcatcggcgttttccatatcttccaggtttccgacggtcagagtgcgattttctcgcggtttcgcacaatatatacaattatcgtacagagatatacaatgtatagaattcgatatagacctgaatgctattagcttgtttattgcacaatttttatttcaaacacacatttaaaacagcgcgtctattttctatgacctgaactagaggtgaaactaattcgattcttagtattatcgatgtttctagaaatttgacaacatcgatgttattgcagtttaaaattaaacgattttttaaactaaaattaaatattaccaaaaagaaatgcatattagtaagataccggttgaatatttcaagtaaatttattcaaatatttctttatgcatatatataaaagtagatatacacaaaaatgttaaaaatgtaacagttagtaactattgataaatggttaggcttttattaatttgatttaaatattatttttttttaagaaacacatagcaggatcaccatatcaccatcaccattatgaacagtcgataattcccgatagctataaattgttatcgaatcccagctcgctttgcaacacttgcgttccacctggaatttatttacgtgctgaaattcgaagttttttttgtgataaaacagcactccatgaatgaaagtgtgttccggatacagccaaacagacagtgagcaatgcgccataccctgtcatcaaatagcagccgcccagagtgaggatccgcttgccaatccgtcagagaaatccccgccaagatgatgccataccttcgccgccttttcagccaggagctctctccggctgctcagggcgattttctgggctgcttgcagcaggcgcccagtgtcctggccaccggattccctggagcacccgcactggagagcctaagttggttacacaacctagcgccgtgcttcccgctgcgaggcgatcaaattcaggtcatccacgagccaaagcacttctacgaaacgctggtgcaacgaatcggtcaggccaaacgccgtatagtgctggccagtttgtacctgggcactgggcaactggagaacgcaatggttcagacgttgcgtcacagcctggagcaacagtctgccctgaggctcaacgtgctgttggactttacacgcggcacgcggggaaccctcaactccaagaccatgttgctacccctggtccgcgactttgcgagccaggtgcagctatccctgtaccatacgcctgatctgcgcgggatgacaaagcgactagcaccgccacggtggaatgagcttctcggactacagcacatgaaggtctacctgttcgacgatgccgtgatcatatcaggcgccaatctgtccaatgactacttcaccaaccggcaggatcgatacatactcattgaggacaaaccgttggcggatttctatgcgcagttcatcgaacgcgttcaagagtttagtttggcagtggcgccagatgccagcgagggactgcaccgcaactggcgaatactgccgtacgagggcaccaaggagcagtttatccagcttgcccgtaaacgtatttccgatttagtgcaggagacgtttcagcggcaggcgcgaactaaagagcagaatccgcaggcagacacatggatttttccgctgcttgagatgggccagatcggcattcatcacgacagcgtggtgaccaagcggctgctctccaactgcttgtctggatcacggctgaaactggccaccgggtacttcaacctgacgcaggagtacatggacacgctcacgcacaagtgcctggcccaatgcagcatactgatggctcatccaaatgtgagtggctatcagtaattagttgaccaatagtaacccgatttaattcattttccaggcaaacggctttcagggtgccaaaggaccagcgggcggaattccggctgcctacacactgatagccaagagtttctacgagagcctggtccgccggaagcaaaaccaccgcgttaacttcttcgagtacgaaaagcccggctggacgtaccatgctaaaggactgtggtactacctgccagaggcaatactgccaaacctcacgctgatcggctcttcgaactttggcgagcgatcggtgaaccgcgatctggagacacaggtgtgccttgtgacggctaataaggatctaagccagcggctgcaggcggaagctgaccggctgtacgatctgtcacagacggcggagcgggaaatcgtccaacgacccgttccgcgatgggtccaggccgtcgttcgcatattcaggaatttcttctaggctcttcgatatagtagtttaatttttttcgttctttgttaagccccatatcccaggtagttaatttagttttataattcgtgtttaatctttgccctgggcaagtgtttctattgctggtaattgttgattttgtacacacgctaaagtttgttaaataataaagagaatcgagggcatgcagaaggaaaaataccacgctgtgttctaatcaccagggggatcatcattttagaatcaagtgcatatgttataaatatttgtactatctatatgtactttcatttagttttaataatttttggtgctgataataatcatgcgttcaaaattaaatatcccgcccatctgtgaatagtgatggacgcctaacgatggtttaccgctttggagaggcagaaataatcggatagaccaatgtttttagctattttcaagaatgtatttcgaactttgttgaaaaaagttgcaatttgtttaattattattttcagatgtcctcaatgtgtttaccaattttgttaaaagaaatttaagagcaaagtctaagcaaaaatttaactcttcgaaatactctgctaagtttaagcttttaaccaattgttgaacgaaaagtcccagtttgattatcgcttctttgccacctctaaagctctctcttttttcactcttcaaaaacgccgggcgacttgagtggctcgaagactttagttagctgctttttttggcccggtaagacgtacgacaaagtgcttacctgcgtgccaagttcgggagcgcgttaaacgttatgtgtttgctcgccgtgaaagttaaattaaaataaatctgattatcgccaaaggcaaaacaaaaagaaaaataaaaacgcggcgcgtgcttactaaagtgcaagtgtgtgttggtgctggattgcgatagtgtttgtgcactggcggctggctgagcatgtgtgcgtgtgagcagcaaattccaagaatataacaaaagcagaaaaaac

SEQ ID NO: 41300 - DNA, 1690 bp, DROSOPHILA
ctttgcaacacttgcgttccacctggaatttatttacgtgctgaaattcgaagttttttttgtgataaaacagcactccatgaatgaaagtgtgttccggatacagccaaacagacagtgagcaatgcgccataccctgtcatcaaatagcagccgcccagagtgaggatccgcttgccaatccgtcagagaaatccccgccaagatgatgccataccttcgccgccttttcagccaggagctctctccggctgctcagggcgattttctgggctgcttgcagcaggcgcccagtgtcctggccaccggattccctggagcacccgcactggagagcctaagttggttacacaacctagcgccgtgcttcccgctgcgaggcgatcaaattcaggtcatccacgagccaaagcacttctacgaaacgctggtgcaacgaatcggtcaggccaaacgccgtatagtgctggccagtttgtacctgggcactgggcaactggagaacgcaatggttcagacgttgcgtcacagcctggagcaacagtctgccctgaggctcaacgtgctgttggactttacacgcggcacgcggggaaccctcaactccaagaccatgttgctacccctggtccgcgactttgcgagccaggtgcagctatccctgtaccatacgcctgatctgcgcgggatgacaaagcgactagcaccgccacggtggaatgagcttctcggactacagcacatgaaggtctacctgttcgacgatgccgtgatcatatcaggcgccaatctgtccaatgactacttcaccaaccggcaggatcgatacatactcattgaggacaaaccgttggcggatttctatgcgcagttcatcgaacgcgttcaagagtttagtttggcagtggcgccagatgccagcgagggactgcaccgcaactggcgaatactgccgtacgagggcaccaaggagcagtttatccagcttgcccgtaaacgtatttccgatttagtgcaggagacgtttcagcggcaggcgcgaactaaagagcagaatccgcaggcagacacatggatttttccgctgcttgagatgggccagatcggcattcatcacgacagcgtggtgaccaagcggctgctctccaactgcttgtctggatcacggctgaaactggccaccgggtacttcaacctgacgcaggagtacatggacacgctcacgcacaagtgcctggcccaatgcagcatactgatggctcatccaaatgcaaacggctttcagggtgccaaaggaccagcgggcggaattccggctgcctacacactgatagccaagagtttctacgagagcctggtccgccggaagcaaaaccaccgcgttaacttcttcgagtacgaaaagcccggctggacgtaccatgctaaaggactgtggtactacctgccagaggcaatactgccaaacctcacgctgatcggctcttcgaactttggcgagcgatcggtgaaccgcgatctggagacacaggtgtgccttgtgacggctaataaggatctaagccagcggctgcaggcggaagctgaccggctgtacgatctgtcacagacggcggagcgggaaatcgtccaacgacccgttccgcgatgggtccaggccgtcgttcgcatattcaggaatttcttctag

SEQ ID NO: 41301 - protein, 493 aa, DROSOPHILA
MPYLRRLFSQELSPAAQGDFLGCLQQAPSVLATGFPGAPALESLSWLHNLAPCFPLRGDQIQVIHEPKHFYETLVQRIGQAKRRIVLASLYLGTGQLENAMVQTLRHSLEQQSALRLNVLLDFTRGTRGTLNSKTMLLPLVRDFASQVQLSLYHTPDLRGMTKRLAPPRWNELLGLQHMKVYLFDDAVIISGANLSNDYFTNRQDRYILIEDKPLADFYAQFIERVQEFSLAVAPDASEGLHRNWRILPYEGTKEQFIQLARKRISDLVQETFQRQARTKEQNPQADTWIFPLLEMGQIGIHHDSVVTKRLLSNCLSGSRLKLATGYFNLTQEYMDTLTHKCLAQCSILMAHPNANGFQGAKGPAGGIPAAYTLIAKSFYESLVRRKQNHRVNFFEYEKPGWTYHAKGLWYYLPEAILPNLTLIGSSNFGERSVNRDLETQVCLVTANKDLSQRLQAEADRLYDLSQTAEREIVQRPVPRWVQAVVRIFRNFF

SEQ ID NO: 41302 - DNA, 12281 bp, DROSOPHILA
ttaacttcttcgagtacgaaaagcccggctggacgtaccatgctaaaggactgtggtactacctgccagaggcaatactgccaaacctcacgctgatcggctcttcgaactttggcgagcgatcggtgaaccgcgatctggagacacaggtgtgccttgtgacggctaataaggatctaagccagcggctgcaggcggaagctgaccggctgtacgatctgtcacagacggcggagcgggaaatcgtccaacgacccgttccgcgatgggtccaggccgtcgttcgcatattcaggaatttcttctaggctcttcgatatagtagtttaatttttttcgttctttgttaagccccatatcccaggtagttaatttagttttataattcgtgtttaatctttgccctgggcaagtgtttctattgctggtaattgttgattttgtacacacgctaaagtttgttaaataataaagagaatcgagggcatgcagaaggaaaaataccacgctgtgttctaatcaccagggggatcatcattttagaatcaagtgcatatgttataaatatttgtactatctatatgtactttcatttagttttaataatttttggtgctgataataatcatgcgttcaaaattaaatatcccgcccatctgtgaatagtgatggacgcctaacgatggtttaccgctttggagaggcagaaataatcggatagaccaatgtttttagctattttcaagaatgtatttcgaactttgttgaaaaaagttgcaatttgtttaattattattttcagatgtcctcaatgtgtttaccaattttgttaaaagaaatttaagagcaaagtctaagcaaaaatttaactcttcgaaatactctgctaagtttaagcttttaaccaattgttgaacgaaaagtcccagtttgattatcgcttctttgccacctctaaagctctctcttttttcactcttcaaaaacgccgggcgacttgagtggctcgaagactttagttagctgctttttttggcccggtaagacgtacgacaaagtgcttacctgcgtgccaagttcgggagcgcgttaaacgttatgtgtttgctcgccgtgaaagttaaattaaaataaatctgattatcgccaaaggcaaaacaaaaagaaaaataaaaacgcggcgcgtgcttactaaagtgcaagtgtgtgttggtgctggattgcgatagtgtttgtgcactggcggctggctgagcatgtgtgcgtgtgagcagcaaattccaagaatataacaaaagcagaaaaaacagagttttgcaaaaatgtcaaacaggcgaagagtgcgaacaattgattatctggcgctgcagcagagtttgcgtttgcaaaagacaccggcagcaacaacaaatgcagaggagcaggtggcaagggaggaggagaatggcaatgggcatcatagtaccgttacagctgaaacgccacccacaccacccatcccgcccattccgcccatacgattacgacgcgagcagagcgtcgaggaggatgttgcaaggtgagcagagcacaccagcggttttcgaattgctgggcttttcccaacacaaacagaaacaagaaagtctgcattggcacgtaactaacaagcgctctctttcccatttcctctccccctcttttaacatatctctgtcgcggctctgctctcaaagccatatttgcggggtttccctctcattcgctctcgcatttcttctctctcgctgtgcatttcaccagttttaattgtttaaacgtaaacaacgtgttttttgaccacgttatcttgttgttggcctgggtggctcaacgaaccccagaatttagcgaactgcaagacaggcacaaaaaatgaacagcaacaaattgcgaattctgcctgaaattaaacactttgtgtgcagcgcaattaaaattctgcacaggtgcactgcaaaaattggatcacatttgtgtaacgcatactcgtcgaacacgtaatatatttagaaatttttgtggaaattttagtagattgagattgaaaccaaatcttgaagtctaaacgctcctttatgtaacagtaacgattgttttcagtgatcaacaagttttctcacttacaagagagcacccttcataaatattttaaactgattttaatgtgttcaaataaaaaagcaataattgctaggtattacattacaaaaactaagtttctttataatgcatgttatattcgctctgcgtcgtttttcgtagtatttcggcatttatcatagtcatatttttgtgtggggccgcctcaagtcttccaagatatttgctgataacgctgacggtggactgataacacatacacacgctcaccttgagagaattacggatacgttttccgctgttttttttttttgtgtcttatgcgcaggggcttattcataatacacttcatttttttgatttgatttttatgggataggtgagtgttcatcgttttgcgggaaaacatgattgtcgtatgttagcaggaaatttgcgacaaacatccattttcttttggcacctgtttctatggcaactaagtgaaattagccgagatttatgtgtctgctgctcgctctttttttcgttggtctctatattttaatacctgttaattgataagttgattggttcgctggaaaaatggcaacgtatagatataatattacatatgtttttttttttattaaagcatcgtatatgctaagatacaagcagtgattctttaggaaaggttacgaaaaagtttttgactttaaaggtttaaacagcatttatagggtaatcggtagttcggacatctgtaagcattgttctcatttgatgccgccaatcttgttcttcttcagctggtatacctgttttaggggggagggaagaagaagaagagacggaggggagactattggaagttaaaacgcgtttaatacgtgcgtttgcccactctgctttgtaacctctttcgttattctgttttcaaatcgaattcgctttcttctcatatctccgtccataatgttttgtggttgtcacctggctaactgaatggaattccgatgattgaaggtctctggcctaactgttgttggctttggtgaagagagcgggagctcgcgctcttgcaacattcgtatttgtacttgaacttgcaggttatctttctctctctctctcttttgctccacgttctagacctcagttcagttggttataattttggggctttcgtatgtttgataagcataattgtacacacatatcagaaaacatttccgcatattacacacgcacgcgcccacacacacacgtgccactgccgtttgcactaattttagaagtttctaatgtgtttttaaatgccatgtttacagaagaaaacagcataaacatgagattcacagattgtgtatgatttgttatttccatttatttaaaaattgaaaacctctcaaaatccatttgattactattttacatttttaactttttactttactttaagaagcattgaaagataaaactaaaaactatggttgcatattaacatttgtttacatttaataatcttgattgggtgtctgattgtctgtttcttattacaactcactttgttttggacgaactcgtcctatcagtcgatctgataaattgatcgcttagtcatcgaatttccaatgcttcatacataaatggggaccacggtgcgaatgtgcaacttttatgtgtatctataaatatgaagtatacgcaccgctggtcacgtgaccaaagattttcatatagagccaatgaagttgattgacttgatttgaatcgattttcatattctgaccgtttgtagaaaaatacctacactcaaaagcttaagtaaacacattgcttattagccaacaagcgggtacataataaaatgccataaattaataataaatattctcgcggctaagacaattgcgaaccacaaacaaacgcaatgcgctccagaaacgatcgaatacccctttgcgttccacaacaaaccgtatcacggtggtgtgtctctctttcttgtgctcttagtttccatacctctgttgctcatcttattgcgtctcctctctctgagataccatacacaaatggctatagtttatagtggcaggtattgtatttattgtaaaccgtaggcttcacaatttatatttaatatgttatgcatacttttacactttctgtgccacactccagtagtttctgactgaaatgaccactggtaaatgttaaacataactatttaatagctaaaccggcatccccgatttgaagtggccacccactagttgctctccgctgagggccgtaaacaatcggatgcgtcggtcgggcggtcgtcgctcgctcttttcagttcgccgcgattggcagtgaatagcagtcggtttgggggcgacaccgcttcgtcggcaccgcggcacacactcgcttgcgctacatacaaaaccgtatactgtacgcattggcgaatagatggggaatattcttgttaaaagtgctaataaattgactgactggctgccgcgacaagtgctgcgcgttatgaaattcgaaagggttcggtgcgaggcgtgcgaactactgccgcctgtttgcaattcgtcgtgataaaccagaaaaccagccagaaaactacacactactacggtgggagatagtgcataacccataacccaccccaccagtaaagattccatcgatccgagaagggaatcggcagtcgcataccgcggatcggtcatccagcccccaggccagtccagtcatcgttcgctggctcgcgtctaaagttctctccagctctaccagcttttaattgtgagctgtcgctttttatttgctctcagatcgttccgccgctgtttgttttttgtccccagagtgggttgtagtggtgtatggtgcggtgcaattagatgtgcataaatctggctcgggcacccaccggagactctgaaagtaacactagccctcgattgcggcgattaagcaaagtttaaaacagcggcattatcaaccagccagttgagagtaaaaaagaggattgcactctccaaggttctctctcgtctcgctgcgactcgctgattagtgccggttttggagctattggactgcgcaaacagtgattgcccaggaggaggtctgcaaaatgcgtcggaagaagtgagtgatccaagccaatgggctgatgaaaagtgtgacgcgatttgcacaccacaatcaaacgagtaattgccagccaattttgggcttttttggtcgggaataaatcaaacctctgctcaaattagggcataatcgcaggcgtgacatgcggctgtctgcaacaccggcagcagtcagataagatagggatgtcctcctccccagagtttgccgctttcactcccttggatacaccgacaaatttgtatgtgatgcacacggagaacagcgtgaaatttggttgaaagttcaaataaaaaattttaatgttagttcgggataactgttatttatcaactgataattgatttcgctaaaaactcgattcaaacactcattgatatagtcctaaaaaaaaagatatattatattgcgacaatatgaaaattaatatacattaacttagcaatttaatcactttatcgcagatgtaaaatatattgagtgaaaaattccttgttcaataaattacacaccgtaatactaaagcttttttctgagtgcagtaggtatatttatctgggttatcggcgattaagcggcacttgtccgccgttgcaattagcgaaacaattaggacaagcccctagattaatgcaaatatactatactatatttaacgtcatcatctactctttttttttttgatcttttagagttgagtaccgtgtgaagcagacgccttcgcgtccagtgcagatgactcgaaatcggattggtgctttggaggaggacatgcctcccgaagatgagctggcggcgcactatgaggccttcggcactactccgccacgtaccaggctcaaaatcaagaaccgcgactgggaacgcaaacagaaggtggtcaatgtgacagcgtgagtatcagtacagtcaatcagtaaatgcggtgtgctccatatggataaggcatcaggatggccgcgataagggtttgcgtccgtgctaggtacgtgatcgggaatagtgacgaacgcaaactcaccaaatgaccatatgctaccatatgccgcatctgatagtgccatctctatggctgatgtcattttcgtaatcactgttattagaaaatggaaataattttaaataaccttgaagtatttaatatccatttacaaataaatatgtttcaagaattgcccattttacacagtttaaaatttgattttaatataaattacaaaaatctcagataattatttggaaattaatatccagaaatatatagaatttcagggtgtaacctcaagaatatgcaaataacagtagtctttttattataataaaaaaatgcagatctcctgtgttgttaatggtatccgcttttttttatattagcgaccactttctaaacgctttttctcagttccgcagacttaccggccagtgtgggtggcacccccaaaaagaccaggacggccagatcccgcgtcctgcggcgcaacactatggactgcgccctgctcaacgagatgtttgtcaacgatgagagcaagcggacggacaagcggctgcagtcactccttcgcgactcggaacgtgagatgaagaactcgttggccacaacggcggtggctgctccacgaggtaacagcttccacgagacagctcatccgctggagtctctggaccagatcatgccgctcaattcggaggcaatggcgccgattccactgcgaattgcttccaaggtggtggagagctgcaatcgctatcgctgcgtgtcctcacgtcccattgggtatcgctcctcggcgccgccgttggctttcgctgcccaacttcccgctggaatgctaaggagtgatggaagagcaacacctgggttggggaaaagaaaggacttccacgaaacgtttgccaatctaattaagctcggtagcgtagatcgacaggacgccaaactatcacaggaggagcacacctggcagactgagctgaaggatctcatctggctagagctacaggcctggcaagcagaccgaactgtggagcagcaggacaagtaccttttcgaagcgcgtcagggagtctccgatctgctcacccacattataaactacaagttccagccgcgttatcgccgcgagccgagtctgataagcttggatagtggcactcattccgatagcaattctaatgccagctgtatgtgaaaccattcttcaaaagtaaaccccttattatttattatttaaatctattctccagctccactgcccagcaagatgtgccaaggatgcatgtcgctgtactgcaaggattgcatggatcatcaggagttggcgctgcgagaagtggagggtatgctgacgcgcctggaagctgcagaggcactctacccttcctcacaggccatgggcgccctgcatcccatttacaaatcacagagctttgtagggcgcatcaagtccatgtgcttatggtataacattaccaagcagaacaagttgaagctcagtattttaggaaaaattctggcaagactgcaggatgagaagttctcttggcccgtgtgcacttcctcctacatcgccaccgacagcggtagttcatcagcatcgggtgtagagaacgatgattcggctgttaactcaatggattcatcaaagccgcccagtatggccggatcagcctcgcgaaagggtgtgacaccgtgccacaaagtgcaattcatgttaaacgacgccacccacgtgccaggcgagacatcaagtagcaatgagtaagtatatacgaagtagtacaaaattgaagaaaagaaataatatacattttccttcagatccacctccacggaggtaagccagtggtccagcgagtgctctcacagccatatgcgtaagggatccatgcacgacatcaacattttcagtgtcgagccattgggtacgtgcagcagcaatgggacaggagagcaatccactgggctgtatcgcaagttcattgaaaatgtgctcaaaagtcgaggactggccaagtcgctggcttttctacacaagctgcacaacgtggcattgtacaaggcgcacatagctctggaaaaacccggagctgaagacttcgattacgagtcggatgcagagtccattgaagaggacgtaccaaggctagatcctgaaatcagccgcgaacaggttgtggagctgcgcacctacggctactggagcgaggaggcacaatccataaacctgccgtcgtacattcccacctttgtatttctgagcggaattccgttgcagttcatgcatgagttcttgcgcatgcgtctcgaaaccagacccgttcgacccaatccactgagcctggaacagttgatgaaggagcttagggagggcttgaccctagccttgacccatcgggagcgataccagcggcacataaccacggcgctggtggagaatgaggcggaactgggcagttatattagcattttaaaccactacgatgctacggtgcgaaagactttcgagctgtatttggagtacatcgatcaactagtgctggttgccgttccggaaggcaaccagaagtccgtccttgagaaggaatggatgtttaccaagcttatcagtcccatgataaagggcatgcacacgttagcatctcaaaaattctgtggcataatcagcaaacttttgcggagcatttccgaacgcctggtgaagcgcaccgttgagctagatcaacagatcgatggcaccgccgataccgacgacaacgaggaggttaaatggcagctgctaaccatttgcagagagacacaatcgctgctcacagtcgaacgggagcgctccattaaggtgctcttctttgccaaaaccttttgtcgcgacgtcgagacgacggattttcatcgcgagcattatgaacatgacgtggccaaccagcagcatgacttcatctgttcggacgtaaaggcggcgttcaagctcttgcagcaggacgttctgcaagtgcgcaacaagttgacggcaataattgaaggagtgcaaaaacggtgctgtttgagcaacatgcgagatttggatgagcaagacaaacaggctgtgctgtcgcgcactcgagagattttgcatcagggatacaaatttggatttgaatatcacaaggacgtcattcggttgttcgagcagaagattatggaccaaaaggacagcggtgctcacacagtagatcttgccttaggaattatcgcttacgctaagatgtggatgcattttgtaatggagcgttgcgaacgtggacgaggaatgcgtccccgttgggcctcccagggtctggagtttctgattcttgcctgtgatccacaaatcacccagcacttggacgatgacgagtttgaggcgctaaagcagcaaatggatcgctgtatttcgcacgtgattggcatcacctcggaacccgaaaaggtcgccaagaaaaaggcttcgccgcgcactcgcaagacttcatcgccggccacctcgcgttcccggacaccaacacggactccaatgtccgctggcatggtccttaatccgaatacgccgccactacagtcgccaccgtacaacaagttacttcatccgcagttcagtttaaaggaggatgtgtcaggaacttcgtacagtcccgttgacagttcagactatgttgacactccgtgccaaaggagtgccaacggcgagctgcgtctgctggtgccccagacgccgccgactccagcatctcccggaaagagcagcctcgaaagtacaccgctggccttgcggcaggaacgtgttagagatgccgtcaaccgtttggatatggatctagaggacgggctacgcgaacgaaggttgattgggcaggtcaagtctcttaattccagcgacaaggtgcatataagggcgcgtagcgttcatttccgctggcatcgtggcattaagatcggccagggacgattcggcaaggtatacacggcggtgaacaataacacgggagagctgatggccatgaaagagatcgcaatccagccgggagagacgcgagcactcaagaatgtggccgaagagctaaagatcttggaaggaataaagcacaaaaacctggtgcgttactatggcatcgaggtgcaccgcgaagagctgcttattttcatggagctgtgctctgagggcaccctcgagtcactggtggagctgactggtaatctgccggaggcgcttacgcgacgtttcaccgcccagctgttgtcgggcgtgtctgagctgcacaagcatggcattgtgcatcgcgacatcaagactgctaacatattcctcgtggacggcagcaacagcctaaaactgggcgatttcggatcagcagtgaagatccaagcgcacaccactgtgcccggtgagctgcagggctatgtaggcacgcaggcctatatggcgccggaggttttcacaaagaccaacagcgatggccatggcagggcggccgatatctggtcggtgggctgtgtggttgtcgagatggcctcgggcaaggtgagtgcttcgcattgtagataagcaattcgatgtatggggcggggtatacagtccatttcacaatgttggattattagtgcttttctttgggtgaaattttgaaatgtttaacatttaatatatatttatggtttctttacagcgtccttgggcccagtttgattccaacttccagatcatgttcaaagtgggcatgggcgagaagccgcaggcaccggagagcctatcccaggagggtcacgacttcatcgatcattgtctgcagcacgatcccaagaggcgtttaacggcagtggaactgttggagcacaatttctgcaaggtgcgtatgcctgtggttagctcgctgccaaatgttgctaattgattttcgtttccatgtgcagtacggtcgagacgagtgcagcagtgagcagttgcagatgcaggtgcgaggctctttccggcgaaatgtggcgaccagcagcagctaggtgcaacgtggtgtctacttaactagcttgcggttttttttaggcgcacccctacatatgatgcatatgtacatcggtgtggattttgtttagtgtctaatttatgtgaatgtcgattatttgaatgccctcgtctggttttatgttggacaatatataacccgtataaaataatcaaatgcctttccgtaccgtaacccccacaattcattcgatgcaagtgaaaattacacgtattttaatatatttgcgattcagtttttaattcatcaatcgatgatgactatccgtaaatgggatagatggtcgacgtttctggcgtggcatttgtggtctcagcctgcggcggaccagagaatcccgtgctagtcgtaccatcgacgggagcaccagttggcggagttggctccggggtggcaagactggagaaagccgacacccacgaggtgcacagcatgaaggccagacagaggctaaacagcaggttgaagactgcaacgaattgagccggttactcgaatggtccacggattgcgttggcggttactccttgtacggtacttacatttcatgttgacggcgttttagagactgttgaagtgcccagaacggccagggccttttatggagaaccacttggccatgggtatccattggtattttatttaattaatttattaaaacactatttatctggcattggcttatcattatttatttatttatttgttatcgtatttaccacttggatattaagaagtgcgcagctcggattttcatgactgtttcaagcggaagacgacttatctattcttagaagtcactgaaaaatacgtggccaatttgaccgtgcgccttatccaaatccatatacgtatggagtattttcattcaccagcagatcaattgtaggtcaggaatgatggtggtcttggtttgtaatgcatttatttcaatttattcggttcgtgattatttatgcatacattaattgcggctc

SEQ ID NO: 41303 - DNA, 5161 bp, DROSOPHILA
agtggctcgaagactttagttagctgctttttttggcccggtaagacgtacgacaaagtgcttacctgcgtgccaagttcgggagcgcgttaaacgttatgtgtttgctcgccgtgaaagttaaattaaaataaatctgattatcgccaaaggcaaaacaaaaagaaaaataaaaacgcggcgcgtgcttactaaagtgcaagtgtgtgttggtgctggattgcgatagtgtttgtgcactggcggctggctgagcatgtgtgcgtgtgagcagcaaattccaagaatataacaaaagcagaaaaaacagagttttgcaaaaatgtcaaacaggcgaagagtgcgaacaattgattatctggcgctgcagcagagtttgcgtttgcaaaagacaccggcagcaacaacaaatgcagaggagcaggtggcaagggaggaggagaatggcaatgggcatcatagtaccgttacagctgaaacgccacccacaccacccatcccgcccattccgcccatacgattacgacgcgagcagagcgtcgaggaggatgttgcaagtaaagattccatcgatccgagaagggaatcggcagtcgcataccgcggatcggtcatccagcccccaggccagtccagtcatctgattgcccaggaggaggtctgcaaaatgcgtcggaagaaagttgagtaccgtgtgaagcagacgccttcgcgtccagtgcagatgactcgaaatcggattggtgctttggaggaggacatgcctcccgaagatgagctggcggcgcactatgaggccttcggcactactccgccacgtaccaggctcaaaatcaagaaccgcgactgggaacgcaaacagaaggtggtcaatgtgacagcttccgcagacttaccggccagtgtgggtggcacccccaaaaagaccaggacggccagatcccgcgtcctgcggcgcaacactatggactgcgccctgctcaacgagatgtttgtcaacgatgagagcaagcggacggacaagcggctgcagtcactccttcgcgactcggaacgtgagatgaagaactcgttggccacaacggcggtggctgctccacgaggtaacagcttccacgagacagctcatccgctggagtctctggaccagatcatgccgctcaattcggaggcaatggcgccgattccactgcgaattgcttccaaggtggtggagagctgcaatcgctatcgctgcgtgtcctcacgtcccattgggtatcgctcctcggcgccgccgttggctttcgctgcccaacttcccgctggaatgctaaggagtgatggaagagcaacacctgggttggggaaaagaaaggacttccacgaaacgtttgccaatctaattaagctcggtagcgtagatcgacaggacgccaaactatcacaggaggagcacacctggcagactgagctgaaggatctcatctggctagagctacaggcctggcaagcagaccgaactgtggagcagcaggacaagtaccttttcgaagcgcgtcagggagtctccgatctgctcacccacattataaactacaagttccagccgcgttatcgccgcgagccgagtctgataagcttggatagtggcactcattccgatagcaattctaatgccagctctccactgcccagcaagatgtgccaaggatgcatgtcgctgtactgcaaggattgcatggatcatcaggagttggcgctgcgagaagtggagggtatgctgacgcgcctggaagctgcagaggcactctacccttcctcacaggccatgggcgccctgcatcccatttacaaatcacagagctttgtagggcgcatcaagtccatgtgcttatggtataacattaccaagcagaacaagttgaagctcagtattttaggaaaaattctggcaagactgcaggatgagaagttctcttggcccgtgtgcacttcctcctacatcgccaccgacagcggtagttcatcagcatcgggtgtagagaacgatgattcggctgttaactcaatggattcatcaaagccgcccagtatggccggatcagcctcgcgaaagggtgtgacaccgtgccacaaagtgcaattcatgttaaacgacgccacccacgtgccaggcgagacatcaagtagcaatgaatccacctccacggaggtaagccagtggtccagcgagtgctctcacagccatatgcgtaagggatccatgcacgacatcaacattttcagtgtcgagccattgggtacgtgcagcagcaatgggacaggagagcaatccactgggctgtatcgcaagttcattgaaaatgtgctcaaaagtcgaggactggccaagtcgctggcttttctacacaagctgcacaacgtggcattgtacaaggcgcacatagctctggaaaaacccggagctgaagacttcgattacgagtcggatgcagagtccattgaagaggacgtaccaaggctagatcctgaaatcagccgcgaacaggttgtggagctgcgcacctacggctactggagcgaggaggcacaatccataaacctgccgtcgtacattcccacctttgtatttctgagcggaattccgttgcagttcatgcatgagttcttgcgcatgcgtctcgaaaccagacccgttcgacccaatccactgagcctggaacagttgatgaaggagcttagggagggcttgaccctagccttgacccatcgggagcgataccagcggcacataaccacggcgctggtggagaatgaggcggaactgggcagttatattagcattttaaaccactacgatgctacggtgcgaaagactttcgagctgtatttggagtacatcgatcaactagtgctggttgccgttccggaaggcaaccagaagtccgtccttgagaaggaatggatgtttaccaagcttatcagtcccatgataaagggcatgcacacgttagcatctcaaaaattctgtggcataatcagcaaacttttgcggagcatttccgaacgcctggtgaagcgcaccgttgagctagatcaacagatcgatggcaccgccgataccgacgacaacgaggaggttaaatggcagctgctaaccatttgcagagagacacaatcgctgctcacagtcgaacgggagcgctccattaaggtgctcttctttgccaaaaccttttgtcgcgacgtcgagacgacggattttcatcgcgagcattatgaacatgacgtggccaaccagcagcatgacttcatctgttcggacgtaaaggcggcgttcaagctcttgcagcaggacgttctgcaagtgcgcaacaagttgacggcaataattgaaggagtgcaaaaacggtgctgtttgagcaacatgcgagatttggatgagcaagacaaacaggctgtgctgtcgcgcactcgagagattttgcatcagggatacaaatttggatttgaatatcacaaggacgtcattcggttgttcgagcagaagattatggaccaaaaggacagcggtgctcacacagtagatcttgccttaggaattatcgcttacgctaagatgtggatgcattttgtaatggagcgttgcgaacgtggacgaggaatgcgtccccgttgggcctcccagggtctggagtttctgattcttgcctgtgatccacaaatcacccagcacttggacgatgacgagtttgaggcgctaaagcagcaaatggatcgctgtatttcgcacgtgattggcatcacctcggaacccgaaaaggtcgccaagaaaaaggcttcgccgcgcactcgcaagacttcatcgccggccacctcgcgttcccggacaccaacacggactccaatgtccgctggcatggtccttaatccgaatacgccgccactacagtcgccaccgtacaacaagttacttcatccgcagttcagtttaaaggaggatgtgtcaggaacttcgtacagtcccgttgacagttcagactatgttgacactccgtgccaaaggagtgccaacggcgagctgcgtctgctggtgccccagacgccgccgactccagcatctcccggaaagagcagcctcgaaagtacaccgctggccttgcggcaggaacgtgttagagatgccgtcaaccgtttggatatggatctagaggacgggctacgcgaacgaaggttgattgggcaggtcaagtctcttaattccagcgacaaggtgcatataagggcgcgtagcgttcatttccgctggcatcgtggcattaagatcggccagggacgattcggcaaggtatacacggcggtgaacaataacacgggagagctgatggccatgaaagagatcgcaatccagccgggagagacgcgagcactcaagaatgtggccgaagagctaaagatcttggaaggaataaagcacaaaaacctggtgcgttactatggcatcgaggtgcaccgcgaagagctgcttattttcatggagctgtgctctgagggcaccctcgagtcactggtggagctgactggtaatctgccggaggcgcttacgcgacgtttcaccgcccagctgttgtcgggcgtgtctgagctgcacaagcatggcattgtgcatcgcgacatcaagactgctaacatattcctcgtggacggcagcaacagcctaaaactgggcgatttcggatcagcagtgaagatccaagcgcacaccactgtgcccggtgagctgcagggctatgtaggcacgcaggcctatatggcgccggaggttttcacaaagaccaacagcgatggccatggcagggcggccgatatctggtcggtgggctgtgtggttgtcgagatggcctcgggcaagcgtccttgggcccagtttgattccaacttccagatcatgttcaaagtgggcatgggcgagaagccgcaggcaccggagagcctatcccaggagggtcacgacttcatcgatcattgtctgcagcacgatcccaagaggcgtttaacggcagtggaactgttggagcacaatttctgcaagtacggtcgagacgagtgcagcagtgagcagttgcagatgcaggtgcgaggctctttccggcgaaatgtggcgaccagcagcagctag

SEQ ID NO: 41304 - protein, 1612 aa, DROSOPHILA
MSNRRRVRTIDYLALQQSLRLQKTPAATTNAEEQVAREEENGNGHHSTVTAETPPTPPIPPIPPIRLRREQSVEEDVASKDSIDPRRESAVAYRGSVIQPPGQSSHLIAQEEVCKMRRKKVEYRVKQTPSRPVQMTRNRIGALEEDMPPEDELAAHYEAFGTTPPRTRLKIKNRDWERKQKVVNVTASADLPASVGGTPKKTRTARSRVLRRNTMDCALLNEMFVNDESKRTDKRLQSLLRDSEREMKNSLATTAVAAPRGNSFHETAHPLESLDQIMPLNSEAMAPIPLRIASKVVESCNRYRCVSSRPIGYRSSAPPLAFAAQLPAGMLRSDGRATPGLGKRKDFHETFANLIKLGSVDRQDAKLSQEEHTWQTELKDLIWLELQAWQADRTVEQQDKYLFEARQGVSDLLTHIINYKFQPRYRREPSLISLDSGTHSDSNSNASSPLPSKMCQGCMSLYCKDCMDHQELALREVEGMLTRLEAAEALYPSSQAMGALHPIYKSQSFVGRIKSMCLWYNITKQNKLKLSILGKILARLQDEKFSWPVCTSSYIATDSGSSSASGVENDDSAVNSMDSSKPPSMAGSASRKGVTPCHKVQFMLNDATHVPGETSSSNESTSTEVSQWSSECSHSHMRKGSMHDINIFSVEPLGTCSSNGTGEQSTGLYRKFIENVLKSRGLAKSLAFLHKLHNVALYKAHIALEKPGAEDFDYESDAESIEEDVPRLDPEISREQVVELRTYGYWSEEAQSINLPSYIPTFVFLSGIPLQFMHEFLRMRLETRPVRPNPLSLEQLMKELREGLTLALTHRERYQRHITTALVENEAELGSYISILNHYDATVRKTFELYLEYIDQLVLVAVPEGNQKSVLEKEWMFTKLISPMIKGMHTLASQKFCGIISKLLRSISERLVKRTVELDQQIDGTADTDDNEEVKWQLLTICRETQSLLTVERERSIKVLFFAKTFCRDVETTDFHREHYEHDVANQQHDFICSDVKAAFKLLQQDVLQVRNKLTAIIEGVQKRCCLSNMRDLDEQDKQAVLSRTREILHQGYKFGFEYHKDVIRLFEQKIMDQKDSGAHTVDLALGIIAYAKMWMHFVMERCERGRGMRPRWASQGLEFLILACDPQITQHLDDDEFEALKQQMDRCISHVIGITSEPEKVAKKKASPRTRKTSSPATSRSRTPTRTPMSAGMVLNPNTPPLQSPPYNKLLHPQFSLKEDVSGTSYSPVDSSDYVDTPCQRSANGELRLLVPQTPPTPASPGKSSLESTPLALRQERVRDAVNRLDMDLEDGLRERRLIGQVKSLNSSDKVHIRARSVHFRWHRGIKIGQGRFGKVYTAVNNNTGELMAMKEIAIQPGETRALKNVAEELKILEGIKHKNLVRYYGIEVHREELLIFMELCSEGTLESLVELTGNLPEALTRRFTAQLLSGVSELHKHGIVHRDIKTANIFLVDGSNSLKLGDFGSAVKIQAHTTVPGELQGYVGTQAYMAPEVFTKTNSDGHGRAADIWSVGCVVVEMASGKRPWAQFDSNFQIMFKVGMGEKPQAPESLSQEGHDFIDHCLQHDPKRRLTAVELLEHNFCKYGRDECSSEQLQMQVRGSFRRNVATSSS

SEQ ID NO: 41305 - DNA, 6310 bp, DROSOPHILA
ccctatagttcttcacagaccttaaagtttagcctcgaaagctatgactatcttgaagagcgatctttttcttttgttgttgaatcgcttggcacacatcaaggtcgagtcaaagcgttaagtggcctgccgaatgcagaaggtcttgactttcatggtgttcgaatctttaagaagcggctaaagtggaagcctagttcctttggtggaactggcaatgcaacaaacagcggcactgcgaccacataaatcacacttaaacggccacagtaaacctctttatttcccccgcacaacttagtctgcttcgagttgggctggttgagtgggtggtggattgcttggattttgggatggcagctcattgccaagcaggcataaactgcacaagaaaatttccgtgaatgtgccgcaggaccgcaggataagggaaaagctactgcgaatgcagttttcacttaacggcaagtggcacataaatttcaccaaggacgaaaatacacttcaccagaaaccaggcgaaaggtgagtgggtggttggaagggcctggcagtaaccgacattcggtgataagtggacaaaatgtgcatcgctctgatttgccgctcttggacaaacaatcttggcaaatatttggtaccaagggcactcgggtagaggtcaactggtgcatgaaatttcgaggcaggcaaagcagctgcagattgcaaagcagctgcaaaaccggcagccaaaatcaggtccaaaaaagatgcttgagttggcttgaatcgcggggaagagtaactctgaagccaaattatttccacactgtggttatgcaaatgttgcaccttaaaagccgaaaagaagttaaaagttatattctatcattctctttacaggttacaacaacatgaagcagcttttggttgaatagctggcgttttgagcgcggcagcagaggcgctagaatagcgcccttgacttgaagccttacgttcattcccacctaaaacgatgatgcgtcactccagtttgcgccttataattggcggcctgatactcctcctctttgtgcttaatgtcttcagcaaggaacagggatctcattcccacaaacgcagccattcggcgaagagattctcgcgggactccaactccgcacgtgagcgacgcccaaacataatcctcattctgaccgatgaccaggatgtggagctgggctcccttaacttcatgccgcgcacgttgcgacttcttagagatggaggagccgaattccgacatgcctataccaccacacccatgtgctgtccggcgagatcgtctctgctgactgggatgtacgtccacaaccacatggtgtttaccaacaatgacaactgctccagcccacagtggcaggccactcatgagacgcgatcctatgccacatacctctcgaatgcaggctatcgcaccggctatttcggaaagtatctaaacaagtacaatggatcctatatcccaccaggttggcgggagtggggaggattgatcatgaactccaagtactacaactacagcatcaacctgaatggacaaaaaattaagcacggttttgactacgctaaagactactatccggatctgatagccaatgactcgattgccttcctccgctcctcaaagcaacagaaccagcggaagccagtgctgctcaccatgagttttcctgcaccacatggccctgaggattcggctccccagtatagtcatctcttctttaatgtgacaacccatcagtaagtaaataccctaactattaacacccgataatagttgaacttaattcgttaataattaagtaacaggttgaaacgatccttgttcctttatttatttcggttttgcaagtttctttctttaaatatgcaaacagtctgtatgattaagaatatcgattatattgttctttctttttgtcaatagcttttaacatttaatttgcacttatagcactccatcgtatgatcacgccccaaatccggacaagcaatggatcctgagggtcacggaacccatgcagcctgttcacaaaaggttcaccaatctgctcatgacgaagcgactgcaaacgctccaaagtgtcgacgttgccgtggagcgggtttataacgagctaaaagaactcggagagctggacaacacttatatagtatacacttccgatcatggttatcatctgggtcagtttggacttattaaaggaaaaagttttccctttgagtttgatgtccgtgtgccgttccttatccgtggtccagggattcaggcatctaaggtgtaagtaatttgactttatcgaggtcttgaagctaatgataaattatacggcagggtcaatgagattgttttaaatgtggacctggcccccactttcctggatatgggtggtgtgccaacgcctcagcatatggatgggcgcagcatactgccactgcttctgagcagaaatcgcgctgtgcgagacaactggccagatagcttcctcattgagagttccggcaggagggagacagctgagcagatagccgaatctcgtgcccgccttcaaattgaaaggcgaaacatgaaactggccaacagttcgctgcttgaagatttccttgaaggagcaggcgaaagtaccaccattgtttcgagcagcagcaccgctgccacattgatgagctcaaccgctcagcagccggaggatggggaagaggaagtggaaacggacaacgaagaggatgatgtagacggtgatggtgccatggacagctcagcagcagctctggaagaagatgacctcgacgatgccgccttcgaggagggtgatgaagagcttgatcaggagtttcaacaaaacaacgatcttccactggctccttatataaccaagatgatgcgccttaactcggagtgctctgacccggcgctactcaaaaactgtctacctgggcaaaaatggaagtgcgtcaatgaggagggacgttggcggaagcacaagtgcaaattccatgtaaatatagatataaagtattttgtgtggtagatcttttttttataataaagtgtatcatttgtttcagcttcagttagagcatcagttggctgcgatgccccggaagcaatatcaacgtaattgtgcctgtttcactcccgacggagtagtctataccaagattcgagccccatctgctggattgcatcgcgttaacaagcgcacacataacggcccaggaaggcgtcgaaacaagcgggaggtgttccatactgagttacctgacgagatggaggagctgttagatctccaccaggtggtagatcaacttgttgatcatacgcatcgcagcaagcgtgatttgcccgcaagcagcaatgagactattgcccaggtcattcagcagatacaaagcaccctggagatcttggagcttaaattcaacgagcacgagctacacgcatccaactctagtggcaactcatatgagcggggagaaaagtacacaaaatctggtggccatcggtgcttcgtggatgcgaccacggctaaagtgaactgctcaaatgtgatatacgacgacgaaaagacgtggcgtacttcgcgtactcaaattgatatgctgatcaagcttctaaaggacaagattggcaagctgaaggagatgaagaagcagttgagggaaagcaataaacaggccttggccgctggtagaagaaatgataaccgacggcgtaatgatcaaagtgtgctggatagtggagccggaccagagtttaacatgagctactttactgagatcagcagcacgccaagatcaaacgtcgtaggtcaaacggaagtattccaaggatatggaagtgcaagcgcattcgattcattggagcaaacgcagtcgcatcggtttacaccgcgagcagaatgctattgcgaaccagatgtaggcgagaagtaagtagagcaattgaattgaataattcggccaatctcacatattattttccatctttagccatgcagactctaaggaaatggcgcgtgaggcacgacgaaagcttaaagaggagcgacagcgcaagaaggaacggaagcgcattaagaaggctcgtctggaaaaggagtgtctgtccgagaagatgaactgcttctcgcacgacaatcagcactggcgaacggctcccctttggaacgacagtccattttgcttctgtatgaacgccaataataacacctactcctgcctaaggaccatcaatggcacccacaactttttgtactgcgagtttaccacaggccttatcaccttctataacctgaccattggtaagaggcccccccttaaaaaatgcaaaaaaataaaggaataatatttatggatttttattatcgtcccaattagatcgctttgaaacgataaaccgtgcagcgggtctgacgcctggagagagatcccacatgcacgatgctttagatcagttgaagagctgtcgaggacgcagttgcagcatccggcgacaccagaatcacctggagggcggatctagtgctccactgctgcccatcaatcaagtgcaccgcaacaacaaacgaaagcactgtaagcctcttaactaaacaaattgataactcatttgttatttcctattcctgctggtttcagctcctctcgcgggcgcagttggcaactatgcattcgtaggcccacgactggatatggaagcactgcctccgattaagcggcgtaagctgtccaaatacaacaggtaagtagagactacagttaacataacacaagtgcatcctgttattcaaattgttattcaaaatttagattgactggctcgcagcagtcgcatatgaagcggcgtccctggaagcagacgccccttcagcagtcccccagattcttgcgcacgcattctgtgacaccagcccaggcctaaagattcggctggacctagacaccacacatatccaatgcgtatcctttgtaccttgcttgcccgcttctaatctttggtttgccccatttaatgttttcatacataaataagactgtgttttaatctatattcgtatgtttagatttcttttatcaaactgtgtgtagtacagtccttgctacatttggcttgcaatatttatagttagagctacatttttgactagcttctaggccacctaatttgtaaataaatttagtaccgaaattctacgtaaactaaataaattatttagcgaattggttaaaagttaaattagttgagcatacgtagtaaagattttataaattaaagcgaacccaaatgaaattgtatttattggccaatgctaacggaaaaatgttattgcgtattagagaactaaaaccatatttatgtcgaactagatacgttctaattgttaagtacccgtaccctacccgaattcccaaagacgttttgtagcagtccagcttaaaatcgaacaaatatattgtatttgccacgttataaatgtcatcaaattcactcaagattgatatattaaaataattattaaaaaacgatccaataaaactgcaaagaattaacttttatcacgaacaaacctagtaccattatttattgtggtgtttgggaaaagtgaacatacttttaggcatagcagtataatttttgtagaattccatgcacgaatttttaagcaagtattctttgtagttcttgaaaaatgagtggatgtaaataaattagtttttaatggccaactctctaactcaaaagagtgatccttactcatataaaacgaaagttcaatttcggaaataacgtttactcactaccggttatcagagcctcaatcagaacaaacaagtttttttttttttgctcacatcttgtatttgggctatcgcataccactgttttatatgatttactggcggcactcctctggtatatatggttcaagagctcgagttcaaatgataatattgcctatcagccaagaatattagagattagttgttccgtttgccgttaagcctttagccccacgattttgccacacttcatcgtgtgtgcactccgctgagatagtcttgataacatctgtagacggatagcgaaggcgaagagagagtgatgcgcacttgataaggtgagttccgttggatacaacggggtggggttgagttcccaataacctgagcatctatggcatcgtcatcggcaacagcacagatgtaaataagatcacccgatggcgctaattgagccaccaagatgttttcatcggctgtcaggcatgtttaccgcctc

SEQ ID NO: 41306 - DNA, 3704 bp, DROSOPHILA
atgatgcgtcactccagtttgcgccttataattggcggcctgatactcctcctctttgtgcttaatgtcttcagcaaggaacagggatctcattcccacaaacgcagccattcggcgaagagattctcgcgggactccaactccgcacgtgagcgacgcccaaacataatcctcattctgaccgatgaccaggatgtggagctgggctcccttaacttcatgccgcgcacgttgcgacttcttagagatggaggagccgaattccgacatgcctataccaccacacccatgtgctgtccggcgagatcgtctctgctgactgggatgtacgtccacaaccacatggtgtttaccaacaatgacaactgctccagcccacagtggcaggccactcatgagacgcgatcctatgccacatacctctcgaatgcaggctatcgcaccggctatttcggaaagtatctaaacaagtacaatggatcctatatcccaccaggttggcgggagtggggaggattgatcatgaactccaagtactacaactacagcatcaacctgaatggacaaaaaattaagcacggttttgactacgctaaagactactatccggatctgatagccaatgactcgattgccttcctccgctcctcaaagcaacagaaccagcggaagccagtgctgctcaccatgagttttcctgcaccacatggccctgaggattcggctccccagtatagtcatctcttctttaatgtgacaacccatcacactccatcgtatgatcacgccccaaatccggacaagcaatggatcctgagggtcacggaacccatgcagcctgttcacaaaaggttcaccaatctgctcatgacgaagcgactgcaaacgctccaaagtgtcgacgttgccgtggagcgggtttataacgagctaaaagaactcggagagctggacaacacttatatagtatacacttccgatcatggttatcatctgggtcagtttggacttattaaaggaaaaagttttccctttgagtttgatgtccgtgtgccgttccttatccgtggtccagggattcaggcatctaaggtggtcaatgagattgttttaaatgtggacctggcccccactttcctggatatgggtggtgtgccaacgcctcagcatatggatgggcgcagcatactgccactgcttctgagcagaaatcgcgctgtgcgagacaactggccagatagcttcctcattgagagttccggcaggagggagacagctgagcagatagccgaatctcgtgcccgccttcaaattgaaaggcgaaacatgaaactggccaacagttcgctgcttgaagatttccttgaaggagcaggcgaaagtaccaccattgtttcgagcagcagcaccgctgccacattgatgagctcaaccgctcagcagccggaggatggggaagaggaagtggaaacggacaacgaagaggatgatgtagacggtgatggtgccatggacagctcagcagcagctctggaagaagatgacctcgacgatgccgccttcgaggagggtgatgaagagcttgatcaggagtttcaacaaaacaacgatcttccactggctccttatataaccaagatgatgcgccttaactcggagtgctctgacccggcgctactcaaaaactgtctacctgggcaaaaatggaagtgcgtcaatgaggagggacgttggcggaagcacaagtgcaaattccatcttcagttagagcatcagttggctgcgatgccccggaagcaatatcaacgtaattgtgcctgtttcactcccgacggagtagtctataccaagattcgagccccatctgctggattgcatcgcgttaacaagcgcacacataacggcccaggaaggcgtcgaaacaagcgggaggtgttccatactgagttacctgacgagatggaggagctgttagatctccaccaggtggtagatcaacttgttgatcatacgcatcgcagcaagcgtgatttgcccgcaagcagcaatgagactattgcccaggtcattcagcagatacaaagcaccctggagatcttggagcttaaattcaacgagcacgagctacacgcatccaactctagtggcaactcatatgagcggggagaaaagtacacaaaatctggtggccatcggtgcttcgtggatgcgaccacggctaaagtgaactgctcaaatgtgatatacgacgacgaaaagacgtggcgtacttcgcgtactcaaattgatatgctgatcaagcttctaaaggacaagattggcaagctgaaggagatgaagaagcagttgagggaaagcaataaacaggccttggccgctggtagaagaaatgataaccgacggcgtaatgatcaaagtgtgctggatagtggagccggaccagagtttaacatgagctactttactgagatcagcagcacgccaagatcaaacgtcgtaggtcaaacggaagtattccaaggatatggaagtgcaagcgcattcgattcattggagcaaacgcagtcgcatcggtttacaccgcgagcagaatgctattgcgaaccagatgtaggcgagaaccatgcagactctaaggaaatggcgcgtgaggcacgacgaaagcttaaagaggagcgacagcgcaagaaggaacggaagcgcattaagaaggctcgtctggaaaaggagtgtctgtccgagaagatgaactgcttctcgcacgacaatcagcactggcgaacggctcccctttggaacgacagtccattttgcttctgtatgaacgccaataataacacctactcctgcctaaggaccatcaatggcacccacaactttttgtactgcgagtttaccacaggccttatcaccttctataacctgaccattgatcgctttgaaacgataaaccgtgcagcgggtctgacgcctggagagagatcccacatgcacgatgctttagatcagttgaagagctgtcgaggacgcagttgcagcatccggcgacaccagaatcacctggagggcggatctagtgctccactgctgcccatcaatcaagtgcaccgcaacaacaaacgaaagcactctcctctcgcgggcgcagttggcaactatgcattcgtaggcccacgactggatatggaagcactgcctccgattaagcggcgtaagctgtccaaatacaacagattgactggctcgcagcagtcgcatatgaagcggcgtccctggaagcagacgccccttcagcagtcccccagattcttgcgcacgcattctgtgacaccagcccaggcctaaagattcggctggacctagacaccacacatatccaatgcgtatcctttgtaccttgcttgcccgcttctaatctttggtttgccccatttaatgttttcatacataaataagactgtgttttaatctatattcgtatgtttagatttcttttatcaaactgtgtgtagtacagtccttgctacatttggcttgcaatatttatagttagagctacatttttgactagcttctaggccacctaatttgtaaataaatttagtaccgaaattctacgtaaactaaataaattatttagcgaattggttaaaagttaaattagttgagcatacgtagtaaagattttataaattaaagcgaac

SEQ ID NO: 41307 - protein, 1114 aa, DROSOPHILA
MMRHSSLRLIIGGLILLLFVLNVFSKEQGSHSHKRSHSAKRFSRDSNSARERRPNIILILTDDQDVELGSLNFMPRTLRLLRDGGAEFRHAYTTTPMCCPARSSLLTGMYVHNHMVFTNNDNCSSPQWQATHETRSYATYLSNAGYRTGYFGKYLNKYNGSYIPPGWREWGGLIMNSKYYNYSINLNGQKIKHGFDYAKDYYPDLIANDSIAFLRSSKQQNQRKPVLLTMSFPAPHGPEDSAPQYSHLFFNVTTHHTPSYDHAPNPDKQWILRVTEPMQPVHKRFTNLLMTKRLQTLQSVDVAVERVYNELKELGELDNTYIVYTSDHGYHLGQFGLIKGKSFPFEFDVRVPFLIRGPGIQASKVVNEIVLNVDLAPTFLDMGGVPTPQHMDGRSILPLLLSRNRAVRDNWPDSFLIESSGRRETAEQIAESRARLQIERRNMKLANSSLLEDFLEGAGESTTIVSSSSTAATLMSSTAQQPEDGEEEVETDNEEDDVDGDGAMDSSAAALEEDDLDDAAFEEGDEELDQEFQQNNDLPLAPYITKMMRLNSECSDPALLKNCLPGQKWKCVNEEGRWRKHKCKFHLQLEHQLAAMPRKQYQRNCACFTPDGVVYTKIRAPSAGLHRVNKRTHNGPGRRRNKREVFHTELPDEMEELLDLHQVVDQLVDHTHRSKRDLPASSNETIAQVIQQIQSTLEILELKFNEHELHASNSSGNSYERGEKYTKSGGHRCFVDATTAKVNCSNVIYDDEKTWRTSRTQIDMLIKLLKDKIGKLKEMKKQLRESNKQALAAGRRNDNRRRNDQSVLDSGAGPEFNMSYFTEISSTPRSNVVGQTEVFQGYGSASAFDSLEQTQSHRFTPRAECYCEPDVGENHADSKEMAREARRKLKEERQRKKERKRIKKARLEKECLSEKMNCFSHDNQHWRTAPLWNDSPFCFCMNANNNTYSCLRTINGTHNFLYCEFTTGLITFYNLTIDRFETINRAAGLTPGERSHMHDALDQLKSCRGRSCSIRRHQNHLEGGSSAPLLPINQVHRNNKRKHSPLAGAVGNYAFVGPRLDMEALPPIKRRKLSKYNRLTGSQQSHMKRRPWKQTPLQQSPRFLRTHSVTPAQA

SEQ ID NO: 41308 - DNA, 3764 bp, DROSOPHILA
atcagccatatgcaaaattcttggcgtgaaggacgtttgcactgcactgtatctcctaaccaatggacgagtatcccagcacatgaacagggtgagtgaaaagttgagagcaggctaatcaggcttatgtatacaacttaactacctttttcagaccctcattccgatgttgattgccactcatccggctgggatttctagcaggcagccgagacacttcttccagctcaaggactccgggagattccgacaatacgactttggatttggaatgaactatcttatttacagacaaaacactccaccggaatatcccctggaaatggtgcgtccgcactccgccatccacatcttctacagcgatgacgatggaaccatctctccgagagacgtcctaacccttgccagcaagttgccttacgcagtcccccatcatatcacggatgaaacctggaaccatatggactttcttctagctaacaacataaatgaattgattaataatccagtaatcaagattatcaagaccttcgaagaaaatattaagcacaaaattgggaatataaagggggaaataagtattgatgcacttttaaatgaattttaatagttggggaaacataattgttttaaagagtgttgataaataatgtatatattgctataatgtcgcatattaaagagtagttaaagtgaagctcacatttgtggtcataattaagtatctcaaggaaatgatgcgaaccgaattgtcaaataattatttgcatgattataccaaaaaagagttgtcttcttagcaataaaaggatttgtatttttatttggtctaaactataaattatttatttattaatcagtacatatatccatggttgatttagccgattcaacgcggactccgtttcgtaattctacaatttgtttttggcactagtgatagttctggctttgatccatctacatcctccgacatcctggttatcatcgaacgcttccatcagcgtcgccgctgctcgtagcggttcatggaaagcacaatgttgtcgaatatgtactccctgacccccaatccgcagatgaagtcaaagtggttccatcgcttccagggaaccttgtacacggcttccacgttgggcaaccgggtgagcaatcgccagatgtccgccggcgccacaatgtagtcgttttccgagaagaagaccgtaactggcgtggacacgttctccagcgcgtactccggtggctccagttgctgatagtgcagccagttccgctcgggaccgtagtcatactgccggaatctggtggacacatagccctggaagtagtgcatcagctgcttcaccgatccgcccgccggaaagttggccatcaggtcgggcaataacgtcttgttaaggaatcgggtgtcatagccaacggctggccacaggcgactgatgcagaccagtggcttttcgttctccagacacgtcatcgataggaacttcttgaagaacttgttcgtggagaacatctcgacgccctcaagcatcttagagacatagttccgtgtgccaagcactggaccaatgaccttggccagcccactctttgtattgctcacataggccaccggggccagcagggtggcgctcttgaaaacggcattatactgtggcatcatcgaattgaggaccaggaagacggtgccgccctgcgagatccccacaaagtgcatagccttctgtccggttgtccggagcacgtaatccacctgggctggcaaatcgtagacgcccatctcgtgccagctgaagtcccagaactcccgttctgtggtgttccgccacatgttcttccggcagtagatgttgcctctgttgtttcccagccacacatcgtatcctgctcgccaaaggaggtaggctaaggagtcctcccgcccgttcagcagccacctgaaaaggagagagcggtaatataatctgcagttacttacaatttaagaacggaatgctattggaatacataaaatacggagtttcccaatcagatcatagccctaagatatctgtttttaaataatcgttccttttaatctgatatgagatagttggaagtcgtgtatacgacttcagcattgggatctcccaatgattcttatcttctgcaagcggaagtatccattaggaatgtggtttactatactacgcacacatccgatgaggcatagagtccggagagcaggaagacgacagggcgtctcagcagactgcccagttcgggatccacctgcgggatgcggtgcagggtgagcacatatccgtccttcgtcgtcaccgagtggcgctccacgttgtagccgtcgttctggatgcgccgcacctgcaacggaccaaagacaacgaacaggtaagcaacaggtagccaaactggaggcaggaagcgagggcaaggcactcggcacaccaaaatccgaaatgcaaacacaaattgttggcccattcggcggttgacatttggaggccacgcgacgcgtgcgttgtgacacttggttaattagaaattccactggcgagccgacctggggcttacccctattccagtcccagccccatcccctcttcatcaccattcgcattcgcactcgacgatcttggccaggaacacctaccgcatctgtgatgatgatttcgcgcgactgacgcagagtggccctggacacctgctgcaatccgagcagcgccaggcacagcagcaccactcgctcccgtcgcatggtggtggtcaccaggattatggttacatgaacgacgcacgctgggattaagtaactgggtaaccgatcagaagtccaaccggttcgcagtcgatcgcaccgaaaccgaaaatgaaaatgaaaacgaaagctgcccaaggatcggcggctttaagaccaaaagacagcactttctttctttctttcgctgccagcagagagctttcaaaaacgccgaaactcaaactgaaaacgaaaccaagccaaaaccgaaaaccgaaaactgaaaactgaaaaccgtctgaatggatatgaatgggaattgcaatcgaagtgccgtttcctcgtctccggctgctccgccagctagtgttcgatccgaatgtgctttatcgactgcgcatgcgtccgccgctcgcagggcttgccactcatttgagcggcttggcggcggagcagagctccaaccggtgagccacctgcatggaatggcacagtcgctcggctcgggttacctgagcgcccagagcagcggcgcatccaagagtctgactcggcagcggccgccggcatacactgcgcgtaatatcacctgctgccgccaccgcccccatctcagctatttgcccaacccttctccaccaagccatacccccgcaaaaatccaatcagttggcacgctgccacggcaatttgagcaattataacagcttagcgaaagagagaacgctatccaaaactgtcaacggcaagtacagtgggcgaatggcgcagaaacaacctcaagatgagattaaattgtaagctccccaaacaactgaagaaagtgaaattgaccttgtcgcgtagaaaaaacccaaagattgctttgcaacatagagctcaacttttgtgaatcatgtgtcctagagcttatggcactattaaacatctttctttatcaaataactacctaccaccagaagttcaacatatcatatttcttaattgtttaacaataaccctaatttatgcttgccaa

SEQ ID NO: 41309 - DNA, 1308 bp, DROSOPHILA
atgcgacgggagcgagtggtgctgctgtgcctggcgctgctcggattgcagcaggtgtccagggccactctgcgtcagtcgcgcgaaatcatcatcacagatgcggtaggtgttcctggccaagatcgtcgagtgcgaatgcgaatggtgatgaagaggggatggggctgggactggaataggggtaagccccaggtgcggcgcatccagaacgacggctacaacgtggagcgccactcggtgacgacgaaggacggatatgtgctcaccctgcaccgcatcccgcaggtggatcccgaactgggcagtctgctgagacgccctgtcgtcttcctgctctccggactctatgcctcatcggatgtgtggctgctgaacgggcgggaggactccttagcctacctcctttggcgagcaggatacgatgtgtggctgggaaacaacagaggcaacatctactgccggaagaacatgtggcggaacaccacagaacgggagttctgggacttcagctggcacgagatgggcgtctacgatttgccagcccaggtggattacgtgctccggacaaccggacagaaggctatgcactttgtggggatctcgcagggcggcaccgtcttcctggtcctcaattcgatgatgccacagtataatgccgttttcaagagcgccaccctgctggccccggtggcctatgtgagcaatacaaagagtgggctggccaaggtcattggtccagtgcttggcacacggaactatgtctctaagatgcttgagggcgtcgagatgttctccacgaacaagttcttcaagaagttcctatcgatgacgtgtctggagaacgaaaagccactggtctgcatcagtcgcctgtggccagccgttggctatgacacccgattccttaacaagacgttattgcccgacctgatggccaactttccggcgggcggatcggtgaagcagctgatgcactacttccagggctatgtgtccaccagattccggcagtatgactacggtcccgagcggaactggctgcactatcagcaactggagccaccggagtacgcgctggagaacgtgtccacgccagttacggtcttcttctcggaaaacgactacattgtggcgccggcggacatctggcgattgctcacccggttgcccaacgtggaagccgtgtacaaggttccctggaagcgatggaaccactttgacttcatctgcggattgggggtcagggagtacatattcgacaacattgtgctttccatgaaccgctacgagcagcggcgacgctga

SEQ ID NO: 41310 - protein, 435 aa, DROSOPHILA
MRRERVVLLCLALLGLQQVSRATLRQSREIIITDAVGVPGQDRRVRMRMVMKRGWGWDWNRGKPQVRRIQNDGYNVERHSVTTKDGYVLTLHRIPQVDPELGSLLRRPVVFLLSGLYASSDVWLLNGREDSLAYLLWRAGYDVWLGNNRGNIYCRKNMWRNTTEREFWDFSWHEMGVYDLPAQVDYVLRTTGQKAMHFVGISQGGTVFLVLNSMMPQYNAVFKSATLLAPVAYVSNTKSGLAKVIGPVLGTRNYVSKMLEGVEMFSTNKFFKKFLSMTCLENEKPLVCISRLWPAVGYDTRFLNKTLLPDLMANFPAGGSVKQLMHYFQGYVSTRFRQYDYGPERNWLHYQQLEPPEYALENVSTPVTVFFSENDYIVAPADIWRLLTRLPNVEAVYKVPWKRWNHFDFICGLGVREYIFDNIVLSMNRYEQRRR

SEQ ID NO: 41311 - DNA, 6232 bp, DROSOPHILA
atccgtaaagtttgtggaaggagccaaccgattggcttgaatgtgcgcaaacaactgaaagtaacgatcgaaacggaagaaacttttacgcggtacgatacgaacgatccgaacgtgccgatcgaaccgaaccgatccaatacgatccaatacgatacgaaacgagtggatatctgtggttccctgcgataatgtttgctaggatcctgggcacagggtcttcggatgggatggtatgggttcggacggctacctgatcgaggtggtctccctcccgcatgttgcaattgttttcgctggtagttttcctgagcggtttcctttctttttattgctggtttgctgctgctgcttctgctaggttcttgttggttttattctaagcatgtttgcggtggcttcgactcgttgaaattctttattatctggccttcgggttccctccctgtttgtttgcttggcggcttaatttatgcaaaagaaaatgtgtccattgtcttagtggtgtgcagtacgtgcgcatgcgcggtaatcgcatatcaataaggaaatatccgttacgtgactgatatccaaaaatctcagttgctgcatgtggcatggcagcagctagctcccgcataggccaaaatccagatccagatgccgggcacgtaatctacccaaaaatagttaaatgcatttttgatgcacttgttaggggctatgggaacaaatgcgaaacagttgggaaatacgaaaaggagggacatactatccaaactagctatcaaaaacttgttatagctaaacacaatttccggtgaattaataaccaaactcacctgatgtcttcatttgttaaggagccaccccttaacagcactcatgtttaccgaggtcagaatgcgaaaagatattagttcttaaatttgaacatctctttctcttttttatacatgtatgtacattataattaaaatataatattctttcaatttaacactccggagtggtatatggatttatacgaagtaatcataaaagaaatttggtttttatttttcaacaagaaaaattatgaaatatgtactacctaagacttgcgtcttccaacaaaatgttccattttccagatgtacaaatatgcaaaaaacaatttaaaataataataatgctaagcttataagtctttgtctttaagccaaggtcgcacgcttggctacaaactccctagaagtcttctccttgttggtaaagcgagcatacctaccaagagataattaaaaaggtaagaagaacagaagaacaaagaagacattgttacgtacgttctgtgatatttggccacatcggaggcgctgagcgaaggacgagtggtttggaacgactcaatcaggtgcttctgcttcaaggaaattttctttgccagtttctgggaaagcaataagaaacaaatggtattttatactgtggccagagactaagaactacgtgactaatcattgttgcaggaagtagcatagatttcacttttgatttaaaagacaaacacgtaaaggagtttttacatagaagttacatttgaaatcaggatgagaaacaataaaacatgaaagaaacggttgaaagcttgcatgacccataaagcagattgtttccggtgaaaataattcccagctcacctcgtgtccgaattgagctagcgcctccttaaccgccgccatgttcgccgaggtcaggatgctctggatatcggcgccagtgtagtttgcagtttttcccgcaaaccaatcgaagtccacgcactcatcaaggctcagtgttgaactgagtgcttcaaatatacgtactctggccggagcatccggcaaaggacactccaccaagcgatcaatgcgaccggatcgaagaagcgcgggatctagcagttccggtctggaggtagctgctatcacggtaactccctgcagtccttcaacgccatccagttctgtgagcaactgatttaccactcgatcggtgacccccgtggaatcgtgaccacgtttcggcgccaagctgtcaaactcgtcgaagaaaagcacacatggtcgggcactgcgagctcgattgaacaggtttcgaacattttcctcgctttgaccaatatatttggcgagcaactcaggacccttgacggaaatgatgcgcaggttccacgatgtggccaactgagagaccagataggttttacctgttcctggtggcccatatagaagtactccggcctggttgcgcagtggagaggcgttaaaaatggttggatactgtaagaaattaatgatttattaaattttagaaaaaaacatatatttcgtttaaaactcacccttgatggccacataaggacctcctccagaactcccacaactgactccaggccaggcaactcctcgacgcgcatttcattggcatcggcatcattgccagttctttgattgctctgaatgccctgcaggcagtacgagtttgtgtgctccagggactcaataagctgatcattggtcagaagaggctgggtcttgcctggaaaaaagggaatttaacatgataaagttgcttactaacactacaaactactcacttatgcgataagcataaaatattgcacgctccacgaactgaacaagatcacatttccggtagccctccgtgaggttggagaacttaacaagatccaggtccttggccacattgatatggctgcacagctctcgaagaattatctctcgatctgctcgttccaaattgggcagacgagcaacagtctggaagacatgtcttccccttggtgagctcaatcgcttattgagggtctgcaactcgttgacggtggcgattactgcaatagcgttgttggtggtatactgaacaatcaactgatacacagtatccgccatgcgattgtagtactctccatcctgactggactgctctccagcagcgtgggccagtacatccaagttttctagcacaacaatggcgggggcatgctgcaggcagctggtaaaaatgttgcgaagatctttttggatggactccgtcttgcggcctttgcttcgcgatccgtggaagaactcgaagtgacaataatccggcttgcgtgacagctggtccaaaatgcgctccacaagaactgttttacccgttcccgaggcaccagcgagtaggacattgcactgacgcatgacggaattgtcagcactgaggcatagattcattcgcaattcctgaactacctgatccacaatcttatcgtactccggtaactggatgagatcctgaacacttagtggcgatgtcggaggcgtctcctccttaataatctcgccaaccggacgcaccagatctgctgcgtagatcttggactccttcagaaactgcgcgtccaccacgcaataacgaaagtgttctggtaaaattccaacagtaaccagtaaatcgtcctccagccgtaccacctcctcctggttgaagagcatcggcttgtgctgagttctctctatcacaaatcgcttaaatgcgttctccatgattttgtagtgcgtcttcttgttggcaaatagctcaattttttctacaaagttaactacggtagttttaggtcttagaaccactcgttccaattccttaatacccagcaacttcataagattggcatttagttcgatcgatggatgaatggtttctggtagatcgtcctcaatatcgtcttctactgtgcgcactctcacatagtaatccttgtcggctgcggtgtgcatgcaatagaatagatctagatcaaagaactcaggcagatgctttccgttcacaaacacatccgactcctgggcctgctcccgccatagacctcgaatgacacgaaattcgaagctacgcgagctttcgcggcgcaagtcctttttaagacgctccatgtgatcctgacgcttgttacgctgaatagtatttttcacattggacaccgtggaggaatgggtcaacggtgttaacttttcagtcagctcatccttgacctgggcagtggttttacttctggagagttttgtgttttcctctataacaccatttgaagttccattggtcagacccttgtacagattgggcgccaccacgagttccgtattgtgatctattctcccgtagttcatgtgcggcttcagacgatctaacaaaatggtttccaaattaatacaaacgacatttcgttgatggcatatatttacccactgtcagcgcaacttgcatcgacttattaatccaaacaataaggatctgcgttgaattcactatgcgagtttgttccagcacactgcccgatatcttttcagtgctaagttcctgcaaaaacgtgtgttttcatattaataaaagcaagtatatgaattaagccccttacagaaaggggaaatctgattaaaggttaattaattggttaatttaatccaatcaattcagcgggtcaatggcaatgccggccaagcaatggcagtataaataaagaccaagcgcacgcccgcgccaaatgctaatccgatataaacggacttgtctatttttaagctgaccgctgattgctggccacgccgccaagcaggcgaaaccgtcactcactatgatctcccagtccttggacgagacgggggtaacgtggacgctgcgcaggttgagaacgtcagcgatgagcgcacacttgaccagatcattctcgtgcagacctacggcaagaaagggtaagtgggtgctgctagcgtacgaggtacggggcagatggccggagtccaatattacggcacattggcaaccgatgcacatccggccgttaagtaatggcttaccgatctccttggccgctctggcattgatcccaatctcggtgtctttaatgccgccgccgcccttttgtggcgcccaggaggcgtaatgcgtccgaccattgtactgcaagctcaggcagcccgtgtcctaatcagaatggttcaccggattaatctttggcgtatctaatctgaatggagcgaagacctttagacacttacataggtcgaaacgacgccgtagtactgatccggcagcagaacaaagttgctcctgatgggccgatagaccaccttaaaagtgcgtttgaacattctcgttgtgggcgtgtgtgaatttagtacgctccttcctggtttaaatcattttcgcactaaacttctgctctcagcggaatttacttttgctttattagagatgggagctcgcgcatcagctgagccgatacttgcgcaacaggtgagacagctgattagagatggcccttttcaactgttcccagcagtgaccgctgccataaccgtttttcaaatttacgtgagaacagacataaaataaatattacagctcgtagtaaatgttattctatatttaaaaggaaattgtaatagttaaaacttgcaatgaatcagttacgttcaaaaaaggaaacacactttagtttttggctagtttattgggttaataatattttatttaaaatagttcgagtgttcaatatagtcatgtaaatgtgtacaaaagatccggcattttatatttaatatatcgatttcccttcactttcgctcctcgtataccatgctggcgtcttatcaaattaaataacacaatatttaaaaactaacaatgcagagcgtgctaatcgtgtatgtttgcattaaaacgttgcgaacttatctcctcttgcgctttttccttatttttgcaaattaaacagaaaaagatattgaaaggatatgtatgcataaggatgccgatggcacttgtaaatatttaaatacaataaaactgtgcttatagttcaactaaattcgttattgcattttttaaatatatatctaagtatctaaatatcgcgagaagacactatccaaaagagattacaaaagcttttcagtttaatttgcgtgtaatgttctgctgctttatagtaaactgctttatatcagtcttcttcaatttgttgttgttcgtgagaataaattggcatataaatggaatatattttaatattgtttaatatatcctttgtataaaaatttgaataaaattttataaaatgtgtggttcatttagtgtaaaatattctaaaaatcatttcttctggcatgcaatattttggcgttcgtttggactttcgtagctggctgtgtgcggagtgaaaaaa

SEQ ID NO: 41312 - DNA, 3275 bp, DROSOPHILA
tgagagcagaagtttagtgcgaaaatgatttaaaccaggaaggagcgtactaaattcacacacgcccacaacgagaatgttcaaacgcacttttaaggtggtctatcggcccatcaggagcaactttgttctgctgccggatcagtactacggcgtcgtttcgacctatgacacgggctgcctgagcttgcagtacaatggtcggacgcattacgcctcctgggcgccacaaaagggcggcggcggcattaaagacaccgagattgggatcaatgccagagcggccaaggagatcggtctgcacgagaatgatctggtcaagtgtgcgctcatcgctgacgttctcaacctgcgcagcgtccacgttacccccgtctcgtccaaggactgggagatcatagaacttagcactgaaaagatatcgggcagtgtgctggaacaaactcgcatagtgaattcaacgcagatccttattgtttggattaataagtcgatgcaagttgcgctgacagtggatcgtctgaagccgcacatgaactacgggagaatagatcacaatacggaactcgtggtggcgcccaatctgtacaagggtctgaccaatggaacttcaaatggtgttatagaggaaaacacaaaactctccagaagtaaaaccactgcccaggtcaaggatgagctgactgaaaagttaacaccgttgacccattcctccacggtgtccaatgtgaaaaatactattcagcgtaacaagcgtcaggatcacatggagcgtcttaaaaaggacttgcgccgcgaaagctcgcgtagcttcgaatttcgtgtcattcgaggtctatggcgggagcaggcccaggagtcggatgtgtttgtgaacggaaagcatctgcctgagttctttgatctagatctattctattgcatgcacaccgcagccgacaaggattactatgtgagagtgcgcacagtagaagacgatattgaggacgatctaccagaaaccattcatccatcgatcgaactaaatgccaatcttatgaagttgctgggtattaaggaattggaacgagtggttctaagacctaaaactaccgtagttaactttgtagaaaaaattgagctatttgccaacaagaagacgcactacaaaatcatggagaacgcatttaagcgatttgtgatagagagaactcagcacaagccgatgctcttcaaccaggaggaggtggtacggctggaggacgatttactggttactgttggaattttaccagaacactttcgttattgcgtggtggacgcgcagtttctgaaggagtccaagatctacgcagcagatctggtgcgtccggttggcgagattattaaggaggagacgcctccgacatcgccactaagtgttcaggatctcatccagttaccggagtacgataagattgtggatcaggtagttcaggaattgcgaatgaatctatgcctcagtgctgacaattccgtcatgcgtcagtgcaatgtcctactcgctggtgcctcgggaacgggtaaaacagttcttgtggagcgcattttggaccagctgtcacgcaagccggattattgtcacttcgagttcttccacggatcgcgaagcaaaggccgcaagacggagtccatccaaaaagatcttcgcaacatttttaccagctgcctgcagcatgcccccgccattgttgtgctagaaaacttggatgtactggcccacgctgctggagagcagtccagtcaggatggagagtactacaatcgcatggcggatactgtgtatcagttgattgttcagtataccaccaacaacgctattgcagtaatcgccaccgtcaacgagttgcagaccctcaataagcgattgagctcaccaaggggaagacatgtcttccagactgttgctcgtctgcccaatttggaacgagcagatcgagagataattcttcgagagctgtgcagccatatcaatgtggccaaggacctggatcttgttaagttctccaacctcacggagggctaccggaaatgtgatcttgttcagttcgtggagcgtgcaatattttatgcttatcgcataagcaagacccagcctcttctgaccaatgatcagcttattgagtccctggagcacacaaactcgtactgcctgcagggcattcagagcaatcaaagaactggcaatgatgccgatgccaatgaaatgcgcgtcgaggagttgcctggcctggagtcagttgtgggagttctggaggaggtccttatgtggccatcaaggtatccaaccatttttaacgcctctccactgcgcaaccaggccggagtacttctatatgggccaccaggaacaggtaaaacctatctggtctctcagttggccacatcgtggaacctgcgcatcatttccgtcaagggtcctgagttgctcgccaaatatattggtcaaagcgaggaaaatgttcgaaacctgttcaatcgagctcgcagtgcccgaccatgtgtgcttttcttcgacgagtttgacagcttggcgccgaaacgtggtcacgattccacgggggtcaccgatcgagtggtaaatcagttgctcacagaactggatggcgttgaaggactgcagggagttaccgtgatagcagctacctccagaccggaactgctagatcccgcgcttcttcgatccggtcgcattgatcgcttggtggagtgtcctttgccggatgctccggccagagtacgtatatttgaagcactcagttcaacactgagccttgatgagtgcgtggacttcgattggtttgcgggaaaaactgcaaactacactggcgccgatatccagagcatcctgacctcggcgaacatggcggcggttaaggaggcgctagctcaattcggacacgagaaactggcaaagaaaatttccttgaagcagaagcacctgattgagtcgttccaaaccactcgtccttcgctcagcgcctccgatgtggccaaatatcacagaacgtatgctcgctttaccaacaaggagaagacttctagggagtttgtagccaagcgtgcgaccttggcttaaagacaaagacttataagcttagcattattattattttaaattgttttttgcatatttgtacatctggaaaatggaacattttgttggaagacgcaagtcttaggtagtacatatttcataatttttcttgttgaaaaataaaaaccaaatttcttttatgattacttcgtataaatcc

SEQ ID NO: 41313 - protein, 1006 aa, DROSOPHILA
MFKRTFKVVYRPIRSNFVLLPDQYYGVVSTYDTGCLSLQYNGRTHYASWAPQKGGGGIKDTEIGINARAAKEIGLHENDLVKCALIADVLNLRSVHVTPVSSKDWEIIELSTEKISGSVLEQTRIVNSTQILIVWINKSMQVALTVDRLKPHMNYGRIDHNTELVVAPNLYKGLTNGTSNGVIEENTKLSRSKTTAQVKDELTEKLTPLTHSSTVSNVKNTIQRNKRQDHMERLKKDLRRESSRSFEFRVIRGLWREQAQESDVFVNGKHLPEFFDLDLFYCMHTAADKDYYVRVRTVEDDIEDDLPETIHPSIELNANLMKLLGIKELERVVLRPKTTVVNFVEKIELFANKKTHYKIMENAFKRFVIERTQHKPMLFNQEEVVRLEDDLLVTVGILPEHFRYCVVDAQFLKESKIYAADLVRPVGEIIKEETPPTSPLSVQDLIQLPEYDKIVDQVVQELRMNLCLSADNSVMRQCNVLLAGASGTGKTVLVERILDQLSRKPDYCHFEFFHGSRSKGRKTESIQKDLRNIFTSCLQHAPAIVVLENLDVLAHAAGEQSSQDGEYYNRMADTVYQLIVQYTTNNAIAVIATVNELQTLNKRLSSPRGRHVFQTVARLPNLERADREIILRELCSHINVAKDLDLVKFSNLTEGYRKCDLVQFVERAIFYAYRISKTQPLLTNDQLIESLEHTNSYCLQGIQSNQRTGNDADANEMRVEELPGLESVVGVLEEVLMWPSRYPTIFNASPLRNQAGVLLYGPPGTGKTYLVSQLATSWNLRIISVKGPELLAKYIGQSEENVRNLFNRARSARPCVLFFDEFDSLAPKRGHDSTGVTDRVVNQLLTELDGVEGLQGVTVIAATSRPELLDPALLRSGRIDRLVECPLPDAPARVRIFEALSSTLSLDECVDFDWFAGKTANYTGADIQSILTSANMAAVKEALAQFGHEKLAKKISLKQKHLIESFQTTRPSLSASDVAKYHRTYARFTNKEKTSREFVAKRATLA

SEQ ID NO: 41314 - DNA, 3931 bp, DROSOPHILA
ttttgcagcaggagcgatgtcaaagtcaacggctagctcgccaaagtcgcatagcgagttattggccccacttcgaagcaccgggggacccacctgccacacgtggcgcaacttggagtgattgtacactcgaatcgtgttgttgttgagcagcacgagcagcgtggagtctgacacggagtgcggatgccagcggacctggcgcacttccaagtgcgggttttttaggaaaagctgagtgtccaggccgaacgtgcggcaggtgatcactggcttgccatccttgtagtatccatcggggccccagcggcggggcagctccattatgacaacgccgcgcggtccacttagtgccacgagggagccctcgttggaggccagcacgcggtccacctccaggctcaccaagctcgatggaatcagtgtctggaactggatattcacctttgccgccagcgatgagcgccagttgcgaaccaacagacagctgtccttcgcgtgccaggcaaagagcagatcgtccttgcagtccagcaggttctgagtcctttgcaccacgggcaacccattgcgaatcttcgcgaacaactccgttttgttcaattccaagacatcggtgagcgacatcgtttgtttatgcttcaattcgttgcccggcttgtaagtcaatgctagtgtgatagtagtcttcggaaatccgcaaagtatttttttttagtatttttttaattcgaattcatgaaacaagaaatttgttaaaaaaacgctaacaccaacattttcggaaaatgtactaataattattgctgcttaaacttttcaacgaaagacgttagcataaatcatgctataaatttaaaaaatggaataattgattaatagttaataaaagattataaaaggtagatgttattattttttaatattggtataattcacagaacccattaattcaacaacttttaataatctatttaaaatcactaagtgctataaacatttaagttctcttttggagctccaacagtggcacagatttcaacttcatcgtaatatcttcaacaaagtatagattttcgaagggaaaactcgttttaaacctataattccgcaataacttggctaatgtaactttcgccgatattaaggcatatctccaacctaaacagaaggaaataataagaatatagctaaaacaatggtcataaattagcgatcactctgttacctatgcaatttcgaatgcccttggtaaaaggtatataggcgtacggatgcttgtcctggatgttgtgggggaggaaatgatctgggttgaaggtctccgcatccggaccccagatctttttgcttctgtgcatgtgataaatgtcgatggcgatctggacccctttgggaaccactataccattggacagcttcagatcctgagacgtttgtcgggatacgacaggaacagggggtattactctcatggattcgttgaggatcaggtcaaggtacaccatctgctgggtgtccgcgtaggatacatcaaagtctcctgtgtttgggaatatcgtctttatttcctcaaaggccctctcctggtattccggaaacatcgccagcaacatcagggtgtagtacactgcattagccgtggtctcaaaagctccaaaaacgatgatattcgactcatcctcaacattcttcagggtaaacactcctcgtctcatcaaatccgtgaccagatttagaaataggtttttatcattggactggatggaaggtagtgctcccatttcgtcctcggccaactttctctcaattatctaaaggggttaagagattcgtaagtgaataagcggagggagtagttggaggtgctcaccttccgaataaactgacgaatctcagttttggcctggtagtagtgcgattcctttccagccagctgccggcaaaatcggctattgagccacggagagaagcacatatctgtcatggtttccaggatgctattaatggatagatgcattccgattccaagtcaaaactcaccattggtatcgccccagcaaggaattgctcctgaagctctcttcatcctttacatcgctgcccatggtggtttctgctttcatataagtatatcatatatttaatatcagatcgactcttctaactgaattatgcattctggctttcgaccactttgtatgcaaacaacaaacgtgatagccataatttatgagtctttttttaaacaaacaacacattcttctttactcacgggtggcaattcccagggtgaagctctgcagcagtggaatgagatccttctcgccgtcatcctgcagtggttcgagttgatcgagcagaagggccgtctcccggttgaaaatgggcaggaagctgagtagcaccttgtggccgaaggcgggattcagcagcttccgatggatgctccagcggggatctacacaaatccacacttaagtaactcccacactcgattccatagacacacacccttcaggctgaataatccaactccggcgccatcgtccactgccttgtaaataatgcccttgttgacgcagtggggagatgtgaagatatcctgcaccacttggggatcactcacaatcataaagggaatgggccccagccaggagaaaattgtcggaccgtgcttgtcgagaaagcagccgaatgcgttgaggatatctgcgcacggacactcagattattactcccgaccaacacaacaaacatcacaacatccaaagcaccttccctgcgcatcagccagtgagccatgcccaaaatgggatatccaagtggtcccggtatctttagcgttagcagataaaatctgcgcctgctccacagaaagtagatccagagcaggaacagcagtccacaccacagcgtccaggtcagcatgcttaatcctttgccaatgtccgctatccaattgtaataatccgtgtgccaacaattttcgaccgatcggtttgaagtgcgccaacaatttgattggccaattctcagtcaatcgactttttataatccggacgtgttgactgctttgggactcgatcgatcgatttgttgtcacgcgtggagcccagcaatcgacctggttgactctcctcctcccaggagagaagaagccgtaggggctacgggtggagacccattgaaccgcagatagcgcgccgttttttttttattgggactcgacgtggggggttgcgcatacaaatagctataattttgactaatggccagtggtgacatgcgccacacgctccaagaatgcgaattggcaaacgacgatgcactacgtcactgatcgatttcgatctgaagggggtgggggcggggtgccactaatggcgttgtataaccaatcgaatctcaggtggcaaagtgcgatgacacaaatattttattaacggtagcgtacggtcaataacaataattagaataacaagatgggtaagttttttgaagctagttttaatgggcgaccaggtctaaatatagggcgcacttgcttttcaagttaaaaacataaacagtgtggaacgagttaactttcatttaatgagaaagctttgaaatagtcgaatttttcaaaacattataaataaaatcaagttataccgccacttgacgtccatacgcacaaatgtacggatagacggacatgtccagatcaacttgaaagtgagataaatactttataaggtcggaaacgcttaccctttttttagttcccgaacaacaattcaatcgaacaaataaaacgcgatgtgttcttattctgtgtattatttattaaaatttaaaatattactttcatttggttttcaaactgtttttagcctaggtatattatgcacgtatggatgatgggaaggcggcaatgcgtctccac

SEQ ID NO: 41315 - DNA, 1485 bp, DROSOPHILA
atgctgacctggacgctgtggtgtggactgctgttcctgctctggatctactttctgtggagcaggcgcagattttatctgctaacgctaaagataccgggaccacttggatatcccattttgggcatggctcactggctgatgcgcagggaagatatcctcaacgcattcggctgctttctcgacaagcacggtccgacaattttctcctggctggggcccattccctttatgattgtgagtgatccccaagtggtgcaggatatcttcacatctccccactgcgtcaacaagggcattatttacaaggcagtggacgatggcgccggagttggattattcagcctgaaggatccccgctggagcatccatcggaagctgctgaatcccgccttcggccacaaggtgctactcagcttcctgcccattttcaaccgggagacggcccttctgctcgatcaactcgaaccactgcaggatgacggcgagaaggatctcattccactgctgcagagcttcaccctgggaattgccacccaaaccaccatgggcagcgatgtaaaggatgaagagagcttcaggagcaattccttgctggggcgataccaatgcatcctggaaaccatgacagatatgtgcttctctccgtggctcaatagccgattttgccggcagctggctggaaaggaatcgcactactaccaggccaaaactgagattcgtcagtttattcggaagataattgagagaaagttggccgaggacgaaatgggagcactaccttccatccagtccaatgataaaaacctatttctaaatctggtcacggatttgatgagacgaggagtgtttaccctgaagaatgttgaggatgagtcgaatatcatcgtttttggagcttttgagaccacggctaatgcagtgtactacaccctgatgttgctggcgatgtttccggaataccaggagagggcctttgaggaaataaagacgatattcccaaacacaggagactttgatgtatcctacgcggacacccagcagatggtgtaccttgacctgatcctcaacgaatccatgagagtaataccccctgttcctgtcgtatcccgacaaacgtctcaggatctgaagctgtccaatggtatagtggttcccaaaggggtccagatcgccatcgacatttatcacatgcacagaagcaaaaagatctggggtccggatgcggagaccttcaacccagatcatttcctcccccacaacatccaggacaagcatccgtacgcctatataccttttaccaagggcattcgaaattgcataggttggagatatgccttaatatcggcgaaagttacattagccaagttattgcggaattataggtttaaaacgagttttcccttcgaaaatctatactttgttgaagatattacgatgaagttgaaatctgtgccactgttggagctccaaaagagaacttaa

SEQ ID NO: 41316 - protein, 494 aa, DROSOPHILA
MLTWTLWCGLLFLLWIYFLWSRRRFYLLTLKIPGPLGYPILGMAHWLMRREDILNAFGCFLDKHGPTIFSWLGPIPFMIVSDPQVVQDIFTSPHCVNKGIIYKAVDDGAGVGLFSLKDPRWSIHRKLLNPAFGHKVLLSFLPIFNRETALLLDQLEPLQDDGEKDLIPLLQSFTLGIATQTTMGSDVKDEESFRSNSLLGRYQCILETMTDMCFSPWLNSRFCRQLAGKESHYYQAKTEIRQFIRKIIERKLAEDEMGALPSIQSNDKNLFLNLVTDLMRRGVFTLKNVEDESNIIVFGAFETTANAVYYTLMLLAMFPEYQERAFEEIKTIFPNTGDFDVSYADTQQMVYLDLILNESMRVIPPVPVVSRQTSQDLKLSNGIVVPKGVQIAIDIYHMHRSKKIWGPDAETFNPDHFLPHNIQDKHPYAYIPFTKGIRNCIGWRYALISAKVTLAKLLRNYRFKTSFPFENLYFVEDITMKLKSVPLLELQKRT

SEQ ID NO: 41317 - DNA, 4205 bp, DROSOPHILA
agttgaccagtgagttccgtctgtcctactatccccacgggctgaaacgattccaggagattctagccgagatcttctccgccaaagccaagcaccagttgtatggtgacttcaaggagatgagccaggtgaagaaccccgccttctacattcacctgatcgaaaagccacaggtttagatttaagtttttagttgtattcacataaggccacaagacacatccatataaatatacataaagttccttcgattcgcacagtctcgagtctcctcagttttcttctaaaccattatgcagaatcgacccacgatggagccaaagcacagggtcaccatggcggcctcgatcacgaacgggaatttggccttcacgtagttgaacatcccggtgtagatgttcgacagggcagccagtagtatcaacgtcatctctcgtccgccgaacttcgctttagactgtcactaaaacgcaatagctatcgaaaccctcaattcttggggcgagtgtcattagccttgcaaatgcttttccattacgttttcaatgggttctgctttgcagagaaaatgagtaacgatcgaaatgcgatactttaaaaaccaaatactagaaaaatttgtggtattctaataacagtggagctgaaagttggaaaactatgttacagcagtactacaatactttgtatttccgaattatgatgtatgaagtctactattattattcattattttattcttattattattttattactattattttactttttgaactataatccggaaaatgggacagtacgtcaagaatagattttactgtagtagactttgtagcacaatacccatgggtatcaaatgtttttgtgtcttcatgaaggatcgtctagcagaaaacgctgacgtatgctcattaaagtgtcatcgaatacaaaaaacagaagccagctaacgaaaataggacttaattgacatgtttattaaaaatacgttttagttctacgcaacggctttactatcacgaaaacgtggtgaaatcttaagagcgtgcttcccaatccgaatttagatgccaacgattttattaatgcgcttgacgtcggtgatctggcgatcgatctccccggttagctgggtaagtatctcggtgatagtgcggtgctgtttctccggcagctcgtacgcgttcttcttgaggtcctcttgactctgggcaatgtggtagcgctgcttgttaaacgtcttcttagcagtctccagtccagcggccaggctctgggtgaccttattaagtcgaatcacctcctgcgaaaactcccgttccgcaatcacactattgggtagtgaggcattggccctctgcatcagagcgttgcacttgcggacgagcagctcctggttgtagctaatctcctcgaagcgctcggcaagcttgtgggcccgctcgctgatcagttcgcgttcctgctccaggtcttggatctcctgcagctgttgttccttcttcagctggatctggttgatgtggcgtgtaaatgcggcgcgcacaaggtcatgtcgtttaaggtactgctcacgaagcacctcgattgcctggttaagcagttcgaagctctcctgggcggatggcgaggaaagtttatccgccaagatgggctggttaacactacgttgcaaaagcgatttaatcgtatcgacaaacggtggcccactttcctgctgagacacttccgagtcaactggcttattctcattaggtgtaaccaacagctgggcatcaattaccagcttaaggctaatcacctgaccgctgcccagcagtagaactataccggcaggaatttgtaatagggcaagtccaaagactgcgttcaccgtctcactggaatcgaattttgtgcacagaatgtactctgcacttgcagagaccgccagctctagacgatcttcatcggactcgctttccaagtaacgttgcagctctgcgataaagctgaccgtaacggcatgaagtcctgcgttgtggtaggcaaagtagcgaagctcattgatcaaatcccgctttaagtatatgggacagttgcctccttcttttccagttgcgggtgcagatattcccagctcaagttcgacagtttctagtacatgtacaacgtattcggcgggttcaatcaacacagagtcgtcaacctcattgaaagaatgctcagtggcctccgcctccataagcagagcatggtgaagctttccattggattcagctataacaatggtcggcggaagtgatgggataatcattagggcacaggactccagtccataattgtcatgtgcctgtggcgttatggtaacggggccctgcaggcgcgtattctccgaatccacgccggtcatcaaaatgtagatgtttccattctcgcggagcacaaccatgggccactctatcctctcctgtttcggcagcgatttggccgccacaagggttttgttgctcttatccaaagtggtttcgttattgccggctgtttctggttcagtgacacgtggttttgcagcaggagcgatgtcaaagtcaacggctagctcgccaaagtcgcatagcgagttattggccccacttcgaagcaccgggggacccacctgccacacgtggcgcaacttggagtgattgtacactcgaatcgtgttgttgttgagcagcacgagcagcgtggagtctgacacggagtgcggatgccagcggacctggcgcacttccaagtgcgggttttttaggaaaagctgagtgtccaggccgaacgtgcggcaggtgatcactggcttgccatccttgtagtatccatcggggccccagcggcggggcagctccattatgacaacgccgcgcggtccacttagtgccacgagggagccctcgttggaggccagcacgcggtccacctccaggctcaccaagctcgatggaatcagtgtctggaactggatattcacctttgccgccagcgatgagcgccagttgcgaaccaacagacagctgtccttcgcgtgccaggcaaagagcagatcgtccttgcagtccagcaggttctgagtcctttgcaccacgggcaacccattgcgaatcttcgcgaacaactccgttttgttcaattccaagacatcggtgagcgacatcgtttgtttatgcttcaattcgttgcccggcttgtaagtcaatgctagtgtgatagtagtcttcggaaatccgcaaagtatttttttttagtatttttttaattcgaattcatgaaacaagaaatttgttaaaaaaacgctaacaccaacattttcggaaaatgtactaataattattgctgcttaaacttttcaacgaaagacgttagcataaatcatgctataaatttaaaaaatggaataattgattaatagttaataaaagattataaaaggtagatgttattattttttaatattggtataattcacagaacccattaattcaacaacttttaataatctatttaaaatcactaagtgctataaacatttaagttctcttttggagctccaacagtggcacagatttcaacttcatcgtaatatcttcaacaaagtatagattttcgaagggaaaactcgttttaaacctataattccgcaataacttggctaatgtaactttcgccgatattaaggcatatctccaacctaaacagaaggaaataataagaatatagctaaaacaatggtcataaattagcgatcactctgttacctatgcaatttcgaatgcccttggtaaaaggtatataggcgtacggatgcttgtcctggatgttgtgggggaggaaatgatctgggttgaaggtctccgcatccggaccccagatctttttgcttctgtgcatgtgataaatgtcgatggcgatctggacccctttgggaaccactataccattggacagcttcagatcctgagacgtttgtcgggatacgacaggaacagggggtattactctcatggattcgttgaggatcaggtcaaggtacaccatctgctgggtgtccgcgtaggatacatcaaagtctcctgtgtttgggaatatcgtctttatttcctcaaaggccctctcctggtattccggaaacatcgccagcaacatcagggtgtagtacactgcattagccgtggtctcaaaagctc

SEQ ID NO: 41318 - DNA, 2205 bp, DROSOPHILA
ccgggcaacgaattgaagcataaacaaacgatgtcgctcaccgatgtcttggaattgaacaaaacggagttgttcgcgaagattcgcaatgggttgcccgtggtgcaaaggactcagaacctgctggactgcaaggacgatctgctctttgcctggcacgcgaaggacagctgtctgttggttcgcaactggcgctcatcgctggcggcaaaggtgaatatccagttccagacactgattccatcgagcttggtgagcctggaggtggaccgcgtgctggcctccaacgagggctccctcgtggcactaagtggaccgcgcggcgttgtcataatggagctgccccgccgctggggccccgatggatactacaaggatggcaagccagtgatcacctgccgcacgttcggcctggacactcagcttttcctaaaaaacccgcacttggaagtgcgccaggtccgctggcatccgcactccgtgtcagactccacgctgctcgtgctgctcaacaacaacacgattcgagtgtacaatcactccaagttgcgccacgtgtggcaggtgggtcccccggtgcttcgaagtggggccaataactcgctatgcgactttggcgagctagccgttgactttgacatcgctcctgctgcaaaaccacgtgtcactgaaccagaaacagccggcaataacgaaaccactttggataagagcaacaaaacccttgtggcggccaaatcgctgccgaaacaggagaggatagagtggcccatggttgtgctccgcgagaatggaaacatctacattttgatgaccggcgtggattcggagaatacgcgcctgcagggccccgttaccataacgccacaggcacatgacaattatggactggagtcctgtgccctaatgattatcccatcacttccgccgaccattgttatagctgaatccaatggaaagcttcaccatgctctgcttatggaggcggaggccactgagcattctttcaatgaggttgacgactctgtgttgattgaacccgccgaatacgttgtacatgtactagaaactgtcgaacttgagctgggaatatctgcacccgcaactggaaaagaaggaggcaactgtcccatatacttaaagcgggatttgatcaatgagcttcgctactttgcctaccacaacgcaggacttcatgccgttacggtcagctttatcgcagagctgcaacgttacttggaaagcgagtccgatgaagatcgtctagagctggcggtctctgcaagtgcagagtacattctgtgcacaaaattcgattccagtgagacggtgaacgcagtctttggacttgccctattacaaattcctgccggtatagttctactgctgggcagcggtcaggtgattagccttaagctggtaattgatgcccagctgttggttacacctaatgagaataagccagttgactcggaagtgtctcagcaggaaagtgggccaccgtttgtcgatacgattaaatcgcttttgcaacgtagtgttaaccagcccatcttggcggataaactttcctcgccatccgcccaggagagcttcgaactgcttaaccaggcaatcgaggtgcttcgtgagcagtaccttaaacgacatgaccttgtgcgcgccgcatttacacgccacatcaaccagatccagctgaagaaggaacaacagctgcaggagatccaagacctggagcaggaacgcgaactgatcagcgagcgggcccacaagcttgccgagcgcttcgaggagattagctacaaccaggagctgctcgtccgcaagtgcaacgctctgatgcagagggccaatgcctcactacccaatagtgtgattgcggaacgggagttttcgcaggaggtgattcgacttaataaggtcacccagagcctggccgctggactggagactgctaagaagacgtttaacaagcagcgctaccacattgcccagagtcaagaggacctcaagaagaacgcgtacgagctgccggagaaacagcaccgcactatcaccgagatacttacccagctaaccggggagatcgatcgccagatcaccgacgtcaagcgcattaataaaatcgttggcatctaaattcggattgggaagcacgctcttaagatttcaccacgttttcgtgatagtaaagccgttgcgtag

SEQ ID NO: 41319 - protein, 702 aa, DROSOPHILA
MSLTDVLELNKTELFAKIRNGLPVVQRTQNLLDCKDDLLFAWHAKDSCLLVRNWRSSLAAKVNIQFQTLIPSSLVSLEVDRVLASNEGSLVALSGPRGVVIMELPRRWGPDGYYKDGKPVITCRTFGLDTQLFLKNPHLEVRQVRWHPHSVSDSTLLVLLNNNTIRVYNHSKLRHVWQVGPPVLRSGANNSLCDFGELAVDFDIAPAAKPRVTEPETAGNNETTLDKSNKTLVAAKSLPKQERIEWPMVVLRENGNIYILMTGVDSENTRLQGPVTITPQAHDNYGLESCALMIIPSLPPTIVIAESNGKLHHALLMEAEATEHSFNEVDDSVLIEPAEYVVHVLETVELELGISAPATGKEGGNCPIYLKRDLINELRYFAYHNAGLHAVTVSFIAELQRYLESESDEDRLELAVSASAEYILCTKFDSSETVNAVFGLALLQIPAGIVLLLGSGQVISLKLVIDAQLLVTPNENKPVDSEVSQQESGPPFVDTIKSLLQRSVNQPILADKLSSPSAQESFELLNQAIEVLREQYLKRHDLVRAAFTRHINQIQLKKEQQLQEIQDLEQERELISERAHKLAERFEEISYNQELLVRKCNALMQRANASLPNSVIAEREFSQEVIRLNKVTQSLAAGLETAKKTFNKQRYHIAQSQEDLKKNAYELPEKQHRTITEILTQLTGEIDRQITDVKRINKIVGI

SEQ ID NO: 41320 - DNA, 2756 bp, DROSOPHILA
gaactgtgggcgtggcacccgtaaaaccgcgcgcattaaagttcccagccagcggttcgtccagacagaggaccacctgtgccgtctcgatgagctccagattgcgttgattgcgttcgtcctcctgaagcatttcccggtcccgtgcccacgtgctcctcggctcagcggtcagcagacccaccggcactggtttagctggcagacagggagcatcactgagcacatagaggatctgtgaggcgatctcactctccgacaactttccacgatcgctagcctgcagcacgacgcaatacatttggttgcggcaaataaccaccacatggcgatcctcgtcgttcagtcgctcccgcgacggcaggaactgcgagtcctgcttgacaccaggccgacgacaggagcccagcaggcggtagtactgcgccatgcacagcggctgattcttttcccgcgaggcggcccgctccagcggcagctccccactgtccagcatctcgcggtggctcagaatgccgtccagcaggcgagcggcgaagtgggccacgtcgtggacggtcttgaagcgacgcggcgggaacaccatgcccggattcgagttgatcggcaaagggatgcgaatatccatgtacatctcgttgagccagtagtaataggcctgttcaaaaaaaaaaaaaagacttactgttttaaaatgtgattctaatcgacattgtgaatagaatattaagagatatgttggaattctttttggccaaggcctttacatgaaaatcttgttagtggttgatatttccttgtcgtgttcgacacaaattcaattagctgtgaattttttttggaatttttggggagcggtctgagtgtgtctatctcgaagcatcacgcggagatcgctgatcactgatttctgatttctgatagcaagatgcgaagtagtataaataatggtaagtgggccattgaaagagcagtaccacagttcccccgaagcattacggataaccaaacggacgcagcccagagatgaaaggtaggatgtgaaaagatctctacagtatgcggagctgacctataaaatacttctccttctttgatcctgccagtattcgcattgtgcttcttgagcctgctggctttgagccaggcccgcttggactacacgctgcagtgcgcccgcggtgagatcagtatccgctggcccagctaccacagcaactcggagtactatgtgtgcccgagcgtctacggcagccagttgactgtccactgtccggccggccaggtcttcacctttgtcctccagaagtgcgtgtcgccagcccactatatcccagctccctcaatggaagtcctgcccaccgctgctcccatcaccatgcaggttatcgagaatgcaccaccagtgatctccgcactgtctcagccagaggccgagactccggagcaccatgagcatcaggagcaccacgagcataatgaggaggaggttgaggcacaccccatcccaccaaccccggccccagagccaccaaccccacccaccgttgctattaagccagctgtgcccgtgcccggcaagaaggtcacggtcccccagcccggcaagaaggccaccgttcctgtgccctccaaggcagccatggcgaagaagcccagcgccgctcccaagaagccagctgctccgactccatccaaggccgccaagaagccaacgccacccagcaaggcccagaagaagccagccaccgcttaaatcccaatcccaatcctaaccaagatcgccagttcaatgcccatctttcagcaagcggaatttcattcactactctaaatagcaatctaaagtaattaaatatctaactggcaacgattttcgttcgtatttcccaacgggaatggggtcgttcagggggaatggcatttgttgtttccagaatttccttatcgcggtagggagtcagaactgggtaattgattgcgatttcttgttatgcacggaatattttgataggccgccatagacatctgaattcgataatgtgaaacgaaaaggaaaaagtgacgaacagataggagctgccagtcagaactgaactaaatggtcattagtttgacacgatctacttgcatattttaaatgcaaattctagaaatagcagtgagaggtacgagaaggtcggcaagataagcacataagttagagaaggaagtcaatttcagggcaacagaaaatcaaagctattatatggtgactataactagctataagatattactcgaaagcacctccacatatcatggaaaagtacaaatgttcgagaaagttgttggtcgcatgttatctgtttattgggaatacattataaaaattgtaatcaaaccttttaatgtgggaaggtttgctggttaagatatgataacttcgataacatcgaaataacactttcataagtgtaccaatccagatactttaagtgatttctaaaccttcaacgaatttataccttaattattaaactgaaatatttaatgctcaggaattaccatcagggtgaatggaggagtggttccccagaacagaacatagaccttatgtagcaacaactgctgctatctgaatgccagtgataaagtgctgagaacttgagttccccagaaaatatcatgaagtcatttaccaggtaagaatgggatctccgcctccacagatgatctattcgcgatgctaattgacatgacactcggaatgagaa

SEQ ID NO: 41321 - DNA, 683 bp, DROSOPHILA
gataaccaaacggacgcagcccagagatgaaagtattcgcattgtgcttcttgagcctgctggctttgagccaggcccgcttggactacacgctgcagtgcgcccgcggtgagatcagtatccgctggcccagctaccacagcaactcggagtactatgtgtgcccgagcgtctacggcagccagttgactgtccactgtccggccggccaggtcttcacctttgtcctccagaagtgcgtgtcgccagcccactatatcccagctccctcaatggaagtcctgcccaccgctgctcccatcaccatgcaggttatcgagaatgcaccaccagtgatctccgcactgtctcagccagaggccgagactccggagcaccatgagcatcaggagcaccacgagcataatgaggaggaggttgaggcacaccccatcccaccaaccccggccccagagccaccaaccccacccaccgttgctattaagccagctgtgcccgtgcccggcaagaaggtcacggtcccccagcccggcaagaaggccaccgttcctgtgccctccaaggcagccatggcgaagaagcccagcgccgctcccaagaagccagctgctccgactccatccaaggccgccaagaagccaacgccacccagcaaggcccagaagaagccagccaccgcttaa

SEQ ID NO: 41322 - protein, 218 aa, DROSOPHILA
MKVFALCFLSLLALSQARLDYTLQCARGEISIRWPSYHSNSEYYVCPSVYGSQLTVHCPAGQVFTFVLQKCVSPAHYIPAPSMEVLPTAAPITMQVIENAPPVISALSQPEAETPEHHEHQEHHEHNEEEVEAHPIPPTPAPEPPTPPTVAIKPAVPVPGKKVTVPQPGKKATVPVPSKAAMAKKPSAAPKKPAAPTPSKAAKKPTPPSKAQKKPATA

SEQ ID NO: 41323 - DNA, 2841 bp, DROSOPHILA
tgataggccgccatagacatctgaattcgataatgtgaaacgaaaaggaaaaagtgacgaacagataggagctgccagtcagaactgaactaaatggtcattagtttgacacgatctacttgcatattttaaatgcaaattctagaaatagcagtgagaggtacgagaaggtcggcaagataagcacataagttagagaaggaagtcaatttcagggcaacagaaaatcaaagctattatatggtgactataactagctataagatattactcgaaagcacctccacatatcatggaaaagtacaaatgttcgagaaagttgttggtcgcatgttatctgtttattgggaatacattataaaaattgtaatcaaaccttttaatgtgggaaggtttgctggttaagatatgataacttcgataacatcgaaataacactttcataagtgtaccaatccagatactttaagtgatttctaaaccttcaacgaatttataccttaattattaaactgaaatatttaatgctcaggaattaccatcagggtgaatggaggagtggttccccagaacagaacatagaccttatgtagcaacaactgctgctatctgaatgccagtgataaagtgctgagaacttgagttccccagaaaatatcatgaagtcatttaccaggtaagaatgggatctccgcctccacagatgatctattcgcgatgctaattgacatgacactcggaatgagaagttcctattgcttgcttgcttacttgacacccagatacggaatagagtccgccccattgttatctggccgagattaccgagacttcgggccaacgattctaaggcgcaattaagcgtggttggttggcattgctgatttcaatttcgcacccagtcctacaagacacgaattaatctagaagcgggctgattaaatgtgtctagcatgggctgcctccacataaaaaggctttccagctggctggaatgcatcagtgatcggtgagccgagttagcagccagacgcattccttctccagtcttgcaagtaacccgaaaatcaaaccatcaacatgaaagccggtaaggagcatctcaaacaggccaacaggatatagccatagcccatcaaccacattctcctcctattcttttcaatcccaaagtgatctttgtgctcgccgtcgtggtagccatggccggaaaagcccacgccgcatgctccgccgttcctcaatatacggaaaagatcgatcctgtcaattgcccacagtcaggattcaagttgcccaactatgagaacgcctccgtgtactaccagtgcaccgcacagttacagtccgatggcagcatagtggtgactggcgtcttgaccagctgcggtgaagacacctacttcaactatgccttgcagagatgcgtggcctgcgccaattacttcccaagcgcccagtgcagcagtctgcccatcaatgtgacctgtgtgcccatctccaccgttaccactgtggcccccacaaccggaaccaccattgctcccaccaccgcgtcccccactaccgctgcttccaccactgcggcacctggcgagtccaccactgcagcacctggcgagtctaccaccgtcacggtgcccgtaccaccaactgaagctcctggcagcaccacggcctccggcagtgacgacatcattaccccgactggtaccaccatctccgtgccccagcccccctcacccagtgacagcaacgtgcccactccggtgacgcccgcgcccacagctcctgtcatcaacgacggtcctccgaccgcaccttcggctgccaccaaataagtcctcgagttgattctatccaaaaccccagattttgtggctgaataaagtgttggcgcacacacacacacacattatgaaaaggaaataatttttagtttttaacagcaccataataagtttgattacaagaaaatctgattgtaagctatcaacgataaaaacgcatagacatatataactgttttttgccaaaaagtgcatgcatttatttatgccttttttttttagatttcaaaataagatgtgatcacttttaatgctcacccagttatcctccgcctcacgcttgtccagcagatactgatgcagccgcgctccgattccctggggagccgagaactgcctgatcagctccttggtccgctcgagctgcgccggcgtggtaatcggttccagggcgcggatatagtcggccatcgtttcatccagtgctggaacgggcaccttgggtagagtctgcaagaacggagtcaggacaaagggttctcgatggggttagtaagctgcgtggtgctgcaaatttaattttatttctcttccacacttgacattgcccggcttttccgggaaatgcccccccatttcctcatttgtatgcatgacaatatcgagcgtcaaatggaaagttgccttgtcctgccaccagcaatactcgtacaaaaactttatgccctggggagccaaatttcaaatcaaaaaaagaaaaaaaaatagaaaaagaaatggaatggcttgaatctgacattgtactccgctccttgacatttttgccttttccgttttctgctttccaccctcgcacggaaactttaattgagaggttttctctaggagttcccaagtgggaaaatcgttgtgtttcgaggtctgcaattcaatcgattgccggatggccaaaacagctggttttgaatgcaggattactgactgcaatttcatatttaaatgtatccatcgaccttgatttacctgctgcgaaaacacagatttccactta

SEQ ID NO: 41324 - DNA, 758 bp, DROSOPHILA
cagtgatcggtgagccgagttagcagccagacgcattccttctccagtcttgcaagtaacccgaaaatcaaaccatcaacatgaaagccgtgatctttgtgctcgccgtcgtggtagccatggccggaaaagcccacgccgcatgctccgccgttcctcaatatacggaaaagatcgatcctgtcaattgcccacagtcaggattcaagttgcccaactatgagaacgcctccgtgtactaccagtgcaccgcacagttacagtccgatggcagcatagtggtgactggcgtcttgaccagctgcggtgaagacacctacttcaactatgccttgcagagatgcgtggcctgcgccaattacttcccaagcgcccagtgcagcagtctgcccatcaatgtgacctgtgtgcccatctccaccgttaccactgtggcccccacaaccggaaccaccattgctcccaccaccgcgtcccccactaccgctgcttccaccactgcggcacctggcgagtccaccactgcagcacctggcgagtctaccaccgtcacggtgcccgtaccaccaactgaagctcctggcagcaccacggcctccggcagtgacgacatcattaccccgactggtaccaccatctccgtgccccagcccccctcacccagtgacagcaacgtgcccactccggtgacgcccgcgcccacagctcctgtcatcaacgacggtcctccgaccgcaccttcggctgccaccaaataa

SEQ ID NO: 41325 - protein, 225 aa, DROSOPHILA
MKAVIFVLAVVVAMAGKAHAACSAVPQYTEKIDPVNCPQSGFKLPNYENASVYYQCTAQLQSDGSIVVTGVLTSCGEDTYFNYALQRCVACANYFPSAQCSSLPINVTCVPISTVTTVAPTTGTTIAPTTASPTTAASTTAAPGESTTAAPGESTTVTVPVPPTEAPGSTTASGSDDIITPTGTTISVPQPPSPSDSNVPTPVTPAPTAPVINDGPPTAPSAATK

SEQ ID NO: 41326 - DNA, 7060 bp, DROSOPHILA
tttatagtaaactgctttatatcagtcttcttcaatttgttgttgttcgtgagaataaattggcatataaatggaatatattttaatattgtttaatatatcctttgtataaaaatttgaataaaattttataaaatgtgtggttcatttagtgtaaaatattctaaaaatcatttcttctggcatgcaatattttggcgttcgtttggactttcgtagctggctgtgtgcggagtgaaaaaataacaacataaatattcgattaaatagaaaaatatacaaaagtttaatgcgttttactctcttctcatacaattcaatgcttatttgacttactaatttcataaaattaattaaaattcggaattacatatgtaggctctctatattcatgcggatttgccatctcggatggatgcagcaagtatttcgtatttggttaaaacgtaagtttaaaaaatataattaaatagcacatatataatttgatatatatgtaagtatatgtatgtacacagggtaagagttaaatcattatttaacaacaaaagatttgataaatacaccattcgaattttcaagttcaacttaagatctaagcttaagcttaagatcttaagcaatcaaattaaaatgcggtttttaaaacaaaattttggcgatataaatgtttctcaaaattgtaggcgagattcacagaatggatgttgtgcttgtgctataaaagttccgttcggaattgagactccagtatacggttatgttggactttacttaaaaatatattgaaaaatattcgaaaatataaggatttgcataaaagggaatgtgaatttgtgtatgtgtaagagtgtctcgaaaacaatttaatcgcctaatcacatattgcagtatctgtaatgttctctttttgtttcggtttcagtgtgaattttgattttcgattcgttgccattgccccgtcgtcgtcattgcgtcgatctctatctcgttttccgtcctaacaatccatttcctccagggtgcgcgataaacgattattgtcgatcctccggcgctgcgaccgccgcacagcatccgcccgcctgtacggctcgctcttcaggccgagcaggatgtcctccagggctccgttgtacacctcgtcctgctgcagcagctttttctcgcgcaccgagtgcgccttgctcttcagctcgtttatgacagcttcctgcaaggataatgcgccgtttgagggcaactgtttgcatttcgtttggttttttttttttggagcaagcgaggccaaaccggattgggattaaagaaaaagaaacaggtaagcattagttaaggtaaaccatcaccaaagaacgaaatattattactaagaggttattaatattttgtagtgccaatttttttttatcggggattttccaaattttataagaatctaaaagtaatttattctgttattatatggcaaatgttaaattgtataacttcaatatttatctattttatttccctttttatcaacatttctaaattttcatatttcaaaagatttgaaataatttccaaaataaataaatttggcatcgcgcagtcttggcacgaatccaacatttaaatcaaatggtcgaagtagactggatttgacgaggaattttgcggggattagaaaacacaatagtgcaggattagtctgaacaaatacaaggttaggaggtagacaagccgggcgacttacgctaatgtgggaactttatacaaaacaaatcccgtcacattggggcccacaacgagcaacaaacaaggattttgatttctttttttgttttgtgatggattagcggggatttggggcacgaactcagaccaagtccccctcgaattcccgtccccagttgggtattagacagagtgtgatgtgatttgtgtgagtcaaccaaataaccaagttaacgtgcttagattgaggaagtggccggtgggtggatgctacgattgggcaagctgcttctgttgctgattggcaaagtcgagcagacaatgtatttgctgcatgaatcaaatcaaacgagatcaaaacaaatcataacaggttatcaggtttgaaacgatacgtgcatatagagattagacatatggaaccgattagagggacttggccacccttcgatggagctagctcttcgtggtcaatgtcctccacttacctgttgcttcttctggttaaccttgttgcgcataagcacctgatcgttctctttcttggaagcggccagcgcagcggccttttccaggcgaagacgctgctcgttctcctgatcgtgttgctagaattaccaaagatatcatattagcatagtattagggaatcatttgaaatagtcctaccttaaacgctctcgtgaagcgtacgatcaacgcaaagaaagcagccgcatctgcattccgcgaggagtcgccaaagtactcaacgcactccttgaacgcttcctgtgcatgccgcagatcgctcttgatcttcttcagcttgtcctcgctgttgttcaggaagtcacgcaggatatgcgtctgggcacccttcactcgcagctcggcctccttgcgcaccagatccatgcccttttcaagctcctgaacatcggccaccacattctctagtgccaccgatgcagccttgtctgttccatacagctcgctctcgaagttcagcagctccggaaatttggcccgtatggtggccacaatatagtgaagcagtgacgatcgcttgtctgtggattttgtatcgatcagcgtgtccagcgattgcagcttaaagccataggctggtccccgtttgttgctgttgagatagttgccgaaagccaggacaatttccaaaaccgccttgaattttcgagattgttttaaggaagtcgacgctcctgctatcgattgcacttgctagaattaagaaaaaatatatattcttatttgattcatcaaaaatatgtcaataataaagttctcaaatttcttgctgatcaaagtgcaattatgttgacggcatacggatttttataaacagagatagtttttctttttattgtccaacaaaataaacaaaacgaattgaaaaccagctgccacatgacttaactattagtcatagaaacggatattatatttacacgacagttagataactaactattgaattctttccaagttatatatatatattttcttaccggactaatgagatgaacgctgtcgacaaaattgcccatatagttcataatggctagcttggacgagatacgctccacacgcgacaactgcagcataaacttgtcttcttcggtgagtagctgttggtccttgcgctcgatgatatattccttgtaggatttgacctcggcatccgtgggcaccattttttgcagcagctcgacgttctccagggaaagtttcttcaggtccagactatgaatggcggcgatgacatcatcaatgggcatacccagcttgcgacgggagattgcttggaacgaacatagaaaaaaagtcagttgatacagaaatatatacaagataatgcagaacactcaccaatgtttcttaacctcgtgtgctccagcagcgagacattgtcgggcctcttgaagcgtttgctggactgcagcgacccatcgacctcggttccattgctaccattgcgcaaagcaccgccaatcccgatcttgaagcgctcctcaaactcattgaagtcgatttgcttgaagatcttttcgtcatccagctcgttgaatattgtaccacgtacctggataaattaaatggtattaaaattaaagagtttatatagtgcatctctttgttcctacctgattaggctttagtgctatccagttcaaggtgggcaacttgtatttagtgggcaccttgcgtttgatggtcatggcgccatcgggagcgggcataaagccggccactggaggcggtggcggttggaaggagcttagcatgggcggggcatgtggcggcgatggcgctgtcgaggctaggctgccgctcggactgcccagcggactgaagcccggcggtggtggtggagccggtggtgctggcggcggaggtggtggaggagcagctgaacttgcagtaggcgaggcgggcattggcggcggaggtggtggcaatgttagagaggctgcccccgatgtggaaccagccatgaggccaccattcgccagagaaccatcgccgctggaggcggatcgtggcagggaacgcgaaagcgtctgcagctccatgttctttgtgtgcagcagtgtgtcccgtttcttcagctcctgctcgttgtgctgcaacattcgctgcatcactgtaagttcctcctccagcttctgccgaatcatagccagctgctcgcgttccgttttcagcgttagactctcggactctaattccgcatacttatagaggaactctgagttacgatctatttctcgctcaagttgatcctcaagctcttggactcgttccagggctgaagtttttgtctcggaatcctccatcaaggcagcaacatcaaagacgttgtccaaataggctgatatctgcaccttcagttcctccgattctgtcaatcgaattcgctccagatacttatccaagcccagggctgtaaactcgtactgtaagtgcaccctgtagttcatgtcctccaccgagtggacaacgatgttcatgaactgcatgcaggcaaccataaaatctatgttaaaggcctcgaagttcataaagtactccatgagcgtttggaagcgtcgcttctcctggcacacatccttaaaattatcgaacgaacccaaaatgatttcgtgtcctccctttaccagacagatggctgccagcagctccaggaccagggctttcgtcctcagcgatttgtggataagactcaaggcaatgcagttgatggcctcgcgatgctggataaccatgttgaacccatacttattgttcatgatagctcgcaggcacataatggacacatggatgtcgtccgtggcggcacccatgtttaatttggcaatatgtcgtgaccttcgcttcaaactaggactatccagagcatcggcaatggtaggtcgtaggaatccataggacattgtgtgctgctgcctcgagtcaagtgtgccattggccagaccatgtcccgtactgtttccatgtgatagtaaaccaccacctccaccaggactaacagaactactgtttcccatcactatctcaccgccatcgccgccgtttgtgagattcagacgctcctccgaggcacacaagacaccctgaaggcgctgctcgtgtcgcatcatctgcagtcggaagctgagatagtcgaccagggcgtccagaccctggttcgtgtcatccaggaactccttcacccactcgatgtggttcgtgcgcagcgagatctccagatcgcggagcacctgggtggacgtggactcgccgaccattttccgtttctgacaaagaaagtagaagagataaagctgtaggtgtacaaagagagagtgaaggataggatgacgggaggccggaaacagaagacaggatgcagttgatggagtcagcagcacgaggaccaggacgaggttcgatttgggatagtgcaggtgccaggaggtagacaaacaaatagagagagagacatgggaagaaacaggaaagacaagagtgtgggaatagtggattgtggtgtgttgtcagtgttgtgagtagagaaatgaaatttacacattaatattggaacaacagatttcgattttaagtcgggttattaactttagtttttcattagcttggcctaatagtttattaaagagtcgtttatatttattttttttttaaccaccagaaaccacactacagaaactactacaggaaactagaaatgatgtagatttagtaacttgaacctacccgatgactccttgatgcctttgggtccagatatgtgcgcagtttactcaagtaatgtgagggcggatcctttgcctgcaccatttcctataaaaaaaattgaaaatttaaattagttcatcattcattcatcaataaagctgcaatgttcaagattcgaacgtaacaatcggaaactgggcaaaaaaaaacctgctgagctactgaactttatgtcaactgatttttcgttacacggctgactggcaggtgacaaaggtcaaacgagtcagataagtcatatccgccgatagatgcaagtaagttcttgttttgcaaaacttctacagataaatatggcaggctagttatgtcatgttttaaaaaaaaataaaagcagctatacatatttattgcaaacactttaataatcgctttcagttatattcacgctttaacaccagaaacacctttcttgcttcctaattactaattgctccctctatcacattataatggcccctgaaatcatctctgccggagttacccaagtcgctgttcaatgaactgccagtgatcgggcaactggtggaggatcggtgggtatattcatcgatggcacatgcattaacactagaccgagacttagcggcttttacttttgtttttccccctgtgctttaactgcatattttcgtagatgtttatgttaccgcaatcgaatcccctcggcggagtcttggatcccccaaaacacataagcatcgatggcttgcctaactctaaacatttttaagcatgaagcgtggtatacttgttttggcctgttgtttgttgtttttttctttttttttttgttgttatgggttttgtttaactatgccaacaactaaggcagccaccaaaagccacaaaaacagcaccaacagccaacgcatgactacaacctaaactatgtgtgggttttggttttgggtttgcgtttgggttcgggttcgaactgcagctagagaaaaaccagtttgattctatttcccagtcaaagagagctggagaaaaatatcagccttccatacaggcacagagtatactcctatactcgtat

SEQ ID NO: 41327 - DNA, 3132 bp, DROSOPHILA
atggtgcaggcaaaggatccgccctcacattacttgagtaaactgcgcacatatctggacccaaaggcatcaaggagtcatcggaaacggaaaatggtcggcgagtccacgtccacccaggtgctccgcgatctggagatctcgctgcgcacgaaccacatcgagtgggtgaaggagttcctggatgacacgaaccagggtctggacgccctggtcgactatctcagcttccgactgcagatgatgcgacacgagcagcgccttcagggtgtcttgtgtgcctcggaggagcgtctgaatctcacaaacggcggcgatggcggtgagatagtgatgggaaacagtagttctgttagtcctggtggaggtggtggtttactatcacatggaaacagtacgggacatggtctggccaatggcacacttgactcgaggcagcagcacacaatgtcctatggattcctacgacctaccattgccgatgctctggatagtcctagtttgaagcgaaggtcacgacatattgccaaattaaacatgggtgccgccacggacgacatccatgtgtccattatgtgcctgcgagctatcatgaacaataagtatgggttcaacatggttatccagcatcgcgaggccatcaactgcattgccttgagtcttatccacaaatcgctgaggacgaaagccctggtcctggagctgctggcagccatctgtctggtaaagggaggacacgaaatcattttgggttcgttcgataattttaaggatgtgtgccaggagaagcgacgcttccaaacgctcatggagtactttatgaacttcgaggcctttaacatagattttatggttgcctgcatgcagttcatgaacatcgttgtccactcggtggaggacatgaactacagggtgcacttacagtacgagtttacagccctgggcttggataagtatctggagcgaattcgattgacagaatcggaggaactgaaggtgcagatatcagcctatttggacaacgtctttgatgttgctgccttgatggaggattccgagacaaaaacttcagccctggaacgagtccaagagcttgaggatcaacttgagcgagaaatagatcgtaactcagagttcctctataagtatgcggaattagagtccgagagtctaacgctgaaaacggaacgcgagcagctggctatgattcggcagaagctggaggaggaacttacagtgatgcagcgaatgttgcagcacaacgagcaggagctgaagaaacgggacacactgctgcacacaaagaacatggagctgcagacgctttcgcgttccctgccacgatccgcctccagcggcgatggttctctggcgaatggtggcctcatggctggttccacatcgggggcagcctctctaacattgccaccacctccgccgccaatgcccgcctcgcctactgcaagttcagctgctcctccaccacctccgccgccagcaccaccggctccaccaccaccgccgggcttcagtccgctgggcagtccgagcggcagcctagcctcgacagcgccatcgccgccacatgccccgcccatgctaagctccttccaaccgccaccgcctccagtggccggctttatgcccgctcccgatggcgccatgaccatcaaacgcaaggtgcccactaaatacaagttgcccaccttgaactggatagcactaaagcctaatcaggtacgtggtacaatattcaacgagctggatgacgaaaagatcttcaagcaaatcgacttcaatgagtttgaggagcgcttcaagatcgggattggcggtgctttgcgcaatggtagcaatggaaccgaggtcgatgggtcgctgcagtccagcaaacgcttcaagaggcccgacaatgtctcgctgctggagcacacgaggttaagaaacattgcaatctcccgtcgcaagctgggtatgcccattgatgatgtcatcgccgccattcatagtctggacctgaagaaactttccctggagaacgtcgagctgctgcaaaaaatggtgcccacggatgccgaggtcaaatcctacaaggaatatatcatcgagcgcaaggaccaacagctactcaccgaagaagacaagtttatgctgcagttgtcgcgtgtggagcgtatctcgtccaagctagccattatgaactatatgggcaattttgtcgacagcgttcatctcattagtccgcaagtgcaatcgatagcaggagcgtcgacttccttaaaacaatctcgaaaattcaaggcggttttggaaattgtcctggctttcggcaactatctcaacagcaacaaacggggaccagcctatggctttaagctgcaatcgctggacacgctgatcgatacaaaatccacagacaagcgatcgtcactgcttcactatattgtggccaccatacgggccaaatttccggagctgctgaacttcgagagcgagctgtatggaacagacaaggctgcatcggtggcactagagaatgtggtggccgatgttcaggagcttgaaaagggcatggatctggtgcgcaaggaggccgagctgcgagtgaagggtgcccagacgcatatcctgcgtgacttcctgaacaacagcgaggacaagctgaagaagatcaagagcgatctgcggcatgcacaggaagcgttcaaggagtgcgttgagtactttggcgactcctcgcggaatgcagatgcggctgctttctttgcgttgatcgtacgcttcacgagagcgtttaagcaacacgatcaggagaacgagcagcgtcttcgcctggaaaaggccgctgcgctggccgcttccaagaaagagaacgatcaggtgcttatgcgcaacaaggttaaccagaagaagcaacaggaagctgtcataaacgagctgaagagcaaggcgcactcggtgcgcgagaaaaagctgctgcagcaggacgaggtgtacaacggagccctggaggacatcctgctcggcctgaagagcgagccgtacaggcgggcggatgctgtgcggcggtcgcagcgccggaggatcgacaataatcgtttatcgcgcaccctggaggaaatggattgttag

SEQ ID NO: 41328 - protein, 1043 aa, DROSOPHILA
MVQAKDPPSHYLSKLRTYLDPKASRSHRKRKMVGESTSTQVLRDLEISLRTNHIEWVKEFLDDTNQGLDALVDYLSFRLQMMRHEQRLQGVLCASEERLNLTNGGDGGEIVMGNSSSVSPGGGGGLLSHGNSTGHGLANGTLDSRQQHTMSYGFLRPTIADALDSPSLKRRSRHIAKLNMGAATDDIHVSIMCLRAIMNNKYGFNMVIQHREAINCIALSLIHKSLRTKALVLELLAAICLVKGGHEIILGSFDNFKDVCQEKRRFQTLMEYFMNFEAFNIDFMVACMQFMNIVVHSVEDMNYRVHLQYEFTALGLDKYLERIRLTESEELKVQISAYLDNVFDVAALMEDSETKTSALERVQELEDQLEREIDRNSEFLYKYAELESESLTLKTEREQLAMIRQKLEEELTVMQRMLQHNEQELKKRDTLLHTKNMELQTLSRSLPRSASSGDGSLANGGLMAGSTSGAASLTLPPPPPPMPASPTASSAAPPPPPPPAPPAPPPPPGFSPLGSPSGSLASTAPSPPHAPPMLSSFQPPPPPVAGFMPAPDGAMTIKRKVPTKYKLPTLNWIALKPNQVRGTIFNELDDEKIFKQIDFNEFEERFKIGIGGALRNGSNGTEVDGSLQSSKRFKRPDNVSLLEHTRLRNIAISRRKLGMPIDDVIAAIHSLDLKKLSLENVELLQKMVPTDAEVKSYKEYIIERKDQQLLTEEDKFMLQLSRVERISSKLAIMNYMGNFVDSVHLISPQVQSIAGASTSLKQSRKFKAVLEIVLAFGNYLNSNKRGPAYGFKLQSLDTLIDTKSTDKRSSLLHYIVATIRAKFPELLNFESELYGTDKAASVALENVVADVQELEKGMDLVRKEAELRVKGAQTHILRDFLNNSEDKLKKIKSDLRHAQEAFKECVEYFGDSSRNADAAAFFALIVRFTRAFKQHDQENEQRLRLEKAAALAASKKENDQVLMRNKVNQKKQQEAVINELKSKAHSVREKKLLQQDEVYNGALEDILLGLKSEPYRRADAVRRSQRRRIDNNRLSRTLEEMDC

SEQ ID NO: 41329 - DNA, 6906 bp, DROSOPHILA
aaacgtgagcgtctcagttggtcccttctatcgagaaactttcacagctaaaaatgaagtctggtgggtgtgaggttgaattttaatgttgtttctccgtttgataactttttgattccccaaagttgttgccctgtttgccaccgttttggccattattttggtggctggagtgagtgcggatgcgggtcgctccgcctgcaaggatgagtccgagattggacagacctatacgcatcacttcgatgccgctaagtactggctgtgcgagacccttggcgttccggccaccgaggtggactgccccgcgggactggcctacatgcatctgctcaaggagtgcatcccatgggccagttacatctggaagaagcccgagatgccaccaactgtggcctgaaaataaatgacccagctcttgaacgttcacaactgcaagattatttggttattgattgattgggtgccggcgggatttgttagcaaaggttgagaatattgtgcatatgaaactgattctacaaacataattattccaactattcctacataattcgacagatttactttgaaattgcctcacagtattactgttgaaatatgtaagttggttaaaacaagttgaaagtcactgtattggtaggaagttgtatatcactcatacgcggtgttgcctttgtcttcttagcttggaatatacgttgcttacttcaagaaattaaaactgtttttcaaaccttaaaaggcaaacaatgcgtaatttaaggttcaagcttaaacccttttaatagtccaatttagctggaaaccaagtatgattaatccataagacataagacacagccgatgacagccgatgttgccactgaacttggcaacggatcgaagtggatttatcagtgcaaaaacaaaagcaaatgccaaaagcttcacgatcgcagtagcttgttgttgctgccgctgtctttgttattttgttgttgcatgttttctgtggcagatgcgcagctttggacgcgaagtcgcgcatgcgccgtggtggacgcttctgccgctttggttgttggtggtttctgtggtggctttgtctttaggttgtttggtggctccgacgaagagtgagtgcatttgaagtgttacataaagtaccaaactcgaagacatgccgctgccagcgtcttcttcgcattgtgttttttggcttggagcttttgattttcgtctgtccgcattgttattgctttttctgctggttgttttttattttttgttggtttgtgtctttatttttgcggctttgcctggttatgattttgtataaaagtgcatgctgcgcatcaggcagcagtgtagttcgcattcgtccatcggcagagcatcgtctgcaaagtgcccccaaaaatctcaaagaagcagctggtgcccacgaaaacggtcagtgctacataaaggataattaatttaaaagtacatatacatatatatcaccagtcatcgtcatcataaatcatcgttattaagtgacaaagtctttaaacaggattattacaaagtcaaagtagcagggatggtttattaacagttactgtgaaaaaaaaagtttaaagcttaaagttctaattcatttatcacttttaatttgaaattatagtgctttgggaaaacacataaaacacttggacaattcatagtcaactcaatactatcctaactttctagatcctttagtcacaatgaaaaatattttcaaatgccgagtaacagcaacataacaaaaataattaattaatatttttatatatttatttttatttgttaaattgtgtatgtgcacgttttcaatcttcgttacgaaattcccaagaactaaaaatcataaaaatccaagttattgtcaaaatacattcgactaatattagtctaaagaacttagcacttgtcaccgtcgtaaattgcataatcagcatggccaattaggagttgcctcacattcagcaggtcattcagtcatttagtcggactttgaaaaataattaaaacttgtcgcaatcaacaaaaaccaaacaagcgtcgcgagccaaacaataaagcaaagtgctgaaaaaccaacaattggacgcaacgggacaggccaagacgacaccgaatgtggccaaaacgcggagacagtaattggcagcagttgctggagaggcaaatatgtgtcactccgcatgcaacgtgccacatgccacatgcagtgggggtgtaatggcaatggcgctgagaaattgccaactgccgcggctgattttgcaatgtcataaaagccagcattatgccacagccgatcacgcccactcactctcagtctatatagtcccattttattcaatttcctcgaaagaaaagcgccgataaaattaagtgagtttcactctgcttggaatgagatttgccagcgatttcagtggcttttgtttgcatccgcgatttgcccaaaacggcaacttaagtggcagcacacaactgggtgctcctccactttcaatgccgggcgacacgctccgtctgctggccagttcttggcattggccgacccgacggaccgagccaagattgacgagcgattaggtccgctccgtgggttaagtctcggtcatcttggccatctcggtcagctcggtcatctcggtcgtcttggtgcccgttaaaacttatgcaacattaacgtaatctttctataactattttttgcaagtaatccactttcaactgattttctctaatgcccccttttcccgcattgcagttcggttaatttgcattcgaagctcatcaacatcgagctcatcccccggagaagcagcatcagtcatgcgagtggtaagtacactgcaacaaaaatgggacacttaaaataaatttaagtcatttattatactcgcttccatataaaacttaaagtaaacttaaccatccaaaaaaacttctgaaagtttttataaatccctcttcattttacatattatttaaaatcaaacaaattcaatttatttaaaccaatctagcaatgctattaaaaaaaaactttattttaacaattactttactcctcgttcggcgtgaaaatagttttatttaaaacattaattacaataatcacttagtcattattcaagtgtatctttttaaatttaaactacaatacttggccaaaaattgaaaactacttatataaatgtatgtaacaacatagtttttttcaaagtgcacagctgaagagatcgctctaatgtgtatcatcgatcggtgcgtcatagaaaaaagccaatttactaatttcctcgtttttgcagcagcttttcggtgtcatcgccgtggccgtggtggccgtttcgctggtccgcgacgttggagcggagccaccggtgaacaacgcctacttgccacccagctcgccccagcgtccgtcctccaagtatggtgctccgccggtcagctcttacctgccacccgcctccggaccggcgccatcgtttaactccgctccgtccagcagctatgcggctccatcgcaaagtgcttcatcgggtggcccatatccagctgccgcgccacgcccatccagttcgtatggaccaccagcctcacgtccctcgtccagctatggaccaccgcccagccggccgagccagtcgtacggaccaccgccgcaggccaagaagcctcatcatcgtcgcccatccagcagctatggagctccgagacccgctccgccttcgcaaagctatggtgccccgccctctgctagctatgggcctccgaagtccgcgcctccatcccagagttatggtgccccagctccaccatccagcaagtacggtcctcccaagtcagcaccttcttccagctacggagccccgagaccagcagccccttcatcctcctatggcgctccagcaccaccatcgtcgtcttacggagcacctgccgccccatcatcgtcttatggagctcctgccgccccatcatcgtcttatggagctcctgccgccccatcatcgtcttatggagctcccgcaccaccttccaagtcttatggagcacctgctcctccatcttcttcgtacggagcgcctgctgctccttccaagtcttacggagcacctgcaccaccatcttcatcgtatggagcacctgcaccaccatcttcatcatacggagcacctgcaccgccatccccatcttacggagccccagcaccaccatccaaatcttatggagcccctgctcctccatcttcttcgtatggagctcctgctgctccttccaagtcttatggagcacccgccccgccatcttcctcctacggagcacctgcaccaccatcttcctcatatggagcaccttcagcgccctcttcatcctacggaccacccaagccagcacccgcaccaccttcctccagctatggagcaccgcctcaggcgcccgtcagctcctacctgccacccgcatcgcgaccatcgaagccctcttccagctacggagcacccagtgtgagcagctttgtgcccttgccctcggctccatcgaccaactatggagcaccatcaaagactcaaagcttgggaagcagtggctattcatccggaccttcttcatcctacgaagcaccagttgcacctccatcgtcctcgtacggagctccttcctcttcgttccagcccatctcaccaccatcgtctagctacggcgctcccagcagcggatcaggatcaagcagcggaagcttctcggctgctccctcatccttgtacagcgccccgagcaagggttccagtggtggatccttccaatccgcgccatccagctcgtactctgctcccagtgccagtgctaacagcggtggatcgtacccctcggctccatcatcatcctactctgcccccagttcgagctccagcagtggaggaccttatgcctcggctccatcttcctcttactcggcacccagctccggatccaacagtggtggaccttaccccgctgctccatcgtcttcgtactccgctcccagtgcctctgccaacagtggtggatcctatccatcggctccatcctcgtcttactcggcacccagcccaggatcgaatagtggtggaccctatcctgcagctccttcatcctcgtactcggcaccaagtccttcagccaacagtggaggtccatatgcttcggctccctcctcttcatactccgcacccagctctagctccaactccggtggaccatatgccgctgctccctcctcttcgtactccgctcccagttccagctcgagcagtggaggaccctacccatcggcgccgtcatcttcgtactccgcacctagctccagtttaagcagtggaggaccatacccatcggctccctcttcttcttacgccgcacccagcccgagctccaacagcggaggaccttacccggctgctccatccaactcgtactcggccccgatcgctcccccatcttcatcatacggagcacctgcctcaggaccgtctccctcgttcagcgctccctcctcttcctatggtgctccctccactggatcaggctccagctcattctcgtcctcctcatcctccttcagcggagcctcgtcgagcagcagcgctggctatccctctgctccgtccagctcctatggagctccatccaccggttcgggccacagcttctccagcgcaccctcgtccagctacagtgctccgccagcgggtggatcctccagctccggtccctatccaagtgctccgtcccaggactccggctacgagtacaacggacccagccaggtgcccgataccattcagcagagctacagtgccgacggtggctacacctatcgcaagaagtgagcagccaccggcatcacgcatacgccacgtgccttcgaatactcaaccaccacatcatatcatcgccgtcgccattgtaaattattccccaaaatgacaagcaaccaattcgcccattcctcttatactcctccatggaaatctagccttaattcactgtaccattagatgtaaaacaacgaaacaacgtttgtgttaaataaacaacttgatgaagatcatagaagattcgtagaagccatcagttctgggcgatcggttcccttcacatccgcgatattagcaagacattcgcggaattcttccgttcggctaattgacagccatggaagtgaataggtggggaagtggcagttgaaggctcaaatcggcaaacaatgcaaattttgtgcgaaaatagcggatataccggatattcggatagctgccacaacaacaaccccggcaacaagacatcttgttgtgggggccacaattaggtggaattctcgagcgacacaagttatgagcttatgatggaggagggcgagtccaatctaattgagattacaacttaattgccactgcagatgcaacagagccaactgcagatgcaactgcaactgcatcgttagcatgctaattgcaagcagttgagatctcagatggcggctatatgattctctgactttggcaatttaaccgactgactttcgactaaataaaataagtaactgtcgcatagttgccacattctccgcgctgtgaatcccaaaaaaatgcattgtcttgcggcatttggatatttggatctcggacggaaccgatgagatgcgacaccgacaagagctctttgctctttaagttggtctgagaaatttccacctgccatgataatgcggttccattgtctgcggatcgtcacttggcggcttttgttggctcgtaatactcgcatttatttcacaagccagccagttagtcggcaaaataaataagtactgagaaatagaataaataa

SEQ ID NO: 41330 - DNA, 2853 bp, DROSOPHILA
atgcgcagctttggacgcgaagtcgcgcatgcgccgtggtggacgcttctgccgctttggttgttggtggtttctgtggtggctttgtctttaggttgtttggtggctccgacgaagagcagcagtgtagttcgcattcgtccatcggcagagcatcgtctgcaaagtgcccccaaaaatctcaaagaagcagctggtgcccacgaaaacgttcggttaatttgcattcgaagctcatcaacatcgagctcatcccccggagaagcagcatcagtcatgcgagtgcagcttttcggtgtcatcgccgtggccgtggtggccgtttcgctggtccgcgacgttggagcggagccaccggtgaacaacgcctacttgccacccagctcgccccagcgtccgtcctccaagtatggtgctccgccggtcagctcttacctgccacccgcctccggaccggcgccatcgtttaactccgctccgtccagcagctatgcggctccatcgcaaagtgcttcatcgggtggcccatatccagctgccgcgccacgcccatccagttcgtatggaccaccagcctcacgtccctcgtccagctatggaccaccgcccagccggccgagccagtcgtacggaccaccgccgcaggccaagaagcctcatcatcgtcgcccatccagcagctatggagctccgagacccgctccgccttcgcaaagctatggtgccccgccctctgctagctatgggcctccgaagtccgcgcctccatcccagagttatggtgccccagctccaccatccagcaagtacggtcctcccaagtcagcaccttcttccagctacggagccccgagaccagcagccccttcatcctcctatggcgctccagcaccaccatcgtcgtcttacggagcacctgccgccccatcatcgtcttatggagctcctgccgccccatcatcgtcttatggagctcctgccgccccatcatcgtcttatggagctcccgcaccaccttccaagtcttatggagcacctgctcctccatcttcttcgtacggagcgcctgctgctccttccaagtcttacggagcacctgcaccaccatcttcatcgtatggagcacctgcaccaccatcttcatcatacggagcacctgcaccgccatccccatcttacggagccccagcaccaccatccaaatcttatggagcccctgctcctccatcttcttcgtatggagctcctgctgctccttccaagtcttatggagcacccgccccgccatcttcctcctacggagcacctgcaccaccatcttcctcatatggagcaccttcagcgccctcttcatcctacggaccacccaagccagcacccgcaccaccttcctccagctatggagcaccgcctcaggcgcccgtcagctcctacctgccacccgcatcgcgaccatcgaagccctcttccagctacggagcacccagtgtgagcagctttgtgcccttgccctcggctccatcgaccaactatggagcaccatcaaagactcaaagcttgggaagcagtggctattcatccggaccttcttcatcctacgaagcaccagttgcacctccatcgtcctcgtacggagctccttcctcttcgttccagcccatctcaccaccatcgtctagctacggcgctcccagcagcggatcaggatcaagcagcggaagcttctcggctgctccctcatccttgtacagcgccccgagcaagggttccagtggtggatccttccaatccgcgccatccagctcgtactctgctcccagtgccagtgctaacagcggtggatcgtacccctcggctccatcatcatcctactctgcccccagttcgagctccagcagtggaggaccttatgcctcggctccatcttcctcttactcggcacccagctccggatccaacagtggtggaccttaccccgctgctccatcgtcttcgtactccgctcccagtgcctctgccaacagtggtggatcctatccatcggctccatcctcgtcttactcggcacccagcccaggatcgaatagtggtggaccctatcctgcagctccttcatcctcgtactcggcaccaagtccttcagccaacagtggaggtccatatgcttcggctccctcctcttcatactccgcacccagctctagctccaactccggtggaccatatgccgctgctccctcctcttcgtactccgctcccagttccagctcgagcagtggaggaccctacccatcggcgccgtcatcttcgtactccgcacctagctccagtttaagcagtggaggaccatacccatcggctccctcttcttcttacgccgcacccagcccgagctccaacagcggaggaccttacccggctgctccatccaactcgtactcggccccgatcgctcccccatcttcatcatacggagcacctgcctcaggaccgtctccctcgttcagcgctccctcctcttcctatggtgctccctccactggatcaggctccagctcattctcgtcctcctcatcctccttcagcggagcctcgtcgagcagcagcgctggctatccctctgctccgtccagctcctatggagctccatccaccggttcgggccacagcttctccagcgcaccctcgtccagctacagtgctccgccagcgggtggatcctccagctccggtccctatccaagtgctccgtcccaggactccggctacgagtacaacggacccagccaggtgcccgataccattcagcagagctacagtgccgacggtggctacacctatcgcaagaagtga

SEQ ID NO: 41331 - protein, 950 aa, DROSOPHILA
MRSFGREVAHAPWWTLLPLWLLVVSVVALSLGCLVAPTKSSSVVRIRPSAEHRLQSAPKNLKEAAGAHENVRLICIRSSSTSSSSPGEAASVMRVQLFGVIAVAVVAVSLVRDVGAEPPVNNAYLPPSSPQRPSSKYGAPPVSSYLPPASGPAPSFNSAPSSSYAAPSQSASSGGPYPAAAPRPSSSYGPPASRPSSSYGPPPSRPSQSYGPPPQAKKPHHRRPSSSYGAPRPAPPSQSYGAPPSASYGPPKSAPPSQSYGAPAPPSSKYGPPKSAPSSSYGAPRPAAPSSSYGAPAPPSSSYGAPAAPSSSYGAPAAPSSSYGAPAAPSSSYGAPAPPSKSYGAPAPPSSSYGAPAAPSKSYGAPAPPSSSYGAPAPPSSSYGAPAPPSPSYGAPAPPSKSYGAPAPPSSSYGAPAAPSKSYGAPAPPSSSYGAPAPPSSSYGAPSAPSSSYGPPKPAPAPPSSSYGAPPQAPVSSYLPPASRPSKPSSSYGAPSVSSFVPLPSAPSTNYGAPSKTQSLGSSGYSSGPSSSYEAPVAPPSSSYGAPSSSFQPISPPSSSYGAPSSGSGSSSGSFSAAPSSLYSAPSKGSSGGSFQSAPSSSYSAPSASANSGGSYPSAPSSSYSAPSSSSSSGGPYASAPSSSYSAPSSGSNSGGPYPAAPSSSYSAPSASANSGGSYPSAPSSSYSAPSPGSNSGGPYPAAPSSSYSAPSPSANSGGPYASAPSSSYSAPSSSSNSGGPYAAAPSSSYSAPSSSSSSGGPYPSAPSSSYSAPSSSLSSGGPYPSAPSSSYAAPSPSSNSGGPYPAAPSNSYSAPIAPPSSSYGAPASGPSPSFSAPSSSYGAPSTGSGSSSFSSSSSSFSGASSSSSAGYPSAPSSSYGAPSTGSGHSFSSAPSSSYSAPPAGGSSSSGPYPSAPSQDSGYEYNGPSQVPDTIQQSYSADGGYTYRKK

SEQ ID NO: 41332 - DNA, 4570 bp, DROSOPHILA
ggttcctcatcctcgccgggaccctgcaggatatacacgcgtgtgctgccgcctaacttgagcatgtgaccaaccctcatccggatgtagacctttggcggcacgcgctgtttgtttaaaaaagtcccgtgtgtgctgcccatgtcgtagatgtaccagccctctggctgatcgttctttggctcctcgtcctcttcttccatctcatcgtcttccttagcggtttcgggctttggcggagccttgggcttgtactgcaggaccacgtggaagcgtgagatcgtcggatgggcggcgggaacatcgttctccggcaagcgaccgaaagtccagaccgcctgttgctgcagctggtgcacagtgtcgattatctggccggacttgagcacctcaaagctgtagatctgattctcggctggcggagctgaccacttgggcaccttgtacggacagacggccgctggcgaggatttcggagttttggggatttttaatggcggaggcggtggctctgcgggaacttcagagcgcggcttctctgtgataatcactttgggtttgggcagcggagcgggcactttgaactcgttcattttgatgcacgaacaaaatctgttaatttttcaaggtgtaaacaaatttttgcaaaattagcagctgttcggcgcagtgaggccagatatttgccgcctaaaaaacctaactttttcaacagttgtcccgcgaaataaagctttaatttttgaatatattttaaataatgctatggattaattaaaatggaattaaaaagtgaaaaggcctaacaaatgatttcaaatagaaataacaaataactttccgttattcttttgaacacaaaaattaaatagctaaaaatagctatgaagtagctaaaatacctatacagcctgaaatgcccattaccacctcatgctggcggtatttttagtattttaactacatttagtgttgaataaaatatagtctttctaaacaacaaaaggtgaaacatgcaggagctcaaggtgcgtttatcaccaactaaatatatattagaactaataaataatgcccttaattgtacattacagcaacgttttgagcgacgccagttggcggatgacctgaaacaaaaacaggtgagtgcagcgtcgcaaagcaggggctataaataaaccaactaactaatgaatgcataacaaaccaggtaatccaggatcatctgctgcagaaaatcctgtactcaaagcgcctgctggtggaccatgtggaggcactggagcactgcatgcaggagctgcagacagcctccagtgcgagttccggccggcaattgctgacgacgaggaacgcctgcctgatattgggtggcactctgttggagcacctgataaccccacggggcatccggtacaccatggttccatccatcctcatttcgggtacctttgctgcactgttcgctgtgaagagcgtcttcgtttgccgcaacaaaatcgtggaacggaagttggagcaactggtcaagaccatcgatgagttcggcaactgcatccgtcgaaatatgacgtactttcaggagatcatcatcatgaaacaggccgagctcatagagtaatccaatagatttcaatttaatgaattatatatatctaatcacatttcgttgcagatcccgtcaaattgagcgcgcttgggattgcataacggccgccaaggaggttaccgaaatcctgtacgatgccacccgaaaactggagacggactatcccctgccgacaaagtacagcgcctactatgcgcccatggaagaactgcgggagtgcgagtacttcaagaacaatgtcacggactacagtcccaagcacataaaagtaagaaggatttatctatatccatatttatttacttcagaattgcttagtgtcgtataaagtcttatataaactggcttttcattattatgcttgatacacagtgtatcaaatggtatccactattcgcccatatcatgaatttaaagtgcatatggtaatctttaatgacgcattcaacagataactgataacaaataaatgataaacaatttgtagtcgctaattgcttttagaggcgaatcagacaataagtagagcttacaatctattttatctatctaggtaatacgccaatgctttctgtaaatatacttttcttttggtacactcaaaatgttataatttatattaaacttcctcatctaacttactaattataaaattattctaggactttcacaacatcttcgcctatgtgcagtcacaatacctgctccggctggcactcaccatcacaactcgtccctcgatctctcagctgagcgaggatctggtgaaaatcgacagcctggtgaggcagttggtacaagaggaggagcagcacttcagtaatctagcattagccctgcagaacaagaagcaattggaactggctgagctgaatgcgactagagcagagcaacagcagagtggaccaattgctgtgctgcagcactcctcgctaaaactaagcgcctgcatggtggccgtggccgcagaatgtcaagctctggacgtgactcttcaaaaactcactgtcacagaggcggcaaaaaagaacaactccaaggagctggtggctgtggccaataatatgcatggcatcgaaaatgccttggccgtttgctgtgatgatttccagcgattgatgctggtctacaacaagttcttgcacagtcagctggatttggaaggagagttgccgaagcccaagcaggatctcgacgatgaattccccgagagcattcttagggttgagttctcgcagaacgtggatgctccgcagcagagggatgacttttatgcatacatgtacgatgaaaacgaggagcagcactttgaagctgagcagaatgcaccgtttccctcgccggaaaaggaactgcttaacttcgagaagcgtattaccaagggaaggtttaagcctgtcctcaaacagctgaaagatcgcatcgatcccatcagacaagttatgctggaaaaggagcgtgaggttctggcctctaagggcataaatgtggacgagctgtttggcaaaatggaaagagtcgagcagcagcaggaggacaatcgcttggcggatgccgcacccttacctgtctacgaatcctccagcaactcagattcggactctgctgacgaagaggcattcaggcgacgcagcaaacagcacaaggagcgtgataattttgctgaaatgcgtcaatttcttgctcagaagcaggctattaatctgtttaagctaccaccaccacctgtggccgccggtggggaggagctgcttgaaagtgaatgctagacgggctggctggctgtttgttttgttgttcactagcctgttatctggatatttgctctgaatagtttaagcttttatcatttatctagccaattggagagatagaccgctcgccaagcgacgccacatcaccccgaacacaactttctgcctttcggttgttcctcgttttgatgttccctaccatttttataactaaataaaacatagcaaaacaaaataaaacaaagcaatgaataaatgttattaagtaggccaactctacataatacatatgtgaaagcaattggaaaaaattcatttaaactatttgaatcggcaattcgttttgacacttgcgtttaaggaacttaattacacttttaattaaaaatcattgttaaaaaaaaaacataagtttggcaatcacgttaccgatatatgtatactctatgtaaagaactgtaattgaaattaaaaatcttttattacacactaatgtgcggatcttaagtacaatacacaaacatcgatggcttcactaaatactagggtctagggactggcaatgggatcagctcctttgtggaaattaatacagggagcacctacatatgtacaggatagcacgcacaggaagtctttcggttgggatcgcgtcactgtcgtggacatctttggctcgaaacttgtgcagctagctcggaatttgaaccgtattaggattttaacaccgtgttaggcattggcagcaccagtggtcaccccactgctgctcccggcatgaacattattgaacttgctggccaccgagacgggctgcagctgcgagaactgcgacagattgctgcccctaacgctggtgtaccggatgggttgtactccgtaatcgctgcccttgagccgtcggcgcacacagaccacgacgaatccgatgaccagaccaattaccaggacaatgctggctataatggcggtgagtattatgtagtggcgtcgcaggaatcgcggtggctcctcgtccacctcgcgatatttcttgggtatcaccattttgcaaatacgttcggctgtcaaattggagagcggagatccggccagaaggtatggcgtttcacaacgcgcctcagttccatcccattcccgatcgatgtggttcagtccaatcagctccagggctttgaacagttcgcagctgcaataccagggattt

SEQ ID NO: 41333 - DNA, 1984 bp, DROSOPHILA
caaaaggtgaaacatgcaggagctcaagcaacgttttgagcgacgccagttggcggatgacctgaaacaaaaacaggtaatccaggatcatctgctgcagaaaatcctgtactcaaagcgcctgctggtggaccatgtggaggcactggagcactgcatgcaggagctgcagacagcctccagtgcgagttccggccggcaattgctgacgacgaggaacgcctgcctgatattgggtggcactctgttggagcacctgataaccccacggggcatccggtacaccatggttccatccatcctcatttcgggtacctttgctgcactgttcgctgtgaagagcgtcttcgtttgccgcaacaaaatcgtggaacggaagttggagcaactggtcaagaccatcgatgagttcggcaactgcatccgtcgaaatatgacgtactttcaggagatcatcatcatgaaacaggccgagctcatagaatcccgtcaaattgagcgcgcttgggattgcataacggccgccaaggaggttaccgaaatcctgtacgatgccacccgaaaactggagacggactatcccctgccgacaaagtacagcgcctactatgcgcccatggaagaactgcgggagtgcgagtacttcaagaacaatgtcacggactacagtcccaagcacataaaagactttcacaacatcttcgcctatgtgcagtcacaatacctgctccggctggcactcaccatcacaactcgtccctcgatctctcagctgagcgaggatctggtgaaaatcgacagcctggtgaggcagttggtacaagaggaggagcagcacttcagtaatctagcattagccctgcagaacaagaagcaattggaactggctgagctgaatgcgactagagcagagcaacagcagagtggaccaattgctgtgctgcagcactcctcgctaaaactaagcgcctgcatggtggccgtggccgcagaatgtcaagctctggacgtgactcttcaaaaactcactgtcacagaggcggcaaaaaagaacaactccaaggagctggtggctgtggccaataatatgcatggcatcgaaaatgccttggccgtttgctgtgatgatttccagcgattgatgctggtctacaacaagttcttgcacagtcagctggatttggaaggagagttgccgaagcccaagcaggatctcgacgatgaattccccgagagcattcttagggttgagttctcgcagaacgtggatgctccgcagcagagggatgacttttatgcatacatgtacgatgaaaacgaggagcagcactttgaagctgagcagaatgcaccgtttccctcgccggaaaaggaactgcttaacttcgagaagcgtattaccaagggaaggtttaagcctgtcctcaaacagctgaaagatcgcatcgatcccatcagacaagttatgctggaaaaggagcgtgaggttctggcctctaagggcataaatgtggacgagctgtttggcaaaatggaaagagtcgagcagcagcaggaggacaatcgcttggcggatgccgcacccttacctgtctacgaatcctccagcaactcagattcggactctgctgacgaagaggcattcaggcgacgcagcaaacagcacaaggagcgtgataattttgctgaaatgcgtcaatttcttgctcagaagcaggctattaatctgtttaagctaccaccaccacctgtggccgccggtggggaggagctgcttgaaagtgaatgctagacgggctggctggctgtttgttttgttgttcactagcctgttatctggatatttgctctgaatagtttaagcttttatcatttatctagccaattggagagatagaccgctcgccaagcgacgccacatcaccccgaacacaactttctgcctttcggttgttcctcgttttgatgttccctaccattttta

SEQ ID NO: 41334 - protein, 592 aa, DROSOPHILA
MQELKQRFERRQLADDLKQKQVIQDHLLQKILYSKRLLVDHVEALEHCMQELQTASSASSGRQLLTTRNACLILGGTLLEHLITPRGIRYTMVPSILISGTFAALFAVKSVFVCRNKIVERKLEQLVKTIDEFGNCIRRNMTYFQEIIIMKQAELIESRQIERAWDCITAAKEVTEILYDATRKLETDYPLPTKYSAYYAPMEELRECEYFKNNVTDYSPKHIKDFHNIFAYVQSQYLLRLALTITTRPSISQLSEDLVKIDSLVRQLVQEEEQHFSNLALALQNKKQLELAELNATRAEQQQSGPIAVLQHSSLKLSACMVAVAAECQALDVTLQKLTVTEAAKKNNSKELVAVANNMHGIENALAVCCDDFQRLMLVYNKFLHSQLDLEGELPKPKQDLDDEFPESILRVEFSQNVDAPQQRDDFYAYMYDENEEQHFEAEQNAPFPSPEKELLNFEKRITKGRFKPVLKQLKDRIDPIRQVMLEKEREVLASKGINVDELFGKMERVEQQQEDNRLADAAPLPVYESSSNSDSDSADEEAFRRRSKQHKERDNFAEMRQFLAQKQAINLFKLPPPPVAAGGEELLESEC

SEQ ID NO: 41335 - DNA, 3356 bp, DROSOPHILA
actcgaaaatcgctttcgatgagtaattcgaatatgcgatccataatatactgtgtagttacttagttacagacaatattgcgccactcaatatattgtgtattcctttctgaaactattataaatgaaaaatataattttaatagcaatttaatttcgtttacataccgatttattgcgtctgatagagttaacacacacttctttgagtgtaagccgattatcatctttaaatactcaaataccaataattattcttaagatgtcatattatttcattttgaaagccaaaataccaggtattctagcgaattaaaaaaacattttcgaccttctgtgccgcagtgcgtatgattaatggtgccatcggagccatcgcttcttcccgtgaattggagcgggggaatgtgcagtaattgacatttaatatgcagcttctggcgcctcttccaagctttcgttgacgtcattgatgcggtgagtcactgccggtatccttttccttcagattgattatgcaccgcatgccttagctgtctacttcaattttctaggcggcgctcttatatctgggcgataaggcgcacacgcacccataaacctcaattccacccgcctctggagtcttcgaatgaccataaaactaaattgccaattgcgtttttatggcccacatgtgtcccacggcggcgtggatcatttatccgacccaggtccgatcccttggcccagtgccacccccgaagagatccacagaccgtccgacacttggatggtgcggactccgcgtcatcatccagcgttcggagttgtcaggcggatggttcgcacgttcccgcgaagatccccgctgcatactaagcagggatcagtcgcgtctatgggtatatccgattttttttgagcctctcattatgctcgatgtgctggccttgttgcctggctcgtcgcgtatataaatctaacgcgctgccccgatcagacatcacttctttggtggaaacttcagtgacaagtttagctcctgctgtgatcagtgcgccatttcgtatcccacaatcgagaccctcgcccccgctataaggatttaaatcactagttctgccccctccaaaactaagttcagtccgacatgaagttctgtgctgccgtggctctgctactgatcgccggcattgtggccagcggcgatgccctgcccgccaggaaaagtgagttcgccgcccagaggattacacattccgctagcacaatcaccatctaatcacttcacctaccaccctccatcccttcgccaccatactgaacaccggcaatacctcgttccaggaatggtctacctccagcagcccgcagcagcagagtggtacggatccgcaccccatcagcgcttcatgtatatgcagtatgtccagcccggccgcacccacgcccgttccacccaggcagccagtgccctcgtggccggagagaccgtagccaccggaacctacctgaagggtacgtactcctcccgtccgcttcccaatccccgccagcactaaccacgcccttcctaaccaaagattgcaatcacgcagagtctgatactagcgccgagggagtcccagctgacgatgtcctcgcagccgccggagcccacggcgcaacctccgtggccgaggcttatcccgaccaagcgccagttgtacaggtggccaccaattccgacgtagcaccccaagccgagtcagaggctgaacccgagcccgaggccgcagacgacgccgctaaggttccacgagacttcaacttcgccgccgaggaagcctccgtcggctctgctgctgaggaggaatcagttcccctgcccgttgccgaggccgagcttccagcccccgctcccattgctccagtggccgccgtggtgccagcgaaccgctacctgcccgccaagaagaaggtgatcgtcgagctggatcaggaggaggaggagccccaggccgccgccattgaagacgaggaggaagtagagaacgctgtggccgacgacgttgaggaggacgaggaggagctgtccgtgcccgtaaaacccattaaccctgtgcgcgtgcccaacgcccgtcgtcccgcagacaagaagcctgtgaaggctgcttctcctgccggcaagccctccaagaagcccgccgcccctctgcccgctggcacctttttcccaatcgatttcggaggcaccaacggcggcgccattgccattgccaactctttcagcaccggcgagggcggatctgctaccagccacgccatcgcatacggctctccggagtccgccgtccgccgagcccgccccaatcccagcaagttccgccactaatccttgaaccacaccttgatggcgccagcaactgcgagggcacccgaatcaaatcagtctaaaacgattctcctgtaattattagcaaatttgtcaatctttgagcgcaataaaataaagttttatgtttttaaatttcggaagaatatcatagaatatcatggattgactgactagtcatcacatctaattgaaacagcttatagtaaattgtaagttataagtgaactatctcctttgcagcgataacgccacctagcggtggtttcattcattaattaccaattcatggtaatatacaatcttaattttctagcaccgtgtaaagttatagactgattttgacagtccttaacatacaagaatatataattagcccattgaaagaatattatcaatttcaatcaacttattcgaatgatctgctgcaagttgaggaaaaggaataaatatttagtttttggcaaaggtaaacgcttttttttaaatgttactttgtaaaatttttttgtttatctaatattaatgttttataatatccgcgatgtttttttcttggcaaaaaggcattttataaacacttctgttacaagcggtatataaaattcttttgtttctaaaactttgtatgggcgaaaagagagcgcttcaataagtcataattttcaaatagatggagtagttgaaagcgtacgcctataacatctaagaatgctgtcatatgtggacaaaacccagtgaaaatcaggtcacaattaccaaaattacttttaaacggttttatatgctctaaatagttgtatttatatattcataactttttcaatccagttaaatgccgacgttataacgttcaagttaaatttaaaatgatattttctatactcctcaacacaggaatgtttgctatgcagttagtttatttatgtcacactctttgcttaagttgatgataaacggaaaaaattaaaagctgcccagccgaaatgcaaattgtaat

SEQ ID NO: 41336 - DNA, 1173 bp, DROSOPHILA
aaacttcagtgacaagtttagctcctgctgtgatcagtgcgccatttcgtatcccacaatcgagaccctcgcccccgctataaggatttaaatcactagttctgccccctccaaaactaagttcagtccgacatgaagttctgtgctgccgtggctctgctactgatcgccggcattgtggccagcggcgatgccctgcccgccaggaaaagaatggtctacctccagcagcccgcagcagcagagtggtacggatccgcaccccatcagcgcttcatgtatatgcagtatgtccagcccggccgcacccacgcccgttccacccaggcagccagtgccctcgtggccggagagaccgtagccaccggaacctacctgaaggattgcaatcacgcagagtctgatactagcgccgagggagtcccagctgacgatgtcctcgcagccgccggagcccacggcgcaacctccgtggccgaggcttatcccgaccaagcgccagttgtacaggtggccaccaattccgacgtagcaccccaagccgagtcagaggctgaacccgagcccgaggccgcagacgacgccgctaaggttccacgagacttcaacttcgccgccgaggaagcctccgtcggctctgctgctgaggaggaatcagttcccctgcccgttgccgaggccgagcttccagcccccgctcccattgctccagtggccgccgtggtgccagcgaaccgctacctgcccgccaagaagaaggtgatcgtcgagctggatcaggaggaggaggagccccaggccgccgccattgaagacgaggaggaagtagagaacgctgtggccgacgacgttgaggaggacgaggaggagctgtccgtgcccgtaaaacccattaaccctgtgcgcgtgcccaacgcccgtcgtcccgcagacaagaagcctgtgaaggctgcttctcctgccggcaagccctccaagaagcccgccgcccctctgcccgctggcacctttttcccaatcgatttcggaggcaccaacggcggcgccattgccattgccaactctttcagcaccggcgagggcggatctgctaccagccacgccatcgcatacggctctccggagtccgccgtccgccgagcccgccccaatcccagcaagttccgccactaa

SEQ ID NO: 41337 - protein, 346 aa, DROSOPHILA
MKFCAAVALLLIAGIVASGDALPARKRMVYLQQPAAAEWYGSAPHQRFMYMQYVQPGRTHARSTQAASALVAGETVATGTYLKDCNHAESDTSAEGVPADDVLAAAGAHGATSVAEAYPDQAPVVQVATNSDVAPQAESEAEPEPEAADDAAKVPRDFNFAAEEASVGSAAEEESVPLPVAEAELPAPAPIAPVAAVVPANRYLPAKKKVIVELDQEEEEPQAAAIEDEEEVENAVADDVEEDEEELSVPVKPINPVRVPNARRPADKKPVKAASPAGKPSKKPAAPLPAGTFFPIDFGGTNGGAIAIANSFSTGEGGSATSHAIAYGSPESAVRRARPNPSKFRH

SEQ ID NO: 41338 - DNA, 4681 bp, DROSOPHILA
tttgtgttgcgctgagcctggcatctcgagttagcgggctcgttcttcatataggtattttcactgagacagctctgagtttggcaacccacattctgtggagccttcacaatagaagttctagttggggtggcggtgtccttcgtttggcaactcgcattccgaggcatctcgcgctccacagttgtctgcgttttggcaaacatttgagtttgacagctcgagtgctgcgtctcgcacttggggcagtgctggcatccagtgtttgtcatcaacccggatgtcgaggtgccggcatcgtagcaaagtggtaaacggtgttcagatcccgactttttctttgaccaaaccaattgagtagacacacttgcaactgtcttcagcgggttcgaggtttcctgtagaaaaagacatgtatcattggtcgactttgcagggttcacatcctcttcgatgtccattcgcatacagacccttttgtcagaagcattgcggagaagatcatccaaagtgcagaagtgcgtggtgtttggcggggggaaataaaccgcacctggcgaagaagtatccaagggaagaaactgcccgttgggtcctacacgactgtagcttatcactcgcgtgtcttccacacgacgaatgtcctgctgggtgagcacaataatctcattgccaaccattatgggaacttaccgaagaaaagttagtcaatactctgcatattacaataatcaatatcgatgctcactgtgaacaggtggtgccccctcctccgctacctgcatcacttttctcgtgttaaaattgttcgccattgccaaagattacacaaattttggaaaatattatcaaattcgatctgagaatttagcgtttgaatacaattttttctataaaacaccaaaggagaaaacgatattttgattggccacaaatttgacaatttgacaatttcgaaattttaaattcaatagttaaatccgtttaataaataaacgaattttatttataattatattctgggtacttttcgtttttattaccgtgccaaagatcacaatcacaagttaaaaaaaactcattggcccatgtttatattttcttaagttaaacaaacagtttgaatcataaactaatccaatttgaggcagcttaaatagaggaattataatgtcgtcttccacagtaatgttgtcccagtcttaaagaagcgattatacgaaactcagaaaaatacttcattttacattcaaattaattcctattaagccgtacactaagcattgtttaaggaaatgattatgtttcttttatatatatatatactacagtcccagcttaaattcggcgttctccgtgccattttaactacgtacggattcctccttaacattgggcgtaatactggcccccgtcgtaactgtgtctttgtccttggtaccaaaatccggatacagcttggccacttgacccaacggagtgcaaaggcgtcccgagaaatccaatcgtttgttggactggcttcgctctgctgaggatataatatctagcagggatctggggacaaatattgcgcgaattaaggactctatcaagaaatacatacatacgacatacctttgcccacaactagacatgcgacgcttgctcgccttgagaaggctattggagctgctgctgccactagcaccgacgctactgatgggctccagccgttcgggagagagtggggattccgtgtaggtgcgcaggagacttgctccaggttccgacttcagcggggcatcgccgtatgcggctcgcaaactctgtaggctttccagcagatttttatggtgcattgtggtggcatttagttgaattaattgctccagttccctgtacagcaagcggtactggtctttggccttggaaagctttagtctgaaatgagttaattaaatataaaaaattgaaaatatataaaagatatctataaattgcttaccttgctccattggtgtgggtaaatggtaggacatcgccacgcgaggcgcttttgtacagctcgtgaatgtgctgctggcaccgcacctcgtcctgcttatccatgtcttccttcactaaaagatggagaaaatgcggaagccaactgatgtgtcgctgtagatggaacagaatcgaagagctggtggtcagggggaagtagcgaggcaaccggcgcgtcaagggcggagcagatggatccttaaccttgagcggaaccacgcgcgacatcttgatcagttgaccaagttcggcggtgcgatagtccgagacacgtcctccggggccatcagtaattgatggagcctcatccatgcaggagcgcgtgatgcacagggagtgcacaaagatctcgccaccgcgtgcagaaagcatatggctggtggcctttgagccggtcttgcgcggcatttccagcaagactgaacgtccgttaagcagaaagttaatcaagcaagaactgggccgcgaggtgacgtccaccggtgtcacgaggaactgacccagacagggctgtagatctgcagagccgcaaccgcgcggtgtgcaccacttaagagtcactgtttcgtatgtggcaccttgcttgatgctcgtgggtagactgaaatctgggccacaggtgatggagtgggcccttcggctgtgcaggatttccacatcgtagttggcgctggagttggcgttctgctcctctttcatgggtatgttagtcaccgtggtactagctaggtcgtaatggttcagtatgaggtgcgtcagcttataggaaatatccggggcactgactgtgtggatctcgacatcaagcagcggcgatatcttgagcaggctgcgattggtaaccaacgattcaacgcccagcggcacaatgttgaggataactaggtggcaatggtcgatgaccagtcccttcttggagggcggagctgctagggtgttctgctgcaccagcacggtgttaaagatgtcctccaggcttttcatgctggtattgtcacgcgctgaagttatgcagatgacgcgacccttgttgggaatgcgcggcagttcgtcggtcccaaagtcggccattgccgccaactgctcatcggtgggctccgccagcgcttcgatggcggcccgcaggccatggattaccgagtagtcagaagatgtgggtacgttgcgcgacggcacgcccacaattagcattgcgttcatcacgtgcgccatattttgcgtgctgggcctccaggtgttcacgatatgcgccgccgtgtccgagacaataaaccgcacatgctttttgccgggaaagagatcccagaccacgcggcagtactcgatggaggattcgcaggcgcatgtccacaggctcttgctgaattgggatccaccgctgccggttgcatttcccgccgctcctgttgcgccgccgtctgcagatggttttccctttaggaagtccatcgagatgtactcctcgctggcgatgctaaagtatcgggtgtggtccagcacaaagatggtcttctggttgcgttcgaacatggtggactcgtggacaacttaaattgccgggaaatcaaacaaacgcaaacgttgaatcctaattgtttacaatctttgttcaccacgaacagctgttttcgaattccaaattcaccacagctaatttttttttatttttttaaatttactaaactgtgttaaaaagctcttttctcaaattcaacaaaaaagcacacatttaaaaaaaatatatcgatgtatttataacttcatttcaatttgtccgtctccaatttaccgaatctggcagcgctgctcagtagtaagaatcacgttgttaagcgaaagctgtctaaatttcataatattttctagattgtttttttttcccatacactgagtgaaaagcgcgagaagcgcaagccaacatattaggaaaatgtcgtggcttttgggcaggaaccgccaacagcctcagccggatcagaccgccggcttttcggaaggaggaggagctgccgatccggagggcaggacggccggcgagaagtccggggattcgcaactgagccgggcggagcgcaaggccatggaagcgtaccgcttcgattcgtcggcgctggaacgtgcagcggatgctgccaaaaccctggagcgctcaagtaagaacaaaatttcatcagccaattgcataaccggcatgcgccacgctatcacaacgtgcgtatgcgtcagagtccatgtccataacccatgttaatcttgtgcagaacacgcccgggaggccctcgagctgtccaagatgcaggaggccacccgccaaacggagtacaacaccaaggtcaaggagtacgaagcccatatcgagcaggccaaggtcgagcagaagcgcatcgaccacgaggagcgccgcaaaactctcatcgaggagaccaagcagcagcagcagcgtgcccaataccaggatcagctgtcccgcaagcggtatgaggatcagctgttgcagcagcagcgcgtacaggaggaaaacctgcgcaagcaggaggagagcgtccagcgtcaagaggccatgcggcgccagaccatcgagcacgagatcgagatgaaggagaagaaccggcttaagcttctagaacacgaactgcgcgccaaggcacgagtg

SEQ ID NO: 41339 - DNA, 2557 bp, DROSOPHILA
tagctgtggtgaatttggaattcgaaaacagctgttcgtggtgaacaaagattgtaaacaattaggattcaacgtttgcgtttgtttgatttcccggcaatttaagttgtccacgagtccaccatgttcgaacgcaaccagaagaccatctttgtgctggaccacacccgatactttagcatcgccagcgaggagtacatctcgatggacttcctaaagggaaaaccatctgcagacggcggcgcaacaggagcggcgggaaatgcaaccggcagcggtggatcccaattcagcaagagcctgtggacatgcgcctgcgaatcctccatcgagtactgccgcgtggtctgggatctctttcccggcaaaaagcatgtgcggtttattgtctcggacacggcggcgcatatcgtgaacacctggaggcccagcacgcaaaatatggcgcacgtgatgaacgcaatgctaattgtgggcgtgccgtcgcgcaacgtacccacatcttctgactactcggtaatccatggcctgcgggccgccatcgaagcgctggcggagcccaccgatgagcagttggcggcaatggccgactttgggaccgacgaactgccgcgcattcccaacaagggtcgcgtcatctgcataacttcagcgcgtgacaataccagcatgaaaagcctggaggacatctttaacaccgtgctggtgcagcagaacaccctagcagctccgccctccaagaagggactggtcatcgaccattgccacctagttatcctcaacattgtgccgctgggcgttgaatcgttggttaccaatcgcagcctgctcaagatatcgccgctgcttgatgtcgagatccacacagtcagtgccccggatatttcctataagctgacgcacctcatactgaaccattacgacctagctagtaccacggtgactaacatacccatgaaagaggagcagaacgccaactccagcgccaactacgatgtggaaatcctgcacagccgaagggcccactccatcacctgtggcccagatttcagtctacccacgagcatcaagcaaggtgccacatacgaaacagtgactcttaagtggtgcacaccgcgcggttgcggctctgcagatctacagccctgtctgggtcagttcctcgtgacaccggtggacgtcacctcgcggcccagttcttgcttgattaactttctgcttaacggacgttcagtcttgctggaaatgccgcgcaagaccggctcaaaggccaccagccatatgctttctgcacgcggtggcgagatctttgtgcactccctgtgcatcacgcgctcctgcatggatgaggctccatcaattactgatggccccggaggacgtgtctcggactatcgcaccgccgaacttggtcaactgatcaagatgtcgcgcgtggttccgctcaaggttaaggatccatctgctccgcccttgacgcgccggttgcctcgctacttccccctgaccaccagctcttcgattctgttccatctacagcgacacatcagttggcttccgcattttctccatcttttagtgaaggaagacatggataagcaggacgaggtgcggtgccagcagcacattcacgagctgtacaaaagcgcctcgcgtggcgatgtcctaccatttacccacaccaatggagcaagactaaagctttccaaggccaaagaccagtaccgcttgctgtacagggaactggagcaattaattcaactaaatgccaccacaatgcaccataaaaatctgctggaaagcctacagagtttgcgagccgcatacggcgatgccccgctgaagtcggaacctggagcaagtctcctgcgcacctacacggaatccccactctctcccgaacggctggagcccatcagtagcgtcggtgctagtggcagcagcagctccaatagccttctcaaggcgagcaagcgtcgcatgtctagttgtgggcaaagatccctgctagatattatatcctcagcagagcgaagccagtccaacaaacgattggatttctcgggacgcctttgcactccgttgggtcaagtggccaagctgtatccggattttggtaccaaggacaaagacacagttacgacgggggccagtattacgcccaatgttaaggaggaatccgtacgtagttaaaatggcacggagaacgccgaatttaagctgggactgtagtatatatatatataaaagaaacataatcatttccttaaacaatgcttagtgtacggcttaataggaattaatttgaatgtaaaatgaagtatttttctgagtttcgtataatcgcttctttaagactgggacaacattactgtggaagacgacattataattcctctatttaagctgcctcaaattggattagtttatgattcaaactgtttgtttaacttaagaaaatataaacatgggccaatgagttttttttaacttgtgattgtgatctttggcacggtaataaaaacgaaaagtacccagaatataattataaataaaa

SEQ ID NO: 41340 - protein, 689 aa, DROSOPHILA
MFERNQKTIFVLDHTRYFSIASEEYISMDFLKGKPSADGGATGAAGNATGSGGSQFSKSLWTCACESSIEYCRVVWDLFPGKKHVRFIVSDTAAHIVNTWRPSTQNMAHVMNAMLIVGVPSRNVPTSSDYSVIHGLRAAIEALAEPTDEQLAAMADFGTDELPRIPNKGRVICITSARDNTSMKSLEDIFNTVLVQQNTLAAPPSKKGLVIDHCHLVILNIVPLGVESLVTNRSLLKISPLLDVEIHTVSAPDISYKLTHLILNHYDLASTTVTNIPMKEEQNANSSANYDVEILHSRRAHSITCGPDFSLPTSIKQGATYETVTLKWCTPRGCGSADLQPCLGQFLVTPVDVTSRPSSCLINFLLNGRSVLLEMPRKTGSKATSHMLSARGGEIFVHSLCITRSCMDEAPSITDGPGGRVSDYRTAELGQLIKMSRVVPLKVKDPSAPPLTRRLPRYFPLTTSSSILFHLQRHISWLPHFLHLLVKEDMDKQDEVRCQQHIHELYKSASRGDVLPFTHTNGARLKLSKAKDQYRLLYRELEQLIQLNATTMHHKNLLESLQSLRAAYGDAPLKSEPGASLLRTYTESPLSPERLEPISSVGASGSSSSNSLLKASKRRMSSCGQRSLLDIISSAERSQSNKRLDFSGRLCTPLGQVAKLYPDFGTKDKDTVTTGASITPNVKEESVRS

SEQ ID NO: 41341 - DNA, 2980 bp, DROSOPHILA
gtctgcgcacggaaaccaaagactggcgggaaaacaccctaaatgtgccgaaaactgcgcttagcaaagttttaagccagttgatttaattaatatgcatttttgtggtaattgccaacggtcgcacttaaaataaaaaaacatttgttttacatttcggatccaaggaaataagccattattggcttaaataagctttaacgactgcaatcatgagcacccctcgcaagaactataacaacctgccgccctactgcccacaaggcggccagtacccatcgcagtccgcggattacagagcgcagcaattcggtggccagcagaagccacaaaatccaaacgttggcttctacgaggacaaacagggccagcaaaatgttcctcatttctaccagaacaaatccccacaggagccgcagcgccatcggccctacggtcagggcaggaatttcggacgcggcggcagcttcaatcgcaggaaccaacagaactgggatcatccgaggagccaccagaacagggaacaaaaccagagcggcagctccttcggccagtactttcatccctccatgctggaggatccttggcgggagctaatggaacggcacgaggccatccacggacccagtactagccgaacttcaccgaaagaggtggcggcttcctaaaatgtagaatacaacactaagagctagttaagccctgtaggataatttccccaaagcaaagaaagaattttaattttagctttccgatattaaacaaaagaatgtgtaaacataaaaatggtttcatcatgagatccgagcctgcttttgagtggcacattacgtgctgaaaaccgctccgatgccttcaagaaagaactatggctaaggttgtaacattttatacatttaagcaacagtttcacgtgaatgaaacccgtgtgtatacttaaaaatttaagactaccgtaatggaacacccctcagtgcaatggggctccccgagtgagctgctaatagtgctgctgttgatgccgcttcttctccagatacttctcccagtcgacggcaacgcgattgtagatacccatggcggcacgtgcatcctccacggaattatgctcgcccgtttggatctcctgacccagaacggcctttgtcaggcgttttaagctgggcgtgtgggtattagagatgagtttgcacagcggcttataatgcgacgtatcacgaatgtcatggaacggatggcggatgcccagtacggcaagatcgttgcgcaggccgtgtcccaccagaatgcggccatgtatcagcttcatcacttcgttttgcacggcggcaaagtcctcaccgttagcgatgtcctgcggccgaatgccggacacgctggtgcggtagtcggtgacctcctttcgcggcttcacatacttgtccagcagcacgtgtcccatgcgattcacgatggacacgcgtgccagcatgtcgtcccgtgtgttgtgtcccacgcccaccatctcgcagtccatggccaaaatgcgattgcggtgtgccttctttttcatgcgcatgcgtgccgatttgcttagtggtgctgactccgtcgccttggcatcctggttttcacttccagctgctgctgctgctccaccgccagcagcggccatccagttggagccggctgcccggcgacttgtgttcacctgttgcacctgtaggcgctccatggaggcttgcagcttgcgttgattgtgttgcggggaaaccacatttttcgtgctgtccgtggtgtttttgttgttggcagacccgcttctgctgctgtccaagttattggcccggctacgattcatgtcgaactgcttctggcgtggcgtagcggacatggcgtcggggcatctatatattccaaataaatatccagcttaagacaatctcgaataacaaatgtgtttctttattttagtaacaccgaccagtgtgaccgtcttggggttgctggagtattactgtcgacgggcttttggtatttaaacagtgtcaatgggtgcgttcagcaggtaaatagcaatcacgccttatgtagcctgtgaacgcattcactgcgtcaataatatgtgcattgatcgctcgaacaaataagaccgtaaaaatcgctattcatttacagtttcagacgttgaagtagtgtaagttcattaaaatattgaagaaatgtgggagtattgactaatattctaaaatcacttatggcggttttatattttaacaaatcgtaaaaatatcaaactaacggattttatacatatgcatgtgcacactcgagattgggcttgaagttttggatatccactgcgaagtgcgcacttgataaagatgttcgtatgcaaggagttttaaactggctcccgcgtatttcgttcggagtgcatcctggagcacatagatgtcaagtaagcgcagcttacttaattcgcattaaggcatatggtcgtcgaggaagtaaaactttacttgaaaagcggggcgtggcccctatctgcattcggccccttcggcggcctgggcaactttcccaatcacatcgaggattattcatttgaggaatgccgtttgcagcattacatggctcaacaggaggatcgcctcactatttatgagttgcagtatgctcgcgaaattgacttggccaccatgaaaattatttgattaagatgtcgccccaaaaactactggaaacattgattgaaatttacgatcagcctctaatcgacagttcctctgtcgcatccgtcagggaccagacttcggacgagagaaaatgccaagttcagcctcaaagcttcccaggttttcaaaccaacttttcaaaccaactgccagttaaacatctccggtgacacggcgaggccgtccaacagagcatgcttaagatgctggaaggcagcgtggttagcctaaccgaccgggaacaactgttttaaaactaatat

SEQ ID NO: 41342 - DNA, 980 bp, DROSOPHILA
ccaagacggtcacactggtcggtgttactaaaataaagaaacacatttgttattcgagattgtcttaagctggatatttatttggaatatatagatgccccgacgccatgtccgctacgccacgccagaagcagttcgacatgaatcgtagccgggccaataacttggacagcagcagaagcgggtctgccaacaacaaaaacaccacggacagcacgaaaaatgtggtttccccgcaacacaatcaacgcaagctgcaagcctccatggagcgcctacaggtgcaacaggtgaacacaagtcgccgggcagccggctccaactggatggccgctgctggcggtggagcagcagcagcagctggaagtgaaaaccaggatgccaaggcgacggagtcagcaccactaagcaaatcggcacgcatgcgcatgaaaaagaaggcacaccgcaatcgcattttggccatggactgcgagatggtgggcgtgggacacaacacacgggacgacatgctggcacgcgtgtccatcgtgaatcgcatgggacacgtgctgctggacaagtatgtgaagccgcgaaaggaggtcaccgactaccgcaccagcgtgtccggcattcggccgcaggacatcgctaacggtgaggactttgccgccgtgcaaaacgaagtgatgaagctgatacatggccgcattctggtgggacacggcctgcgcaacgatcttgccgtactgggcatccgccatccgttccatgacattcgtgatacgtcgcattataagccgctgtgcaaactcatctctaatacccacacgcccagcttaaaacgcctgacaaaggccgttctgggtcaggagatccaaacgggcgagcataattccgtggaggatgcacgtgccgccatgggtatctacaatcgcgttgccgtcgactgggagaagtatctggagaagaagcggcatcaacagcagcactattag

SEQ ID NO: 41343 - protein, 290 aa, DROSOPHILA
MSATPRQKQFDMNRSRANNLDSSRSGSANNKNTTDSTKNVVSPQHNQRKLQASMERLQVQQVNTSRRAAGSNWMAAAGGGAAAAAGSENQDAKATESAPLSKSARMRMKKKAHRNRILAMDCEMVGVGHNTRDDMLARVSIVNRMGHVLLDKYVKPRKEVTDYRTSVSGIRPQDIANGEDFAAVQNEVMKLIHGRILVGHGLRNDLAVLGIRHPFHDIRDTSHYKPLCKLISNTHTPSLKRLTKAVLGQEIQTGEHNSVEDARAAMGIYNRVAVDWEKYLEKKRHQQQHY

SEQ ID NO: 41344 - DNA, 3083 bp, DROSOPHILA
taggagaatcaggaagtcaatgaccagccgggagaggagacgcgtgttcggattgccgcacattttcacactgaagattgagcgggtcgaagacgtcggattctttcgacccggttcaaactcatttgcatttctatcagtccagcggtgttggagattactaaacatgtaaacttgtttcacaaacctttgttttgctttttcctccgatcgggcggtgggtctcattcggttatcggatggtcaagtatgcaaacactttgataatttattctataatcggaaaaagttaaccctattccaaatctttgggtgttttcaggaatccactaagattggtgggtgccttttgggacctctgtagatgttttactaccaagcttaagcttaagacttagaacaaaaaatttacacgactaggtaaaattaaaataattcaaattttcttaagtggtatttccaaaatgagcaaatattaatttcttggagcgccacgatcatgacttagtgtgacttcctagacaaaggtagagtgagtagctgtaaattaagcaacctatttgccattgaattgttattgtccccagattatatctgttgtaatatcatcggaatgtgaatattaatcaaagcccctctgttcttattccttttgcaggtaagcctaaactctggttctcctcaatctcaatcaatttgaagacagaaatactcctgggatctgtagccacaagtttcgaaagtatgtgaggttagccatcatctgtatctgtcaatcgataagcactttctattcctacagtccattagccaattttcgatgcgccattccaccgacttaaatgatctgctggatgttcgtatcgtacttgaatatatttatttcgctagaataaagacaacaaaacaggaattccgtgcaagtctcttagtttgtgagtgtgtgtacgtttgtgggcatttctaagataggtttcgctaatggaattcgccactgagctcacggcacgtagccgtagttgtgatagggctgggcgtactgcgcctgcgcctgtgcgggatgtgccgccaggtagggcagcgttccaaaggtataggccggcagagcgggcggctgacccgctcccgacgtggatcctcccgcctgcgacttggtggagctcttcggcgagacctgcggcttgcgcagcgtgttggccgagtagccagtcttcggccaccgcttgccggcaaacaagtcggccacataggcactcgtcagccaagcgaacaccacgcccaatgccgcccccgccaggacgtcgctccagtggtggtaatagtcgatgatccgagtcagcgatacgtaccagccgaacatgacgaagaggaactgcagcagatgcttcagcagcttggagacgcgcgtactgagcgccgcctgcaggtagatggccaggtagagcatagcatacatggccatgctggcgtggccgcttgggaaggactggtagagctccttgaactggtagtcggtcatgttggcgttgctgcacgtaaaactgtctatgtagcgtcccaggttctgggcgtcctggcagctgcttccgtccggcagcatgggctggcacacggcgaggaagtgcggtcgcagacgcccgaggcacagcttcgtcagcatcgtggtgaacgtgaccatggcgaggccgtacaggtagaagataacctggcgataaaggaccccgaggcggtgggctatccggcagctatcccgcttaccgcccgcctctctaagcggcccaccgggcagctgcctaaacaactccaccactacgatcacggcgttgggcactccgaggacgatggcgatgatcaccttggagctgatggtgccgtcgcgcgctggatagctgagggtctcgtcgccacagaagaagccgcgccggaagggacgccccatcttgtggagcagcacactggccacgctgagggccacccagatcagcaggtcgcagaacccgcgggccagcttcgaatacttggacatgactgggattctcgtatcgcacgaacagcagaccgactattgactcgactcgaccggctggcaaacagcgcttaactaaccgagcgcggctggtgagtcgcccaacctggccgtgatttctgggggctccctctcgcagccatttgcggtccgttggctggtgcgtgcgtctttctgaacagctgctgttattgctgttattggtgtttttgttgttggtgttgcctggcaacggcggagcttcccatccgctgacatgccataaacatttgatggttgtttgctttttttaattgcaagcgagtcaattttccattgcgccgacagcacggaaaacatttgactaattggcacacaaagggcaatcaagttctaggtgggttgcgaaaattctcgcggtgcagtgccaccagaaatccaaactcctttagcactcatatttcataaggtaaacgccagtctgcacactcatatttcatctacgagtataatcggcggaaaaataaacagatctcgggtgcaacacccactccgcacttcattgcttacccagatcgaggaactggtttcacttattgctcatgagccaggagaaaatcttggcgaaaagatatgactgcgccagaagagagatggtaagctgcaaactggtttctccggaggcagtcgtcggttctcgcctttcgccgcagaccgagctcttttggatgcgtgtgcataatttcctagtgggcagcaagtggaaccgacacaagaaaggccgagaaacgatgggcaccactcaagtgtggtaattttggcctgccgctggttaattgctccaacgagtatgagtcgcccatcgattggcgctgagctgtgcttagttggagctgggaattttcacttttaggcatttctcgcccagtgactcacaaatccgcggcttcgatcgcaccgcatgtgatgcagggggcacggtggttgcaggtgattccgcacctgttctgtgacgtcgccaagtcggaggtgcattcttcgggtggctttggcgcttctctggtgtgacgtatgctca

SEQ ID NO: 41345 - DNA, 1083 bp, DROSOPHILA
ccggtcgagtcgagtcaatagtcggtctgctgttcgtgcgatacgagaatcccagtcatgtccaagtattcgaagctggcccgcgggttctgcgacctgctgatctgggtggccctcagcgtggccagtgtgctgctccacaagatggggcgtcccttccggcgcggcttcttctgtggcgacgagaccctcagctatccagcgcgcgacggcaccatcagctccaaggtgatcatcgccatcgtcctcggagtgcccaacgccgtgatcgtagtggtggagttgtttaggcagctgcccggtgggccgcttagagaggcgggcggtaagcgggatagctgccggatagcccaccgcctcggggtcctttatcgccaggttatcttctacctgtacggcctcgccatggtcacgttcaccacgatgctgacgaagctgtgcctcgggcgtctgcgaccgcacttcctcgccgtgtgccagcccatgctgccggacggaagcagctgccaggacgcccagaacctgggacgctacatagacagttttacgtgcagcaacgccaacatgaccgactaccagttcaaggagctctaccagtccttcccaagcggccacgccagcatggccatgtatgctatgctctacctggccatctacctgcaggcggcgctcagtacgcgcgtctccaagctgctgaagcatctgctgcagttcctcttcgtcatgttcggctggtacgtatcgctgactcggatcatcgactattaccaccactggagcgacgtcctggcgggggcggcattgggcgtggtgttcgcttggctgacgagtgcctatgtggccgacttgtttgccggcaagcggtggccgaagactggctactcggccaacacgctgcgcaagccgcaggtctcgccgaagagctccaccaagtcgcaggcgggaggatccacgtcgggagcgggtcagccgcccgctctgccggcctatacctttggaacgctgccctacctggcggcacatcccgcacaggcgcaggcgcagtacgcccagccctatcacaactacggctacgtgccgtga

SEQ ID NO: 41346 - protein, 341 aa, DROSOPHILA
MSKYSKLARGFCDLLIWVALSVASVLLHKMGRPFRRGFFCGDETLSYPARDGTISSKVIIAIVLGVPNAVIVVVELFRQLPGGPLREAGGKRDSCRIAHRLGVLYRQVIFYLYGLAMVTFTTMLTKLCLGRLRPHFLAVCQPMLPDGSSCQDAQNLGRYIDSFTCSNANMTDYQFKELYQSFPSGHASMAMYAMLYLAIYLQAALSTRVSKLLKHLLQFLFVMFGWYVSLTRIIDYYHHWSDVLAGAALGVVFAWLTSAYVADLFAGKRWPKTGYSANTLRKPQVSPKSSTKSQAGGSTSGAGQPPALPAYTFGTLPYLAAHPAQAQAQYAQPYHNYGYVP

SEQ ID NO: 41347 - DNA, 2918 bp, DROSOPHILA
ttgtaatggatcctttacgatggcatattgattatatgtcatcacgtttctgtttttattgccactacgacgctctgcgccgtatcattaaataattgttcaccttaacggcaatctaattgttttacgacgctgacaaccgacttttgaaacccgttcgaacccgatccgcaaacatctaggcgccgcttctcgattgcgactgaatgaaaccagactttgtaaacaaatctatagagcttctcttgcaccgtcgaacgtaacgattcgttacgtaacgtaacgaaagtggcgatcgacaacaactcccgagtggatcgtaagcggcgaagggttcggagcacggcttgaaagctattttccgaattcatcttaaaaggtttggataatatgtttagcatataagtctagcattagaattcggatattattgtttaaataagccatataggtaaatacgtttattcgcttggttgaaatattagcgaactcccctttacgtaattagtattccaaaaatacgtttatgagcaccagtacatagtatttgacgtaatattggcgactcttagttattaatagatgttttggtgctatgggtttggtatatgaggattaatatatggttttcccaaaattgccttaaaattccttaccaaatctcaaattataaataaaatataaaatgtaatgttaacggaaacaatttcaataatattctagtatatgacatgttaaattttagattgtaaacatacactcctacgatgctttagttcattactattgttagcatgtaatttgtaattatttgtaagcattggttttcccagcttccacataaaacaattggtatcggaataagcctatttatttctattcatatacacttacctaaaacgttacccctattaagtaaacagaaacgagttgcattcaaatatgaaaatacttttattaccagtgttatgtaagttcagaaaagttaacacatcgaatgtcagtagccgtaggtggctctggtgtagtatcccgcgtagccgtagatctgttcatttcttggcatgggacggcgttttactcgcacctccacaaagaggtgggccacaaatactgttgcaaagaaggccatccacccaccaagggcagctccagctgccacatctgttaagtggttctggtaggtagagatgcgctcccagcaaaccaccaaggccagagagcaacaagccagttgcagggaggctcggactaatcgcagccagggagcaaacaatctggcctgggaataaaaaatcagaaagcccatggcgtagcaagtggtggacacgaatccgctggggaaggagtggcgcaccagggcgagcagatcctgcgaggcggcgaactccgtgcaactgaagtcctcgaggtagagggtggagttctgcgcggtcacgtcggagcagctctcgccgccctctgttccccatgtgggctggcagatatcgaagaagtagggcctcagtcggcccgtcgagtgcttagtcagccgaatcgccgccaaggtcagccccagaccgaataggtaaacgccaatggccttgtagcattcgctgatgaatctggggatgcggaccccgacgaagacgaagcgctgcgtcagctccgtggagctgggtaccacggcagccctgagcatctccaccacgagcacaaatgcagcgggcagagcaaccactgcgatcgtaaggtggaccttggtcagccagggctggcgatagggatacttcaggctggtatcactgcagtggaatccccgttgggccgtggacaactgctggggcagcaccactagggccgctccatagattcctaggagaatcaggaagtcaatgaccagccgggagaggagacgcgtgttcggattgccgcacattttcacactgaagattgagcgggtcgaagacgtcggattctttcgacccggttcaaactcatttgcatttctatcagtccagcggtgttggagattactaaacatgtaaacttgtttcacaaacctttgttttgctttttcctccgatcgggcggtgggtctcattcggttatcggatggtcaagtatgcaaacactttgataatttattctataatcggaaaaagttaaccctattccaaatctttgggtgttttcaggaatccactaagattggtgggtgccttttgggacctctgtagatgttttactaccaagcttaagcttaagacttagaacaaaaaatttacacgactaggtaaaattaaaataattcaaattttcttaagtggtatttccaaaatgagcaaatattaatttcttggagcgccacgatcatgacttagtgtgacttcctagacaaaggtagagtgagtagctgtaaattaagcaacctatttgccattgaattgttattgtccccagattatatctgttgtaatatcatcggaatgtgaatattaatcaaagcccctctgttcttattccttttgcaggtaagcctaaactctggttctcctcaatctcaatcaatttgaagacagaaatactcctgggatctgtagccacaagtttcgaaagtatgtgaggttagccatcatctgtatctgtcaatcgataagcactttctattcctacagtccattagccaattttcgatgcgccattccaccgacttaaatgatctgctggatgttcgtatcgtacttgaatatatttatttcgctagaataaagacaacaaaacaggaattccgtgcaagtctcttagtttgtgagtgtgtgtacgtttgtgggcatttctaagataggtttcgctaatggaattcgccactgagctcacggcacgtagccgtagttgtgatagggctgggcgtactgcgcctgcgcctgtgcgggatg

SEQ ID NO: 41348 - DNA, 918 bp, DROSOPHILA
atgtgcggcaatccgaacacgcgtctcctctcccggctggtcattgacttcctgattctcctaggaatctatggagcggccctagtggtgctgccccagcagttgtccacggcccaacggggattccactgcagtgataccagcctgaagtatccctatcgccagccctggctgaccaaggtccaccttacgatcgcagtggttgctctgcccgctgcatttgtgctcgtggtggagatgctcagggctgccgtggtacccagctccacggagctgacgcagcgcttcgtcttcgtcggggtccgcatccccagattcatcagcgaatgctacaaggccattggcgtttacctattcggtctggggctgaccttggcggcgattcggctgactaagcactcgacgggccgactgaggccctacttcttcgatatctgccagcccacatggggaacagagggcggcgagagctgctccgacgtgaccgcgcagaactccaccctctacctcgaggacttcagttgcacggagttcgccgcctcgcaggatctgctcgccctggtgcgccactccttccccagcggattcgtgtccaccacttgctacgccatgggctttctgattttttattcccaggccagattgtttgctccctggctgcgattagtccgagcctccctgcaactggcttgttgctctctggccttggtggtttgctgggagcgcatctctacctaccagaaccacttaacagatgtggcagctggagctgcccttggtgggtggatggccttctttgcaacagtatttgtggcccacctctttgtggaggtgcgagtaaaacgccgtcccatgccaagaaatgaacagatctacggctacgcgggatactacaccagagccacctacggctactga

SEQ ID NO: 41349 - protein, 305 aa, DROSOPHILA
MCGNPNTRLLSRLVIDFLILLGIYGAALVVLPQQLSTAQRGFHCSDTSLKYPYRQPWLTKVHLTIAVVALPAAFVLVVEMLRAAVVPSSTELTQRFVFVGVRIPRFISECYKAIGVYLFGLGLTLAAIRLTKHSTGRLRPYFFDICQPTWGTEGGESCSDVTAQNSTLYLEDFSCTEFAASQDLLALVRHSFPSGFVSTTCYAMGFLIFYSQARLFAPWLRLVRASLQLACCSLALVVCWERISTYQNHLTDVAAGAALGGWMAFFATVFVAHLFVEVRVKRRPMPRNEQIYGYAGYYTRATYGY

SEQ ID NO: 41350 - DNA, 2956 bp, DROSOPHILA
ggaattagtcagagaggcgaggaaaaaaaaccacaatttccaagcattttctttgccgttaaaataaatgagccaattaagctgcggcccaggcgcctttggcccacctgatgagggtgtggtggggcggagtgggccaggtcgcaaatccgacctcggatttgtctggctgcaggtgttgcgcatcatcatcagtggcaaagactcgccggagatggctcagggtgcttttcccaatttacgcgctgctgctaaaaatttatttatgcctcccttcagctccaccatgattgagattgggattcggatggggtggcggtcgttggacttgttgattgcggctaagtcgatcgaaagctcactggtaatgaatctgaaggagccgctaatttgtagcacgttgtcagcgcaacaacaatgatatctaaaggtttgtttagcttaaacttttaaatttcttgctgtgacataggtttgatgttgttaaaaacactgtgggaccttcaacgcacgtatttctaagaaatctattttcgtaccctgccagagaagccgataaaaaatccccgggaagatcataaacacaaacctgccattttttgtgccagtcactgtgtccaaatattggcatagctttagcatttttaaggtagccacaaaattcttacgtacttacgattttagcgagtaaataaaattttccgtgaggtagtgtagaagtttgtacatggaactgagaaactggggaaaccacaagctgtactgatgtaaaaacatatttattttttgtgcagttgcttagctaatcactgtttttagttcaatcaaccgcttgattaatcttgatgtttctagttttcaccgaagcggcacgatatgggcatttattgatccggctttaataatatttccttcccgtttttacccctccaaccgcaagaacatttgatgcagttatcttgtcactagctttattgtcgaccttaaaacgaaactacgactaattagagatgtggcacgtaactagagacaaatcatgcggcatctgttggccccctttgacgtcggccacatcgaccactgcagcctcctgcttcgcactcgccagtgaatcctggcacctccattgtagctcctcggacgcggcagcccgagtaaccgcaagggcgctcccggcacccaacagcgaaccggccgcaacatccgaccagtggtgtttgtagtcgatgacccggctgatggccacgaaccaggccagagccacgcaagctagctgcagcacaggactaagcaaggatccacggagaggccagcggcggcggcgcaggtgcagcgccacaaacaccaagccgtagaaagccatggcggaatggccgctgggaaaggacacgtttacgtcacgaatcatttcctcggtggcttgcgaaagatttggccgacactcgtagtctgtgtggtatttcagagcacctcgatgcgactcatctaagcagctggagccgtccgggaaatgtggactgcacacggcaaagaagtggggcctcagtcgcccaagtgcctgctttccgattcccttgagcaggtcgttggatacgtagccgtaaaggaaccagcgcacagtgttgtacaccggccatagtgttggccagggggccatgtccttccggtggctgagaaagctttcaaggacgaccagactgatcagtggaaggtacagtcccagccagtggagcagcgtggggctcactgtgttttcgtggtagggatacattaaggactcgtcatcacagaagaaaccacgcttcgtcggaggcccccacaagcgacggaagttctccaccaggacaataagtaggcccagcaggaccaggtccaccaggaggcggatggggggccgcagacttaaattaaagctcatttttaatgctcgacccgcgatccgtgcgatcgattcaacggctctgtagtcactgactagtaaattaagttcaagctgggcaacagcccccagcaatctagactcgggcgcagtcacctcggattattatttaaccattcatatgcttgtcgctgattgtattattattaggctccaatcagaaagaggcttgagctgacgtcgcaaataattcccgttgtataggaacgccggatcgaaaaacaaagtacgcgccatcggccgatcttgctgttctgcggacttatcagcctgttgccacgcacgtgctggcgctataaccactaccttgtcccagtctggccctgaattaatttgcgcaaaacacgcgagttgctgtttactgcggatccgaaatctcagtcttacgtaggccgccgttaaagaaagttcccaaaagctctgggaaagcttcgctcaagccctctctgcggttctcctcccagtttattaattgctgggtcaggggttcatttaagccagattagcatcgccggattcttgggctggcttctcccattgaataaaaatgtaggagacgcggcaccttctcacgatcgttgtagaggatttcgggagaagctgacctcttgaacctcccaagttactgtgctgcgcccaagtaacctctgacgcagcacaaaatcggatcatcaaaaccgttgatgagtaatggacatcacacattccaagcgttaccaatagccaaggcagccaggtatgacacactgtgcgataatcaagccaataaaccaacacccaaaatgaaaacatacagatgagtttgtaaaaatagtgcactttactacaataattagctacaaaagcatttgggtttcaagaaatgcttggcaaattgtttataagtattaataaatatttccaaaattacgtaggcaataattatcgtcctgaaaaatatgtacgttataagggaaggaagtatatatagatatgtaacgtaacaaaagtttccaatcgaaaataaaattatagttt

SEQ ID NO: 41351 - DNA, 956 bp, DROSOPHILA
ttgaatcgatcgcacggatcgcgggtcgagcattaaaaatgagctttaatttaagtctgcggccccccatccgcctcctggtggacctggtcctgctgggcctacttattgtcctggtggagaacttccgtcgcttgtgggggcctccgacgaagcgtggtttcttctgtgatgacgagtccttaatgtatccctaccacgaaaacacagtgagccccacgctgctccactggctgggactgtaccttccactgatcagtctggtcgtccttgaaagctttctcagccaccggaaggacatggccccctggccaacactatggccggtgtacaacactgtgcgctggttcctttacggctacgtatccaacgacctgctcaagggaatcggaaagcaggcacttgggcgactgaggccccacttctttgccgtgtgcagtccacatttcccggacggctccagctgcttagatgagtcgcatcgaggtgctctgaaataccacacagactacgagtgtcggccaaatctttcgcaagccaccgaggaaatgattcgtgacgtaaacgtgtcctttcccagcggccattccgccatggctttctacggcttggtgtttgtggcgctgcacctgcgccgccgccgctggcctctccgtggatccttgcttagtcctgtgctgcagctagcttgcgtggctctggcctggttcgtggccatcagccgggtcatcgactacaaacaccactggtcggatgttgcggccggttcgctgttgggtgccgggagcgcccttgcggttactcgggctgccgcgtccgaggagctacaatggaggtgccaggattcactggcgagtgcgaagcaggaggctgcagtggtcgatgtggccgacgtcaaagggggccaacagatgccgcatgatttgtctctagttacgtgccacatctctaattag

SEQ ID NO: 41352 - protein, 305 aa, DROSOPHILA
MSFNLSLRPPIRLLVDLVLLGLLIVLVENFRRLWGPPTKRGFFCDDESLMYPYHENTVSPTLLHWLGLYLPLISLVVLESFLSHRKDMAPWPTLWPVYNTVRWFLYGYVSNDLLKGIGKQALGRLRPHFFAVCSPHFPDGSSCLDESHRGALKYHTDYECRPNLSQATEEMIRDVNVSFPSGHSAMAFYGLVFVALHLRRRRWPLRGSLLSPVLQLACVALAWFVAISRVIDYKHHWSDVAAGSLLGAGSALAVTRAAASEELQWRCQDSLASAKQEAAVVDVADVKGGQQMPHDLSLVTCHISN

SEQ ID NO: 41353 - DNA, 3250 bp, DROSOPHILA
tcaagaacaacaaattgccgatctggagcacaactaccgcagcaaccgtcaaagttatcctcctttggctgtggccacctcttacgatatgcagcatgccggacgattgtggacctcggatcagtcacccagtcaacgggtgcttggacatgtgacgcgactggcccgccatgcgctcgagattattgaaaccagcctgatgtcgaaagatctgaggtttgtgcggccggcccaattatttcgagcttccaacgagggatacgatctggttatccaatttaagccagatctcgtgccgaattccttaagctacgatctggggtcaccatttgtttcatttagccagccaaactttagcttgccccgcgcaggatcagattacattgctcgaattgtgggactactaagagtaagatgttataaagcagccagctttgtatttgaaaattctcatttcccttcttttttccgctagtctgcatactccgactttgctgcgttcttttacaatccgcacggaggcaaggaactgggcattgtatggcggccaccaacggaattcgctgcaaagccatttaaggtcacagagctgcaggcatgcagtccttgtggtaataaaaaggttcaagttctcaaggaaacactgctcgaggacttcaaactcttactgaaagatttctacctgcgcatcgccacaccagaggagctcaaacgggaacagcgcgagcatcagaagcccatgcggtactttgatgccaacaaggcagaggaggagtcgaagccaaagccgaaaaagcataggcaacgcaagggcaccgggaaaaaagcactacccaaaaggaaacgcctaataaaaagctcaacccttaaggtcttgaaatagttatagaaatatgtagctaaaccgttactaagttaaaaaaatagctttaattttggtttaaaaaaaaatggcatatagcagcataagaaatcgcgaaaaacggtgatataaaaactatagcattactgatgtttacttatggacgcgttttgactgagctcctgctgaagtatttcgtgatcaggattgagattcgtccaacccgtatgtttggagactgatggcttggagacttgagctcgcggatagggattttggcccaacggtatcgttctatagaaatgaggttccacatgaggttcaaagttattaacctgggtgcagagatcaaagcggatatgtctagatgtgcaaggctgctcctgtggtggtacgggcgactgaacttgaggttgcattggtactatcaacgtctgatccgtgcaggtcggttgtgacttacagtgctgacaggtgctttccaccgatgaagtgtaatcacattcagctgatgtgtaagactctgctgaggtcgtttcaaataggtcgctatatgtaccgcacccggtggagtttgtgttgcgctgagcctggcatctcgagttagcgggctcgttcttcatataggtattttcactgagacagctctgagtttggcaacccacattctgtggagccttcacaatagaagttctagttggggtggcggtgtccttcgtttggcaactcgcattccgaggcatctcgcgctccacagttgtctgcgttttggcaaacatttgagtttgacagctcgagtgctgcgtctcgcacttggggcagtgctggcatccagtgtttgtcatcaacccggatgtcgaggtgccggcatcgtagcaaagtggtaaacggtgttcagatcccgactttttctttgaccaaaccaattgagtagacacacttgcaactgtcttcagcgggttcgaggtttcctgtagaaaaagacatgtatcattggtcgactttgcagggttcacatcctcttcgatgtccattcgcatacagacccttttgtcagaagcattgcggagaagatcatccaaagtgcagaagtgcgtggtgtttggcggggggaaataaaccgcacctggcgaagaagtatccaagggaagaaactgcccgttgggtcctacacgactgtagcttatcactcgcgtgtcttccacacgacgaatgtcctgctgggtgagcacaataatctcattgccaaccattatgggaacttaccgaagaaaagttagtcaatactctgcatattacaataatcaatatcgatgctcactgtgaacaggtggtgccccctcctccgctacctgcatcacttttctcgtgttaaaattgttcgccattgccaaagattacacaaattttggaaaatattatcaaattcgatctgagaatttagcgtttgaatacaattttttctataaaacaccaaaggagaaaacgatattttgattggccacaaatttgacaatttgacaatttcgaaattttaaattcaatagttaaatccgtttaataaataaacgaattttatttataattatattctgggtacttttcgtttttattaccgtgccaaagatcacaatcacaagttaaaaaaaactcattggcccatgtttatattttcttaagttaaacaaacagtttgaatcataaactaatccaatttgaggcagcttaaatagaggaattataatgtcgtcttccacagtaatgttgtcccagtcttaaagaagcgattatacgaaactcagaaaaatacttcattttacattcaaattaattcctattaagccgtacactaagcattgtttaaggaaatgattatgtttcttttatatatatatatactacagtcccagcttaaattcggcgttctccgtgccattttaactacgtacggattcctccttaacattgggcgtaatactggcccccgtcgtaactgtgtctttgtccttggtaccaaaatccggatacagcttggccacttgacccaacggagtgcaaaggcgtcccgagaaatccaatcgtttgttggactggcttcgctctgctgaggatataatatctagcagggatctggggacaaatattgcgcgaattaaggactctatcaagaaatacatacatacgacatacctttgcccacaactagacatgcgacgcttgctcgccttgagaaggctattggagctgctgctgccactagcaccgacgctactgatgggctccagccgttcgggagagagtggggattccgtgtaggtgcgcaggagacttgctccaggttccgacttcagcggggcatcgccgtatgcggctcgcaaactctgtagg

SEQ ID NO: 41354 - DNA, 1190 bp, DROSOPHILA
atggcgaacaattttaacacgagaaaagtgatgcaggtagcggaggagggggcaccacctgttcacattcccataatggttggcaatgagattattgtgctcacccagcaggacattcgtcgtgtggaagacacgcgagtgataagctacagtcgtgtaggacccaacgggcagtttcttcccttggatacttcttcgccaggtgcggtttatttccccccgccaaacaccacgcacttctgcactttggatgatcttctccgcaatgcttctgacaaaagggtctgtatgcgaatggacatcgaagaggatgtgaaccctgcaaagtcgaccaatgatacatgtctttttctacaggaaacctcgaacccgctgaagacagttgcaagtgtgtctactcaattggtttggtcaaagaaaaagtcgggatctgaacaccgtttaccactttgctacgatgccggcacctcgacatccgggttgatgacaaacactggatgccagcactgccccaagtgcgagacgcagcactcgagctgtcaaactcaaatgtttgccaaaacgcagacaactgtggagcgcgagatgcctcggaatgcgagttgccaaacgaaggacaccgccaccccaactagaacttctattgtgaaggctccacagaatgtgggttgccaaactcagagctgtctcagtgaaaatacctatatgaagaacgagcccgctaactcgagatgccaggctcagcgcaacacaaactccaccgggtgcggtacatatagcgacctatttgaaacgacctcagcagagtcttacacatcagctgaatgtgattacacttcatcggtggaaagcacctgtcagcactgtaagtcacaaccgacctgcacggatcagacgttgatagtaccaatgcaacctcaagttcagtcgcccgtaccaccacaggagcagccttgcacatctagacatatccgctttgatctctgcacccaggttaataactttgaacctcatgtggaacctcatttctatagaacgataccgttgggccaaaatccctatccgcgagctcaagtctccaagccatcagtctccaaacatacgggttggacgaatctcaatcctgatcacgaaatacttcagcaggagctcagtcaaaacgcgtccataagtaaacatcagtaatgcta

SEQ ID NO: 41355 - protein, 394 aa, DROSOPHILA
MANNFNTRKVMQVAEEGAPPVHIPIMVGNEIIVLTQQDIRRVEDTRVISYSRVGPNGQFLPLDTSSPGAVYFPPPNTTHFCTLDDLLRNASDKRVCMRMDIEEDVNPAKSTNDTCLFLQETSNPLKTVASVSTQLVWSKKKSGSEHRLPLCYDAGTSTSGLMTNTGCQHCPKCETQHSSCQTQMFAKTQTTVEREMPRNASCQTKDTATPTRTSIVKAPQNVGCQTQSCLSENTYMKNEPANSRCQAQRNTNSTGCGTYSDLFETTSAESYTSAECDYTSSVESTCQHCKSQPTCTDQTLIVPMQPQVQSPVPPQEQPCTSRHIRFDLCTQVNNFEPHVEPHFYRTIPLGQNPYPRAQVSKPSVSKHTGWTNLNPDHEILQQELSQNASISKHQ

SEQ ID NO: 41356 - DNA, 2500 bp, DROSOPHILA
aactttattcattgtgtacataacacaaggtagttcctctgcttaaacataatccacggcagatcgattttaaataagcattttattactctgaattcatatttttttacacattcaatcaatttccccggatttttccatctcagataaatgttaacctgatatttagctcactcagcttatcgcgagcgatttccgcgtgtgccgtaaattgtaatcaaattgggcgaggagtcaatctgatttatgcatttcccatagccaatggctctgctctcttatgggcacaactaccccaacccagattttcctcgagagccaaaaggtaaacacatcagcagcgttcgaaaattaccgggccacccttttacacgcgtgcaaggagactctgcctcgcaaggacgtaatcagctctatttcgtaaatctcgacaagctgcttatctgaagcagtgcgagcggagtttcaaggatccgtatcctgattagcatctccagcccgtgttcgcaggcagaaatccggccttgggctgctgcgtatgtcagcctgacagccggacgtgctgtaccgccctaagtacagtaaagcccgacgcgtgcttctgtcacacttacgtcagtggcggcgcatggggaggtggaccagggatctccgcctgattggcatcggaaattgaagtgtttttattaatgctcatgtcgactttttgcactgccttcgatgacactgccaatgttttcatttttggccaagcggtgttcccccttattttagctgctttgtttctgttctgtgggcttaattgaaattcatcgttggcagatttcgatgccgagctgactgacagctgagtgcgtgaaaagattgacgcttattgaattgagtcatcagctgcggggtggtcccactcggagattgacacagcaactgttgcgtcaagtcgtgtggaaacagcggaagggattgccgtgcctgagcactccacaaagcagttgactttgaagtcaaataggcctcgtgtcgaaattccaacttctcggccaggccacactcaagccggagatgcctccgaaacccaagcatcgcgacgtagccggctttctcagccgggtgcgcaacttcctgctgggccgcacccacaagacggcccatcgcttcgcggacatggtctctccgcgcactcagccgcccccaaacatccctagtggtcctacccagagtctgttcgccaactactactacaccagggatcctcggcgcttggtgaagcccttcgtcgacgtggtgcaggagcacaagaagatgctcaccgccaaggtgaaggaggaggaagcagccaaaaaggctcaggccaagtctggagatgcgccgaaagatggtagccccattccacctgtcgggcccaagactactgatacaaatgaatgcgatgaaggcaattccggcgcgaagaagctcccgactccaggaaaggtgcattcttgggaggggccacattaacctgttcaataccctccttattcagaaactctttagtgttcattgcttattccatttcgaatgcactttgcaggcagtcgtaaaaatgtaaatctaattagacgtcaagggtgaaaatcattattgcacctgcatgaaaatttaattaagcacacacaattatcgaagttacaagctggaaaggcgcaaatcgaggtccaacgggtttgttacaggccacaacaataaatttgcatgcttaataacgtttaatgctatcaaaatttatatttacaatttaaaacgaggcaatttgcccgacgttgagtggattatgggccattgttaatgatgattgcaggtcgattgttaattgtctgggcatcacaatttatgctgatgactttcgcccatcgatttattgattgaagtttgattttggcgcacatcgcccactcctccccaaaggcgactgccatcattcaaacagaagcgaaaatgtaatcaagttttgtgtgttatgcaaaaaagtaatattctgtgcgctaagggtggcgcccctcgatttattggaattacccttataaagagaagacccagattgactggagggttgactgttctactgaaaagggtgtcaattgccagtaaaacttcaggctgtcaagtcaacatgttgccgggctgctcttcatccgccagcagttggcgaaatatgagatttgatacgaagagtggcagtggcggcacactgtaatgccgctttcttttagagctggtttttattgcctcatatgaatggcgaaacacggcctgatttaaccgtctaatttatccataaggttgttctagcaacggcagcagcttggagcctgcgtttccgcaatcggccatccgcactgggctggcaaaaatgaattctgctggacgcactcaaatatacaaatattaaaaaaaaacccgatgcccacaaagcaaacacttccgcacccttttaacccgcatccccgagatgtcaacc

SEQ ID NO: 41357 - DNA, 500 bp, DROSOPHILA
gaagtcaaataggcctcgtgtcgaaattccaacttctcggccaggccacactcaagccggagatgcctccgaaacccaagcatcgcgacgtagccggctttctcagccgggtgcgcaacttcctgctgggccgcacccacaagacggcccatcgcttcgcggacatggtctctccgcgcactcagccgcccccaaacatccctagtggtcctacccagagtctgttcgccaactactactacaccagggatcctcggcgcttggtgaagcccttcgtcgacgtggtgcaggagcacaagaagatgctcaccgccaaggtgaaggaggaggaagcagccaaaaaggctcaggccaagtctggagatgcgccgaaagatggtagccccattccacctgtcgggcccaagactactgatacaaatgaatgcgatgaaggcaattccggcgcgaagaagctcccgactccaggaaaggtgcattcttgggaggggccacattaa

SEQ ID NO: 41358 - protein, 145 aa, DROSOPHILA
MPPKPKHRDVAGFLSRVRNFLLGRTHKTAHRFADMVSPRTQPPPNIPSGPTQSLFANYYYTRDPRRLVKPFVDVVQEHKKMLTAKVKEEEAAKKAQAKSGDAPKDGSPIPPVGPKTTDTNECDEGNSGAKKLPTPGKVHSWEGPH

SEQ ID NO: 41359 - DNA, 4449 bp, DROSOPHILA
tacgcaagcaacgaagctatcagctgtaaatttgtatttattgtggcctatgcgacaaaacaagacgatcacatgattaatatatacctggcaacaaggcctcgtcaacaagtccaagccactttacgattcgcaaactgtagagcagtagagagatatcgtgctgaaatttcacaatgtcgagaatcgcactcccaaacggggcctgccggcaatctgatggtggaactttatgcccaggcacgtatttcgttttatagcgggtattctcgaaaatattcgtataagcaatcaaacttcagaattcaacccaatttgaaatgcctgaaatatttgtttagagcacgtataaaccgcttactcatctaattaagttactattaagccaaattttgaaattaaacataccttagctttattgacatatttcattaatcaatcgattcggatttgctaatgactttttcaatctgatatgtccgatctattcacttaaaaacgagtatcttcactttgttatatgtacgtaaccgctaaccactgaatatgggcaaatttgattttcagttaatatgaaacctaatgtcgaatcactaattgtttttattgtttaagaagaaaaattttaaaagctccctgaacattagggaatgttgtaatattttatgtactttccttgttgctttttctgtgtttaactataagttcacaaaaataaattatttgtttctctaaatttatgttttgtagaagtcataaatggctgtaacctcataaaagactgtaaaggccacaaatactgggcatagataagagttctagttctcttagcgtttactattttttgacccagtttagcaattgcatttaatgtcagaatttaatcgcttcagttttttaatatatattttgtttctactttcactattttttacacagtacaaatatataatacacataaatacatatacaattagtattctgctgagcagggtacaatctaggcgtccttcttggggtgggcttcaagcagtttttgggtcacctgccgcaagagctgcagctgctgttcatagttgtgaaccgtggccagctcctcagcgtggttgtggtgatgtggatgatcatggtcgtgctggtggccatgggtgtggcccgatgctgacctggtctcagtctcagtctcttggtggttgtgtgtgtgttccgacgtggagcaactgctgtggctgtggctatgaccatgtccgccaatggaagctgtaagcgataaggaaggttagtgacacgttatagggttgaacaatgtatgctgttaggaatgccaatccttatcgggtagaccctgtttcctcatggtgatttacacacttctctcttgattgcttaacatttttttcgtcatggtagcatgggaattcaattccaacagcccacttccacgcaatgatttatgagcgttttgtcctgccttatctggccctagaccatataaaaacctaaccgactttcgggtaatcacatatttgtggcctaaacttctcgtctgattttttatcccgtgctcatcaatacaattgcgagtgcggttttcacggtgctttttcgcatgggcaaccccctgatttttgcgagatgacttcatggcagggacgggatttttatttcacatttactctaggtacacagactgacaagccgtcttgtatatgagtatgcaaaataaatcacagcaaggtctgttacaaggtcaaccacgcagcatttagcagatcagctatatagaacctgttcccaatttccccgaatcgattccggttaaagaatctcatctgacgcacacggcgacgatcgtactaatcaccgttaagcctgcttattattaagtatcaccaattaaaggataaatgattaaagcaggagtccctaaggtctaatgtgtctaggcaattcatagatatcaatgtaagtaaactaacaaaacaatatttctggttaagtagcaaaatgtacactaatcatcatttgatgtaaatttgcgtaataaaaagcaatatataattaattgaaaactgccttaagtggcaagaccgagttgtattttacatcgcaaatttctgtctcactaaatccctacgatttgcatattcaaaggccacaacatgtaattattatttaaatgtgatacttactcaactgctgcaggccaaacatgacaaggaagccgacgaagagggccaaataggcgcgcagaccggatcgatttttcgagagtatctcaaagaacaccacgtatatgagcgtgccgcaggcgaatccttgcagaatggcggagaccagactgggtccggatgtctcttcgccgtgatttatcaaaatcccgattccgatgcccagagggctaaccaccgcaaaggtcaacacatagagaacggccagtaacatccgggtcctggccacgatcagctcgacgcccacgcagaaggccaggaccaatttgtgtgcggaaacggcaccgaacataaaccacaccgaactggcggagctctctaggccaatggccatgccctcaaagagttcgtgcagcgacagagcggaaacgatgaagagtccgcgcagagatgaagccaacatgtcccccgcatcggcatcgtctgcgattactggtagatggctatgtccatgtccatgcccgtggctgtgtccgtgtccattagcttgttgctgtggcttggtagcaaacttttgctgctccagatcgttttgcaggagattctgcaccgatagtgttccaagttcagcggtgccagccaatggcgccggtggggctgtgggtgtggtagcgttgccttcggtgggtttcagcaggtggctgtttcggatgctgtgaccccgctcgaaagcggcgccagcctcatccttctgatgatgatggacatacgtgtgcatggcctcctcgatgaagtacatgaggaagaagccacagcacatgagaagctcggccagcggaaaagtgagctctccgatgatgccgcactcctgcagctcttcgacgacctcctgaacttcgggcaagagatggagaaaggtggtggctagcaggacgccgcctccaaagtacagcaggcatttgaccacaatggcggatcgtgcgttcgtctggttttccgtccagcgatagcaacggttaagcaagaagggaatggacccgcagatcgcgctggcgcaaaatagcaccaccatggctgtgaccttggcaaccagaacgccactctcgtcgtcgtcgttgtcgtcgtcatgatcatgatcatggtcgttatcatcgagatcctccccgtcgtgacgtgatgtccaacggttggacggctcatcgatttgcaggaagcacttgaggaaattatttacttgcgtttgattcatgttgcttttgttttctgtttgttttgtttcgattttacttggtttgtttggttttccacagatctcccgaaccagctaaaagactgcgggctccggctctcctctctgaccacttgtggtcgaaaacaagcagctctcttggctaaaactgttattccagcaccagcagcatgtgtcgcgtttggaatctcaatcgactgggttgtgggttgggctcatctggttgggctgggtttctgcacttgcatgccgcttttcactttttcagtcacttttctttcacttcgtttgatttaagagcctgtccttattggtagtactgattgggttggattggtatttaggtaggtttctgttttttttctagatgcgcacaggtgttgagcgcttgaggcgacctcgcagactgacggaatcgggatttggtaattcacttgaatatcttgcgcgggctctacgctcccgtgctccaatgcttcaacgctctttccgattctcccactaacgaagaccagacatgagcagcaagttaagcaggtaagtagcaagaaaactgcttttaaagctcgctctcccactcgcgaacgttcacctgtgcgccgctgtttcatttggcaatagcgctaattgtcttgggctcagcataaatatatatatacacacatacacatattggcatctacagacaatgcacaaaggccagagtaattgagtaattgcatccgttcactttgggcagcattaaaaggcgcctgaccttagccaagatgtaggatcgcgacttttactttggcgctatttagatggccggaagcaaaagctctgctttgcggtctgggtttgcgtcctggctaattggtaggtagcatatgtaactaacggtttgcaatgtaagccttatttagggttgccacctctatagcagaaagagttttttccaacttgagtaaacggggcactgaaaatagcatttgtatcaactgtattaagatgtattgtagatagtaacataggtatttgtgaaattaa

SEQ ID NO: 41360 - DNA, 1517 bp, DROSOPHILA
aaacaaaacaaacagaaaacaaaagcaacatgaatcaaacgcaagtaaataatttcctcaagtgcttcctgcaaatcgatgagccgtccaaccgttggacatcacgtcacgacggggaggatctcgatgataacgaccatgatcatgatcatgacgacgacaacgacgacgacgagagtggcgttctggttgccaaggtcacagccatggtggtgctattttgcgccagcgcgatctgcgggtccattcccttcttgcttaaccgttgctatcgctggacggaaaaccagacgaacgcacgatccgccattgtggtcaaatgcctgctgtactttggaggcggcgtcctgctagccaccacctttctccatctcttgcccgaagttcaggaggtcgtcgaagagctgcaggagtgcggcatcatcggagagctcacttttccgctggccgagcttctcatgtgctgtggcttcttcctcatgtacttcatcgaggaggccatgcacacgtatgtccatcatcatcagaaggatgaggctggcgccgctttcgagcggggtcacagcatccgaaacagccacctgctgaaacccaccgaaggcaacgctaccacacccacagccccaccggcgccattggctggcaccgctgaacttggaacactatcggtgcagaatctcctgcaaaacgatctggagcagcaaaagtttgctaccaagccacagcaacaagctaatggacacggacacagccacgggcatggacatggacatagccatctaccagtaatcgcagacgatgccgatgcgggggacatgttggcttcatctctgcgcggactcttcatcgtttccgctctgtcgctgcacgaactctttgagggcatggccattggcctagagagctccgccagttcggtgtggtttatgttcggtgccgtttccgcacacaaattggtcctggccttctgcgtgggcgtcgagctgatcgtggccaggacccggatgttactggccgttctctatgtgttgacctttgcggtggttagccctctgggcatcggaatcgggattttgataaatcacggcgaagagacatccggacccagtctggtctccgccattctgcaaggattcgcctgcggcacgctcatatacgtggtgttctttgagatactctcgaaaaatcgatccggtctgcgcgcctatttggccctcttcgtcggcttccttgtcatgtttggcctgcagcagttgacttccattggcggacatggtcatagccacagccacagcagttgctccacgtcggaacacacacacaaccaccaagagactgagactgagaccaggtcagcatcgggccacacccatggccaccagcacgaccatgatcatccacatcaccacaaccacgctgaggagctggccacggttcacaactatgaacagcagctgcagctcttgcggcaggtgacccaaaaactgcttgaagcccaccccaagaaggacgcctag

SEQ ID NO: 41361 - protein, 495 aa, DROSOPHILA
MNQTQVNNFLKCFLQIDEPSNRWTSRHDGEDLDDNDHDHDHDDDNDDDESGVLVAKVTAMVVLFCASAICGSIPFLLNRCYRWTENQTNARSAIVVKCLLYFGGGVLLATTFLHLLPEVQEVVEELQECGIIGELTFPLAELLMCCGFFLMYFIEEAMHTYVHHHQKDEAGAAFERGHSIRNSHLLKPTEGNATTPTAPPAPLAGTAELGTLSVQNLLQNDLEQQKFATKPQQQANGHGHSHGHGHGHSHLPVIADDADAGDMLASSLRGLFIVSALSLHELFEGMAIGLESSASSVWFMFGAVSAHKLVLAFCVGVELIVARTRMLLAVLYVLTFAVVSPLGIGIGILINHGEETSGPSLVSAILQGFACGTLIYVVFFEILSKNRSGLRAYLALFVGFLVMFGLQQLTSIGGHGHSHSHSSCSTSEHTHNHQETETETRSASGHTHGHQHDHDHPHHHNHAEELATVHNYEQQLQLLRQVTQKLLEAHPKKDA

SEQ ID NO: 41362 - DNA, 3591 bp, DROSOPHILA
agtcaattgcattagacctccaagaacctgcataatattcgtattggatgtgtataaagtgttatcggttcactcacataaaatggcaactttggtaggaaggtcatggttaaggaggccaaggctgctccagccagaactccaatgaaccaactgcatttaaaaacttgcgtggccgtggtgtttaaggtctggttccaacccgcactgtgggcaaagtccatgccgccgtagacatacagaaagaacactgacaaaaggaagaaagtaacatcctttaattgcagaaacttcatttgcaatatccacctgcacaggcaacgttaatttgcttgttgatttgccgtacggatcctggattgctggtggatgaatttatttggatcgaaggctcccgagatggtatattcggtttgtatccttccgcgtagtccttggtgggcgaaggatccggaccagccgttacgtatgcgatagtcatgctttcttccttcctgtaacttttcggtatgatggcttttcttcgatccgctcaacttgatggacaagtgtgaacttattgagttctaaaaaccaattgtagtgccttacacattttctaagggattaaagtacggttttataagcttttaaatatagtcttatgccactttaaagtggttccgacagtaaaagtaaaacccaatgagggtcgataagaatgttgattttttatttgacaaactgctgaaactttccgccagaaacagtcgtaaataatcgaactaggatttctccattgaaatatttgtttctctatcgaaagcttctcgggttttttatgtttacaaaactacgaaaaaatatgtgtctgtgaatgctttatttcttattcgaattaaatgcttttgctataataactatcacagaaagacactttaaaaatatgtttacgaatcttattttattaacttaaattagtaagagagtaaataacaaatattagtctggagtcttagacctagtacatctgtacgtcgtaccacttctgaaaacggtggccagccttcctcagcgtcatcttctttgtctccggcatagacacggtaaagaagatcatgcccaccagcattataatgcctacggccaaaaaatactggaagaagaagtccttgttgggcacagagcttacacaggcaattaccacgatatggacgatctgctcaatgatgacaatcactccgaccaggaacgacttgacccgcatgggaaaagcctcgcccatgtatgcggatgagctgcacacgaagagacctgcgaatacctggaaggccaatgcgatattgcaggctgaggtcattaagttaaagctaattaagttggtcacgttggcatatagacccgccaatccgagcattagtccggccataacaaggaggcccaccaaggacaccgccttgcgacccaaagtgtccaggaatatcaaagccaccattactccaatcacacgaagaacgccaaataggtagattggccaaagactgagtcctttctccgctactgcggtgctcgagatgatcgacatggtcagcggcagagagaaggagaatgccacgaagcagcgaaagagtagcattttcaagaagggcatcaccgaggccaccagttcctcccccagggtccggttgtcgctctccgccacataccttctggcctccttcagagctgcactaacgccaccgggattatgtctcaaaagtttctcctgactctgctgcgccctgttctccatatttcgacgtagaaagaagattggcgactctaccaccagggcagtcatcgccaaaccaaacaatgagacgacgatccctatgatgccatggatctcgtttgggtttgagtcaattaatgaagtccactccgtagtaaaaatcacttgaaagaaaattccgagggctagaccgcactgctccattccgccgttgactcctcgtaagttgttagatgccacctcagcattgtgaatgaggaatggcaccgtaatgaggccaatccctaacccggccaaatagcgggccgccaggcaggcggaatagtctgcagccgtaaatataatggatccagttagttgcataagagcaccaaaaacctaaaaaatgttttaaggaaacgcatataaatatatatctatacatactgagaataacgcgtcttcaacttacatagtagaccagcttgggcagaaaagacatggtgagagtggtggccagcgctccaatgatgacacctacaaaccaacagtacgagtactccgtgaataggaggacgctgtagggttgactccagcccaagctggctgccatgtccatgccaccatagatgaataggaagaaaactggaaagagagtgtcgataaagacatgcacttctcgactatgtagtccaattttctcacctgtataggacgcataattctgtttattgatgcgggtaaagtatcctcggttattagtggtcacagccggttttctgggctcaggtggtggcgcggtggcgatgatgatggtttcctgtggggggctgggtactgggtccacagttgtggtttgcataccactcattcttacaaaatcgatatttttcgttcggtagctcgttcgttactggggacaactacaagtcaacaatcgtgcttaaatcggacaaaaggtggtccgaacttggcgatactgatatcttgctgataagtaaatgacattataatcagtttatagatactagtgtcttcaccgattttactcgattcgattcaattcaattgggcgtttggccttgaatatgattcatgatcagtgaaaatgggaacttttggagtggtcaacatggttgggtaaactaaaaatagttcttaaatatcattggactttattggtttttaagactttaacaataaaaaggtacttttgatatcatgttgactgataacaaatgtgcttcttttatttcccacgtgtgggaaatgccataaaaaagcgttgctatttttcgacagtaaatcactgatctatcctccgaaataaaattttccccagactttttccaaactttcccagacctggatgttgcgtgatgactccccagcgcctgtacatcgttttcattatgtttggcataataattccagagagcaagacagcgacaaactcatcaggcttaaaataattatcgtaatcataatcatcccagtggcggccacactcgagtgtttgcttgagttgtctcaaattgcgtaatgtctgcactgacattgccatttccatccacacccaacttcagtctggccagcccagcatctttgcgactcaatctatcttgttgcgcctcaagctgtcaaattgcgccacatgtccacggattcgagtggtggcgcatcggggagacagactgttgccttttccctgtcatttgacgctgctcgacaaattagccaaacgcctcgccaaggcatcccagcttcagatccaggcacatcagcattcccatctccatttcgtttcgagggattcaagtacattttaatgagtttatgcacaaagttgtctaatggcgtaa

SEQ ID NO: 41363 - DNA, 1458 bp, DROSOPHILA
atgcaaaccacaactgtggacccagtacccagccccccacaggaaaccatcatcatcgccaccgcgccaccacctgagcccagaaaaccggctgtgaccactaataaccgaggatactttacccgcatcaataaacagaattatgcgtcctatacagttttcttcctattcatctatggtggcatggacatggcagccagcttgggctggagtcaaccctacagcgtcctcctattcacggagtactcgtactgttggtttgtaggtgtcatcattggagcgctggccaccactctcaccatgtcttttctgcccaagctggtctactatgtttttggtgctcttatgcaactaactggatccattatatttacggctgcagactattccgcctgcctggcggcccgctatttggccgggttagggattggcctcattacggtgccattcctcattcacaatgctgaggtggcatctaacaacttacgaggagtcaacggcggaatggagcagtgcggtctagccctcggaattttctttcaagtgatttttactacggagtggacttcattaattgactcaaacccaaacgagatccatggcatcatagggatcgtcgtctcattgtttggtttggcgatgactgccctggtggtagagtcgccaatcttctttctacgtcgaaatatggagaacagggcgcagcagagtcaggagaaacttttgagacataatcccggtggcgttagtgcagctctgaaggaggccagaaggtatgtggcggagagcgacaaccggaccctgggggaggaactggtggcctcggtgatgcccttcttgaaaatgctactctttcgctgcttcgtggcattctccttctctctgccgctgaccatgtcgatcatctcgagcaccgcagtagcggagaaaggactcagtctttggccaatctacctatttggcgttcttcgtgtgattggagtaatggtggctttgatattcctggacactttgggtcgcaaggcggtgtccttggtgggcctccttgttatggccggactaatgctcggattggcgggtctatatgccaacgtgaccaacttaattagctttaacttaatgacctcagcctgcaatatcgcattggccttccaggtattcgcaggtctcttcgtgtgcagctcatccgcatacatgggcgaggcttttcccatgcgggtcaagtcgttcctggtcggagtgattgtcatcattgagcagatcgtccatatcgtggtaattgcctgtgtaagctctgtgcccaacaaggacttcttcttccagtattttttggccgtaggcattataatgctggtgggcatgatcttctttaccgtgtctatgccggagacaaagaagatgacgctgaggaaggctggccaccgttttcagaagtggtacgacgtacagatgtactag

SEQ ID NO: 41364 - protein, 485 aa, DROSOPHILA
MQTTTVDPVPSPPQETIIIATAPPPEPRKPAVTTNNRGYFTRINKQNYASYTVFFLFIYGGMDMAASLGWSQPYSVLLFTEYSYCWFVGVIIGALATTLTMSFLPKLVYYVFGALMQLTGSIIFTAADYSACLAARYLAGLGIGLITVPFLIHNAEVASNNLRGVNGGMEQCGLALGIFFQVIFTTEWTSLIDSNPNEIHGIIGIVVSLFGLAMTALVVESPIFFLRRNMENRAQQSQEKLLRHNPGGVSAALKEARRYVAESDNRTLGEELVASVMPFLKMLLFRCFVAFSFSLPLTMSIISSTAVAEKGLSLWPIYLFGVLRVIGVMVALIFLDTLGRKAVSLVGLLVMAGLMLGLAGLYANVTNLISFNLMTSACNIALAFQVFAGLFVCSSSAYMGEAFPMRVKSFLVGVIVIIEQIVHIVVIACVSSVPNKDFFFQYFLAVGIIMLVGMIFFTVSMPETKKMTLRKAGHRFQKWYDVQMY

SEQ ID NO: 41365 - DNA, 31193 bp, DROSOPHILA
ttatatggtatttgtattcggcaaacaagtataccctgcaggatccgaagacaaaaccaattagccaaatatcttaccaccaagcaaaatcatttttattctctgcaaattaaatttctttaaatgggaagtccattaatcgaatggtaatttgtatatatttttcgagaatatttggttcggcacggaagcataattatattaactatttttttcttttgcgtgcacaacatagacttccatattttcgctttttatttttcccctagcgaaaatttaggatttctctgaaactattaatttttaggctcccaaacaaaagtcaatcgaaaaagaatgctagaaaatggcaaaaggtggtatacgagttccatgtacagtgcattgaattcaatatacgacctttaatgcctgactatttatctgacgatggtacacgtataacggctaaggtgttttcatatggcttcatacatacatatattaagttgatagttttaaaaaattatgtttattttcgctttcttttctttcattataatttacaagtttgttggttgcgtataaatatgttcttccttctctcattaaatgatgctgcactagttttgtttgttgtctcttttaatatgtatataatatataaatatgctttaagtggtgtttgtgtgtttaagtttccttcagttaagagcaatagggttctgaggggtattgatagtggtagtgattttggggagctttcattccgactcccttcacaagacaccaacgggaggagctgccctggctgtgagtgattctggcttgagtcgccgtgtcgtttctagtcgttttgaattacgtttgaattttcttttcttttttatttataatagcattaattaataatataattaataattataataatttatataataaacgcaaaattggtaaataataaaaataataataaaatacaatcattacaataattaatcaaaattggtttcattttgtttgtttttactgttttttagtgtatttaatgtgtacggggttcatttgttttgtttttgttttgttgggtttcgtttaatattttttttgttgctttctgcattttgcatctggctttatatttatataaattacaacggaagtgtcggtgtgtttgtagttggtgttggcgtcaacatcgacgcggatggaggataacgcaacgtatgctgcgacgttgcctgctggatataatcctgactcggattattcaatacgctatcccgtgagtttgaatgtgaagtggcacgcagcagggtgactgcctcgcgttctggactacattgtacaccgtctagtcatttttggcgcgtcgatttcttcttctttcgtttaaagaaacaacaacatctggaatataaggaaccactggagacagttaaccaagggacagaaacgatacggattcggattcggatacggattcatagggggagacgtaggcataggcagaggcagtggattggtcgggggagaaagagaaagagagaacggaaaacggaagttgcgcattaaaaacgacaaagcaaaaaattctttaaatatctagtggatctgttaatcaatgtatcgatatatctattaagactgcttacgacataatctaaaacaaataacacatccacaaaagaaatgctatgaatttttttaaatttacatgtaatacgctacaatcatgtctctaaaattccctgttcttttataaagaagtttattttgtacaatgttttctctacacaaaagacaatttgttccgcaacacatctatcacttagctacatatcgatataccgattaattgatcccctgagtaacacatactttgtttcatcgaccacttcgacttccggctgctgtgtgatgggcgtgtttgagtgtccggccgtgggatcgtccggatttagttcgccattcgtcgaactcacaacctgcaaaggagtgtcaaagaaaaaagaaaaggcattgcaattgtaatattaatttccattcgttattaacttttgtactaaacatatagtacgagtatgtacaataagaagtgattatacaatataacgatttaaaccgcttttttaattactaatcaaaaaagaaccagtttaagtacagtcgatttaaaagtatcgattggattggcagtacagacatcacacagaacaaaactgttatacaaacaacgactttcttggcagcactacaaagccaagtagactacgaatgaaaaatttgtaattttgaaatttcaatagaaagaatttataaatatgtagacctatttcggagattgcccggattgtcaggacgtttggcagatcacacatttagatgatgaatgggtacagaacaagatcagaggactaggacagacaagttatatttcaaataccttggaaagcctattttaaaggaaagtaaacagggtttgtcttatgtcttatgtcgtttaaatttaaaaagaagctgtagatgtggtatttgggagaatagtagaagtgttggtggttcgttggtgtcctatttcttagggtcgtcttcgggatcgcttttctcatagtaagcatcaaaggggctatcatcatccgagcttgaatcttcaggcaatctctgtaataagttgggttttggtttcgaatttgattcgatgcatcaaaattggtcttttcggcttgaaataaatgccaatgatttcactttatgaaaaatgaatttcctccagccgaatctatttattgttataacactgcggatatgtaaagtgatccatgcgtctctagaatagtgtaatgtattgtgtggcatgcagtcaataacatatactgctaagaagttgtgttggttaatgcactgttaaaacttgcattagtaccgtgcacaagtagagaaaggctacgtttcttctttgttattcatgcagattttataaggatcctctagcatcaatcttttcaataaaaggaatacttaatacttcaaaaataaaagaggaagatccgagaaaaacacccaagaagaaactaacaaaacgtgttggaaaaaccaaatcaaacgtaacgcaagtgaaataaactatagtggagaggagtaggaataacacacgttgggaggagagattattgttcagtaccttgttgagctaatgtagagtaaatcaagtgaaaacattagaattgaaaaggccaaaaatataacagtctgcgatagataatgtttcgttgtaatagttatagaaaatatatttaggcaattatgtacagaatcacagtcgaacaagaattcaataacgtaatgaggcgaatacaaatgtcttttatttatatgtatgctatgtcttgccaaggagctgaagtttgctaagtttagattatgtatgcacaaatacagactgaagactgagcgggcgaacgagcgacataacagaaataaaacggaaacggaagaaaagaaaaatcttttgtacaacactggccggttgtcgcaacttacctgtactgaaccatgccgatcggccggcgttagattgcccagtgttgcccccggctttggcacatcaggccacgcagcaacacctcctttggcatttgtctgtggttgggttatggtggtggtggttgaagtggtggtgaaggatttggacagttggttttgattatttttgttttaattcggtacagttcagttcggtttgcgatcaggcaattggtggaaacggatttatgcaatttgttcaataattaatttcaagtttaaaaaaaagttgttatttctgtacaacatagagacagacagctctaatattatatgctatttataatttagggattgtaagtgagtctaagtaaaactaaagcaagtcaagaatgtgctacaaaaaaaaccataaaaaatgtagtccatacaacaatcaaaggtgaattcaaatatagtaaacaagggttaagttaacagcaaagatttaaccaaaatatatttaattaatttacaaataccgttcaccgatcgattgaagcattttttaaactaggttagtcgagcatttaccatcagcttttcaatattctatatatttcaagcagacatttttaagtcttctttttcaaaatactagccttgtatattcgcacatttctcactaagaaaatgacaatgaaacccaaagcatttataaacctagcaatgtaatctacaaccagacgtatgtatgcttaaaagaagtagaagagcactttaattcacactaaccattacagagataattttcaagtctacaacgtctaacctggagtattatatattcttcattctcatcatcaacatcgtcatcaaaatcaaaataagaaacatcctaagttttatatcaaatgttgtgtgttgggaagaaaagtaggatcaaaacaaaagcgttgagcataagtagagaaagaagagcagtgaataacgaatgttaaaagtaaagaactgagtaaccaaagagaaaaaagttcggtaaagctaagtagaatcaaggataactgtttttatcttataaacatataaaataatcaatttaaattttgtctgtgatcgagtgtacaaatttgattccttttcggactactttagaaaaatgttattatatacattaccttagccgtaacattatgacgatctttatttggtgaaatgatgacttcatggccagtttgcagagatccgacgggcgttgactgttttatgtcagtgatgtgaatgcatgtattaaatttgataacatgtttatatatagatgattcagtaggttttattagcacacagagttacacgcacatgaaacggtggtgacaaccgaaaaagagaaaagagatcaaggagagaagaaaagtgctgttataaatggcttcacttttttgtacttaacatatgatagcttaaccacctaaagcgacgagcttacacactgacaacaagcattgaccagcactgaaagtgatctagcgtcatacgtaacgatgcagtactgatttagctatagaattcaaagatatatttcgccatttgggtttcttttttgtaccttgtcagacttatttttggccaaatgcgatggtggtgcattctttatgaccttcatttggtccagctgttccttggtcttaaaatcgaaacatgaaagggctttaataccaataccactaaattttggggaaacacttttaaatattaaaacatcatttttcggagttgagtatgggtctttactgtttatattgcgctttaatttaagattctctcttggatgtgggtaagggcactttataaaaatatatatatcattcaattcgttgaaggcggtaaagataacacatgtcgttgggaacaggaatcaaactaagaacaaactgagcccaatcttctttgcagcagcggcgggtggcggaaaactgatagcgcgacagcaaggatcctgccatgttagtagtttgttacattgacgtcatacaaaccgacgattccatgcggctttcattcatatttgggtgaattaaaatcattcttagtgggtttggaggacaatgcggttggcggttggctcagtcaatatcaaatatcatgcttgattcttccatcatttgaaatgattgttcagttacatgagtattaacttaaaatatttttagatttcggaacgttatggatatcaatttatatatttctaattgcttgcaattcactatgtctcctatgaattagatattaggggtcaggttttagaattcggtggaatgttttttgggagtcttaatgcgtaagaacgtgtaattttaatggggtagacgaatatatagctcaccattgtcttccctgtccagtcgaactcgccctcgtcggtgtatcccttacgatcgaataagtcttgaaacagtcttcgcagaaaatcatagtcgggagtttcgaaaaaatctaaccgccgtacataacgcaaatatgtcgcaaactcttccggatgtccatcacaaagcacctgcgtgttagaaataagacgttagttcaatgtttaatgagattaaaggaatttgtggggtatatttcacctcgatgggcgttgctcgtttcgtatcaccgattttttgatatctctccttgagtgtatcagcctttaggccttgccacggcagtgaaccccttaagaaatacataaacatatgccccaatgcctccagatcatcgcgtcgcgactgctcacgccccatgtgcgtgttgattgacatataacgtgccgttccagttagggatttatgctcccgatatggtatatgcctatttgtatctaaatcaatgtattctttggccaaaccgaaatctgttgataatattatgttagaacttgcaatacgcttaacatttcattaaggatcttaccaattatatgtataattttttcacgttttgttgacgttctgccaatgagaaagttctctggtttcacatccctatatattaagtgccgactatgaacatattcgatccggtggagctatatttttatatttggacgggttttttgggaatattaaaagaaaaattagttaattatttaaattttaaaaagagcattgtataggcatttttgcttatgaaatgctctttttcgcttttaatttacaaaataataatctatttaaacagttttctgtagtgtctcaactagctgtttatgttttcaactgtaaatttgttctctttgatggcaacggtttttattattaatcgctggtaaatcataaatataaaaaactcagaaatatctatattgagctacaaattgatgtgtgcatgcaaatttattttaattacaatgaacgtttgtttcttcctgtttagataatttttttattttaaaatataatttttttttttgctaaggaagtatttttagtgaatgatgcctcgtaatgaatgcaaaataagttgttacaaataaaacctcaaccaggtggctatgattatgacagaaatagtgagtcgaagagagtcaaaatagggaggcagcgacctattggtatcttgttagtaatgaacaataaataaatagtaaataaaagagtttaaagtataagctagtaaaaacaagcaaatctaataaaaacgcatatacacaccccaacccacacacacgcaaaacaaacaaaaggtgtttcgatcttgatcttagtactagtgttggttaatttggacctcggctaccagtgttgtaaatgtgattatgtgcagaattatgcgcgtgctcaaggaaaactttgcgattgcaacatctgttgttttatgcttcgttgtttaactttgtttttggtggatttttttgtggtagtacttactaattgtatagctatcagaagtacgctcttcaaagtgaaacgtctgccgcaaatatcgaataaatcttcaagtgatggaccaagcaactccataacaagagcattgtatttgccgcatgggccgaagtaatatacttctggtacaccctctgctatcgattgatcgatcgattaattgattgattggtcgattttattgttgattgttcggttgggtcgacatagaattttgtttggaggaagcgagcgagtgtttattatttattcgagtgttggacaacgcacaaaagttttttggttgatcgatttgtagtttgttgttgtttttgttgtatttttgcaaacaattcgtgggcaagagataaaaaagagagatgggagagagaagaaaaaaagatgagatacaaactagattttttttaaataagtccttgttcttttaagctgcatttcaattgatatgacggtttgggcacaaaaaaagtaaagaaacagagtgggaaagtgatgtgtagagagcgatggatttggctcatgttctggaggttagtgtagcgcgtcttacgatattaccacctttcatttgacagagatcgagcgaaggtataaatactttttcgggcaactgtgctaaacacaacaagaacaacaaaaatagaaattctcgaagcatatacacaaggaaatgactgccggaagaccaacctggagacgggaactcacctaccaactcatcctcctcctccgaacgttatttgacctaaccagtagaaacgtcaactcggatataacagagttttgtgtgtgcttacaaaataatcttagaactaaaatagtttccatggcggtgtgtgtggtgtgtataacaggttttggtattctctgaattctgataaacagttcgatagatctttttgcaactgtgttagtagttttggttaaattatatacattgcactttaatgtcaaagagaaaagagagactacaaaaggcagttttgataaatgataaattaagtaaaaaaaaacgtattaacaagttcaacaacgaaattgttatactaatgacttaatttcttgggtttatgtacaattagtttgtgtttgattaaattattaatttttaaacgacgcattacatgctttaaagggattgctttttagtgttataagttcattgcagatccgttaaacgatattgaaagttgcaacataaaagtattattacctttactacagtttcaacatatctacagtaaactaaaaagttgactaacgttcattgcatagactctaaaacgtactaaattaagaaaacaaaaataaaacctatatattagccgttgagacacttttgaacccaaactaaaaaaaaaattggttcatggacgagatgctggcggatttcacaagatatgactgttatacaggacacttcaaaatttaatatttaatttaatttcctggaaaagagttttatgagggaggcagaaacgtaaattgcgttcttttaaaaatctagcatttcacaacttttctggaatagcaaatggttttccccacgcaatattattacaattttttttttaatcaagtgaaacccgctttactttcgtctacaacacctttttggtgatcttttcgttcgtggtggatgccacacttacaagttgtttcgctatcatcaatacagtcttaagtgaaaatttacgggcgcaaatattgaagagatcttctaatgataatcccaataactctaaaaccatggcattgtaacggccaccgcaagtgcccaaatgataaatgcgtggtatgccatctggggcgttatcggctgcatttcgatattgattccgatgtcgcatttatttgtatttcgttcaggatcagaaaaaatcccattccaattccaatttggggtccgatttagtggtggggatggtggtgaggggttggttcatagcattatattatagcaacatggcatcacaatgtaatatgcaacagttgattgttgttggttggttgtaggttggttcaattcagttcataatcgagttggttgtaatgttgtggtagattgcagcagacacggggagaaatatatagatagatagagagcagcgcatgatgattcggattcgggtttaaattttaatttagcggtgttttttgttcaataattcatagtaaatatttggggtatttggtgttgtagtagttgatgaataatggagtaacagagagcaagatatttaaataaacaacaaataagattaagcaacagaaaacagaggaatttagaacaaaaacaattaatgcaagttgggcaattgttgagaaatctatatatatatatatatttatatatatatactaggataaatgtatgtatgtataaagatttaattgattttcgagctgttttacattggcggttttaatagtagttgcagttgtagcctgagctgttttactactgaagtacaatagacaagggacgtggtgtttttacagttttcgtttttaataattttttaatttttcacttcacgcaccgaccgacctccgaaaatatgcttgagaaaatctattcatgtttttcttttcgtcgtattctttcttcgcagtgcgtttaccactactagcgaggtaccagaagtgttttacaaaaattataaatatattcgtttacatatgaatctaataaaatggtggtaacggtgcaaaactttactttcagtaattagtttgttagtaaaatatacggggagggggggggtaataaaatgtgactaggaaaacaaagaccggcttcgataatcatgtacaattcgtacgtcttcagagcaatttgaattttattccctatagaggtctttggaaatttgttgttagttcattatttagtgttaagtgggacgacagctttgggaaacgttatggatcgtagaacagacgagttgtaaagcgatagattacataccatgtgatcctaatagtttataaaacctatactctaagtgtagttgcggagcctttgacttcataggctccatttttattgctacatgttcattgttgtaaaggtttttgcctgaaataaaagaaaaattagcattatttatattttctgaagtaagttaaataaataaataaaacaacattcatttcaaatcttcaaatgccaaataggaaaagagacttgtacgcacatgtggctttacatgcgtaagactatcgccaagcacatgcattcaacgcgtttacctgccccaccgttatcagtagtgccacgcccattgcgccctccgacaccaccaccaaagcaacacattcgccgacctagccaaatgggggaaaaataatagtaagaaatacatgcaatattacagcagtccccttgttctcaatcccaacttctatattcaggtgatttattttaaaactatgaccaatttgtactttattaaattgtttactattcaaaaataatgtgttgtttttttttatgtttggctaagaacctttccaaaatatacgaattatagtgtgaaattaaaacaaatcgtccggaaatggatttgagaacaaggtcgtatataattcgagaattgcattttagataccacgacatgacggagcctcagacagaagctgagagaaaatgtcaacaacgaacagtgcgctcatgtgcgaaattatgtcatgagaaagtcggtgagagagcccgccaagaatgtgtgggtggcttgggtttggcttttatgagtttgctgggtgagtggatgggtgggacagacgttgcttatcaacagacacaacattgaaacgctgatgatagagtcggtcgtcgcacacacatatgaacgcataatacatagtagatacaacaaaatcggcgataggaagccgcatgatttcgattacatgatagaaagtaccgccagcaatgccctttttatccatccattcgcccgcctgcccgcctggccccctagaaatgttttgtttgctgaattcttagaacactcaccactatgcgagctaaggagtcaaaaatgcaaaatttacaatttcttggtctggaattttttgtctacgcagacaaaagaatgatttctggtcgatctaaaacaattttaaatttcttttgaaagtgtgcacagcaaatagcaaactttaaatttcaagtctattttatttggaagatattgtaaattactttaaataagtcaggtctattgaaagtcgtaatcattggatacaagtgtgtatccaaaaatctaaaactcatagacccaagtatacgagtattatccacaaataccgtgacctaacgcaatacacaatatttatcattgaacaactgcaaaaaattgaaaacaaacttccgagattcgttgaaataaacaataaaatagctcacagaagctaaaacaatgagagagaaaaaaaaaaattttataaagggcgtgctacgctaaacaaaaataaagcgaaagttcccaaattaaatgagaaacgcccacgcaaggcgcctataaaaatgagcaaagaaaatgggcggaaaagaatttaggttggtcgacgttctggtttcccaaatgcttttacattcatacttattctttgggtttgaaatgggcaaataacaaaaaaatcaaaacaaaattatgtcattcggaccgcatattgcaagaaaatgcccaaaatgtaaatttccttttatttaaacgtcagcactaaactaatttaacaacaaaagaaattagacaagcaaacacacactttgcaaaggttatttatagaccacaaataataaaaatgatatcataagcgaaacgaaatgggctgtgcaacgtcatagaaacgtatttaattttaattgaacataagcaaccaatacatttaaaactgtgcgattatcataatttgaaaaggcaataaaattagccaattaaatacagcttttaagtgattatctttgctttttgtcaccgcttcggcctaatgagtcatacaataaccccacaaaacaaatgcaacaaagtctcgagatgctgaggtggaaacaaagaaagagcatggctcagaccgacggaaagagacagaatgaatggctgagaaagagacctcgtgataattacagtttgagcggcatagcccactacaaccgactaagaattggctagactttatagtactacctgttggcaatgtgacaacaaatgcacaaaaggaagtggaaggccccaaaaaaataaacaacggccgaaggggcggggtcggtatgaaacaactttataaaagcgcatttagcaaacaaagccaaaatgacgacaacgacgacgatgccaagaaaacagatggcggaatggaatggcgttttgtgttgtattgtgcactcttcgccgccggtgaaaaggagcggggaaccactgttcccattgtggttaacagacttggaaaggaatgcccgtcgaaaggaagtggccaacaaaaaaaaaaaaggtgcaaaaaaaataaaacaccgaaggtcccaaacgcgacattatttgcatgccaacaggcaaaaattcggggagagaatgggtcaatggggtggcggacggtacgcagtatgggactttgaatcgtaaaaaaaatttcgaattatttaagcggaagtcttttctcaaacgtagtgcgttctggatcctctgttatttaaaataaaatgtttcaatactccttccaaactttccaatgaaagttggtgaaacgtaaaatacaattagcatatcatcttttaaactttttcgtaacaccactttattttattataagtcgtcttggtatatagcatatatagcgtcttggtatatatcacaccacccaatatcatgtgctcagaaaaccaaatgaaaacgttcatacaagtgttagcagaataaaataatgattgattattagtgactgtgtaatttatttagacttacctaaacgcaattcgccaaaattaccacagccaatttttttaccgacacgaaaatttggtccgaccataagtacaccggtcgtggtgcttacagattggcgggtggaatacatgttattgcttgagcttttaccaccggctagggctgtggtggcatttgccacattaccagcggatggaccggcagttgtcgtttgtgggccaccgccactgcaaggaaagagaacggaaatcgattagtaacaagtttattgcaataaaaataaacattttacagcgatgcagactcggcgcaacagccacctgatgttggctttaagggtcttttagcactatattcttaaagtcgggcacaaattgagtactagtgtgcccaacaataacgacgagaaattcgtacttaattcgctatattctttggtacagtatggttattgattgcttagagctacgatattaatacatacttttcctccttgatgtttgttttttgtatgtataaatatttgcgcaacatttaattttgaacgaccaaaaaaccccgggtagacaggatctaaactattgacacacggaaatcaaggtagtaaagttcaaaaacctgcccgaccgaaacagatattgtgttattgttataggtgggcgttactatcgactcataaataagtttttattcttgtcccagtaagaaaaaaagaacccaggacaatgacacagaaactttttgcattttcaagtggccctgcacaggcaacaaaaatcgatttgaatcgacttgtgtaggccaggtgagtttctgtttacctaaacgcttgaaagagggaatagagacctagctgctggttatggccacatgtccaggagagctcgctcaggcgtaaccactcatgggcagagcagggcagttggggcagagaattcgaatcgactccagtcgagtcgagtggattgtagtggagtgactcatggccaccagacaagggaaatatgtttgattaagacaaaaggttttgctttgttgcagctcgggtgggtgtggcctgtgtaagatctcatattttcccatgcctttcattgttgcaaaatttagttcaaagtcgtcggtttaatcggtacgtaaactagtcagcagttgcttaattaagttaaaggtagcacgtgggcttctgtaaatacgggtctcgtttaccaaagaatgtaaaccaaatgagtcacccgaaaatgaagccaatgtgacaaaaaaataaaagcaaataaaattaggaaaaattaggtgctatcacaattcttcatgatttttaagatgcaaaatctcaaaaaaaaaaaatgggcatttgcgaattaataaaactttatttgcttaaaatacatagttacgaaaattaaaaaaaaaaacaccaattactaatcgcgccactggatcatcaaagtaaatagaagactatttttatttcaagttacaacgtctgattggccggcatttaagttaatgacgctgatcacatacaataccgaatagcacacggccgtattaaattggttaactggtggaaaggaaagcctgaatcttggttaccgttccgcccaagacgattaacaggaaataattaggtattcccactcgttttgcggtcgggttcacccccccccccctctctctttttcctaaccattgccttaatttctactttcatctaatatcagtctgcccgcccgtttgtcttcgattgcttgccagctgcgaacgggagtcggaaaatgttatctacccactagtttttttttcgccaacgacaaacgagaaggcaaaacagcatacacacaaatgatagttgtaccgttactcggggctgtaaaaaaaatcacaaaaactaaaaaccgccgataacaattaaagagtatattgctgtgggcaaaaagcaaagacgattgagcagtcgacgaaatgaatcagaaacaagttcaagttctactccgattacaagttccttcggaatcccccgccatcaactcataactagataacagaacctctttaaatgctgttaaatgcacaccacaaaaatcgttcaccaaacggttgtttcacttggtcaagttaaagaaaagatactttaataaatcgacgagaagaatgcttatgttaataaagattttaattataaacatccagtagtttttcatgttacattttccctgtaaaatcaaaacaaaacgtacctcgtccatcaatacctaattggtctggtatttctagttggttggctttcttagggtatttcattgcctcggcaagtcttatttttcatgcttttcttgttattgctttgactgtattatggcttaatatcctgggggtaaaactggttcatacacacaccagtatctgtgtttctctgtgtacatatggacgggaattaacgtataaatgcctgaatgtccaccgatcgatctccgtttgactctacttcttcggtgtttctggctccccagttaaacccatttgtatttggttggactccgcgtactgttttttttttttttttcaattttgtttttattaccttttggtgtcggtttggtttcttagctttctacgccttttgcttctggcctggtatgaaaacgggttcgcattttgtcgctcccggttgttcttaaagatagcctgttttttcatgaatcacaatgtaacaaaggctctttgctgtatattgcacctggggttttacacgaggttaccgaatttccatgggttaaaaaaaagtaagcacagctctgtaagcactcgactattgaaattatgtattcaggtttaaaattaatccaagactgtaaaatgtagttttacggcatatcagttattagaattggtcaaattatctgagtttttaaagactccaaagaaaacggtttgaaaaaatttattttcattaatgaaagttgggagcgaaaatttgcatttctttgtaagaaaacagtgtgacataacattcccatcaacaaattaacacttgttgcaaaaccagatgggtttcctgagtaataaaatgacaataagcccgtttttaagaaaaatggttgagaaaataaataaataaaaaaagatcacacatgttcttaatattctatattttgtttgttgcgtttgaaagcagggaaaaccaaatcgataattaaaaataaaccaagcgctataaataaaattatgcacaaggtgggttgaccaaactcactcatcaacaccaccacacagaaagggatgtgtgtgtgcaagacaattttatctgtagctgtgtgtagctcataaataaatcaagtgtaaattgaacacaaatccgaatataagaagaaagggcgaggaaaggagagaattagaccagaggaaagcgaataggaacaacagagaacttgcgctgatgacggcaatagtaaaaaccgcaaaaagcggaaaatcccaattagaatccacaacattagtaacaacaatcagaacacagaaaaaaagtgggagcaattaatttgtatgttctataagtttaattttaatttttgaattttaaaatatcaaaatatttaaacaacgtttttttttagctcgaaaagttaactaacataatgtaatgtattcaaaataggtttgcctttgttgctgtgtatccctgccagaaacagcaaggtgaaaccgcaaaagaattttgcctaattggaatattgattggaaaaaaaggtgacacagtgatttctaaactgtgactaactcaaataattgcaaatttaattaaagcccagaaaacacacttatacaggaagccccataaggcccataggtgttcactaaaaatgagggaaattacataagcaatcaaagaaaacaaacggtgcttaaaataaacaatgataaggaaaatcgagtgataagtgcgtgtgtctatacttgttacttgtgtgtttgttgggtgacttatcagctggagatttgtgagtcgcttgtatgtatttcacttttttcctcttgaagtgcattacaatatatttgttgctataatttctatttataaaaacaaacaatttcattacatttccagcacgagcaattgaattccaattatgcaaatcaattgaaaggctaacatacaaacatctgaaacggatatgcccctttgaatattttatttatatttagatacaaattagggtttcaacgttgtttgatttatatttcagtttttggagatcggttttaaaaaaaatagcatctaattttttattggccagtggccaatttaactgctttcatcggaaacatttatcaaataatatttgaagtgtacattaattgccgatgtggataagtcagctcaattgacaatatggtacaaagcgattcagcttgttgttattaatgtgatttttgttgttggcaatcaagtcgtaattgaattgatattacgcccagcataacgacatagcgtaacatgtcaatatccattttcattggcatttgacgctttgaaaggcaaagtggcagtgtgaagcacaacaaatacatacaactaaaactaaatacaatggctgcattcgcatatattcacgaagcataaatgagcgcacagtggcgctttcttcttctgggtctcccctctgcctttctcttcatgcatcacaccaaatgacctatcacactgataagcaaagagagcgcgagagccttgcacacacacacacacatagcaaaaccactcgagagccccaaacacatacacaccaaagttggctagataagcgcgccttgattagcagcgacgtcagacaatagcgagtcgaaatgaacgagtgacaagtgtgtaaaaggagagtgggaagtaggcgctgcacatcttaaaatgggaggtcagcccaaatggggaggcaggaaaaactggaaggagatggaaatagtgacggataaagagagatgcaggcgccactgcaccttgcacagtgggcggcatacggaattaattaattctttaagtcatagctctgtgtctttgatgggcataaccaattatctgtctatgacaatagttatagttactaacgtttaccaacacttaagttgttggattcgattagttgcgggagcagagtagatgtagctaggactcttcgtccgtccccttccgtccggccgtttctaagcaaactagtatactactatctgcatcgaacttcttgaagtctttattttataagtcagaacggggcggaacgttgttttgatcataaagtgtttttgttgtttttattgttttaaatatataattactgcaagggtatacaagcttcggcgaaataagaattcttgttttattatttatttgccaatgtaccccccatgcggcgttcaatttagggctgggctagcacgtcacccatcccacttccacatccaaagcagagacaacaattccattgacgacgtagtctatcaacgccacagcctctaactgaaattgcacaatgatgtccgttacgtttgtgtgtatgtgagtggatgtgtgtatgtatttatgggggcgcctcaatggccgattgacctttgcatgttagattaacattgaatatgaaatcgaatacaccacaccacctccccctcccaccatccagcagtcacatatcctggttgtggggcatctgcaccgtgtatcggtgtgtgagcttctgtggcgaatgctttaattagtttagcctcagctggaacacgtacaaaagccaagagctatgcaaatgggttctacagaggtcaaatagtatccactttctctgtgttagcataaaagctaccaacaaaccaactgtttcaactacatattggggttgaataatagcacaaaagatgtaatatgcgattgatctcttgtgagattaatttacaccccgctttttgtacaaattcaaattaatcgcccaattgaactggcttaaaaaactggcgttccccaattatttcgcttaaggcttaaagcgatcctctttccgatatacgcaacgcatatgattttaccttaagctcatttaatgttatttactcaagtgcaagtgatttttctgtcacttagcgatgcggaaatgtgaagcattctggtttaaaggaaattaagtttattaatttattattaaagcattgcttaaaaaccccaagctatttttaacgtagaggcacaaaaacaatagttaacatttaataaaaaaaatctttaatcttatctataatttgactatatgatctgacggttattatctacgccgcaaccgtatggaaattgtcggtaatttgctttctagtgttttcttccggcatgcttcaacctttcggattatttagaaggggtgagagtgaccccgagataaccccaatcccagctattctccttcacccgtgtagccccctacgtcatttacgcttgattccttccttccgcctttgggggccgtttgggaattgacgtgggcgtggctttttgacattgaaaaacctcacgtgcgtttgcgttgccaacagaagttttgtttccttcggtttttattttgtttttttttttttctttgtttttttgctgcaatgtttgcagcttcttggcgagttcaatgtcgtggccaatgcaatttaagcaatgacattttcacgttttttcttatttatctttaatcggcaggtctgtcagtcgattgccgaaccgaaggccgggaaaagtcaatacagtgcggccctgtataataaccatcatctaagtttggcgttaaagactttttcactttctcatcgactgcgtatcttcaaaaaataagaaacgtaggttatctaacatatttttgctacgtacataaactttatctagaattaattaagtaatggaaattcaaacttataccagagtggaaaatattcatctcagtttgcaaataattgcttttcaaatatggctgtttattttattcatttacggacttgctaaaacggatggcgaataaacaaatactgatttgctaacataagcgttaaagttgattattaagtaacgcagctaacagtttgaatcttctcttttactgatatggaaaataagttacatttatgtctatgctttcttcggtttcagcgacgttttctgaaagcaatatctgattaacatagaattagttgtcctgtacttataataggccacaccactttcaaaatactctggatactgacagtaattcctgcaataaacaagattgtggtcacactgctgcagtgtatctaaaatagtttcccacaacccttctgttgcatgtcattcgaaactgagcccttaacatgtgtttaacacaagtggacgatgtttggcagagtcagcaacaaacgaaaaagtaataaaaaaaaataaaatatatgaaaactaacccggtggactccgtggaacggtactttcagtgggaacgagatggcgagaagggcctcatgcatggaatcccgtgaaagacgaagaagcagagcgtcgcgggggatcgccgacgcccaatggctgtcaaactgtaagcagctgttgttgactttgaggccgttcactcttcgttgttgtgtttgttgtatttgttgccgctgctgttgatttaatgctgttgcgtttgagaacgtgttttaatttttattgccttcgttataattgtttagttggcagcttggcttggatttttcacaattttagcacttttattgcacatctggttggcttgaaaattaacaaataaactttatttttatttggctttgcaaccatatttttcaatcatttttctgctttcttctctttacactctacacatttcggtatcataattttaattacaactatatttgtgtttgctcttttcgtactattattaaatcccaactggaaaatgtttttaatttgccatatccgctgcgctttgtctttctatatgcatgtgtgtgcgatcgagcaagggagagaagtatgaacggaagggaaagatcggaaaatatgcagcaatgtatgagaaatccgctcagctttcgccacattacgaaattaatgccaaagccgaagacccaagcgcccccaacaaactgattttaaacacttttttgtttagttacttttcttttgcaggtcaaaagtctgaaaacaaaagagtgcgagagggagagagtgagagagaaagagggagaaggccgcagcagatacagataccaaaaaggcaggcaaaataaattgtggaaaaaagtcataaataactcgaaaaaccagtttatgttgccggtgtacaaacaggcagctccaaagcagcaaaagaaacagcaacagtaaacaaagtgtgcagcaaaacgaagaaaagtgcgagcgagctaagaatagtacttaacgaaaaaaaaacattaacaggaagggggaaaaccaaactcgttaaagctgtgcaggagatgaaaaagtaaagcacagacagctgactcaaaaaagtagaagatacacaaacacacacatacacaacagagcgagaagagaggatagataattttccagttgtgggcagactgtcaagtcaaaaaagattgagataagaggtgtttagcaacagtttgacagccacaactcttttctgttatgttccaggccattttttttgtccaacttttaacacacacacacagcaaagcgaataaaaaacgtggctgcactgcattgaaatttatttcaaaaggaaactggagcaaacacaatttattcaacgtcacagcgataaagcgattaacgcgtataacacaccacaagttctcacaagtatatgtactgcacacccgcagcgcagatttgcgagagagctgcgattgcaaaaacaatgatacggcggaggaggagacggaatgacaactgccgcgccaagcgatcgaaaatcaagtgagctccggcgcaaagaacacacgatgccgaagccagcggaagagaaggagagagcgcaaaattaaacccacacgtagaaaaattttagtagatcatgaagatcaatttaggataacattctcagtaacaaactaaatgctttcttttattttgtaatcggttctatgaaatgaaaatgtacattttaatttgaaagtatactggtttatgattagtaccttgactacgttaataggctgaatttttctctgtgtaagaaaaagagagatacaaagcttatgagattgagagagcggactaaaacacttgtgagcgtgtgaaaatgcggcaattgagcagtttgaatttgtatgtgattattgttcatgccgctgctggttgatgttgttgttcctgttcttgtccctgtacagagagaaaagcaacaagaacatctagctgcgagagcgagcgacaagctgataatgacgtgcaacagagacagatagcgggtcatgcgtcagaggccgagaaactatcgcgagcaaactcgttacacaaacaaaacgcacctgtcaaacactcagagacaccgaattgagttggagaatggagcacggagaacgaaaagcggaataagtgaaccaagccggtaagagagactatggtctccggctttggctcaatgggatttctttgaagcgcagtcgcaactgtgaagtttctaccaacgagagcgaatgagcgaagaggggtgtgagtgagggagtgactcatacagcagtgccatgcctgaaccgcgataagctgtatgcctggctgccgtaacagagtctgttaacagaagtccccagaaataggcacagcggactcgataaggttggacacatttatccatctttttatcttattaaggaactagttatttcttaataattagcattacatttcaacattacagctgtcaaatttaatggaaaagctgtaaaaatctggataaatcaattacatatttatttttaaagcgtacactagtaaacgtacaccactatcttgctatactagatatcgattccgccgcgggtcataattaaatgattaaatatttagttaaggtctcaagtgacttaaccttcaatcaaataattttctttaaactgcatgtcgatatacccagctggtggtgtaattatcaaaatgaagaaactgcaaaaacaaaactcgagcaacaacatcgacttttggttaattgagttccctctctccgattttttgtcgcgttcagaggttgctgcagttgatatgcgactacgcatttgaccccaattgcagagccgcgacagaggcggcgatagctggggatttctgttgaatttacagttcgtttctgtgagtcttactgttgctttggatttcttttggtggccggcaattaattaattaaaatgtaatttatgtttgctgttccaacgacatttatttgttttcgaaaattaaaaacaattatgagtggaaacccaagaggcgaatacaagaacaaaatcaatggtatatggaaaaaccagttggtgcttaattatcagtagacaagagtgtaaagtagaagaattacatacatgactgacaatcttgaggcgaaggagaaggacaaagagataggggaaaagagttcaaagccacctctttgagttcattaaaaatgactaaaatctttcttcgacacacatcgtactgtggtaaacacctacagcacagaaaatcacgtgtacgggatttcgactgcggaacatcattttcggattatatgttttgctacacgcgttacactcgttgttaattgataaatattaaaaaattaaatacccccttttatacatacatatataaaccttactcggaatacttgtatattatatatgccttttcataatacgaggactatgagtacaaaaagtttccattccttatacccccagacacttgacaaatactcggcaaagaatcacagaacagaacgcaatgagagtgatggaaacaaaaggaactcaaacaaaacccagacttgacctgagcatcttgctaggctcctctcctctccaaagccacatctaatctgtttgtccgcttttccttccactctaggaattccacgactccagacaccgcgatatagagagagatgaaaaattaacgcaagtagaaaggtagaggggtggagattcaaggggtggcacggaggaagagaaaagcgaacttaagccagctgagttagttgaacagcacttgtcccttttcattttcttcatggtgctgctcttgaaatttcaagagctggagcgagaaatttgacaagaattttttattttattttaaaagatttgttacccgtattgtaaagtttaggctgcaaatcgatgattttttgtgttttactcggtttatattgagtttttaaagggtgtgtgcttttgtaccactttaatctttacctcttttatcatactttaaaaaatacctgtaatataccatctgacaattacttgatgattcattgacaataggcttaaaacgatccaaccgcaagtctgggaaaaataaaaacggaaaaagaggcaccgttaaagctttgtgtcagctgtttgtatgtgaaatcctatcgatttgtttgacaggcttttactttcgcccacgtgcattccccacctttcatttccctcgtttcctttacgggaatcgagaatctaatttaattagaagaaattttcgcaatattggtttttctgttttcccgctttttgctgacgttgctcttcatgcattcattagtagtttttttcccttgtttttgcatttatctaagacacaggtaaaccagccaagtgaaagaaaagcatttccttgagcagagcaaaagaaaatggtcattttggttatttcgatactcttataaaatgtttaaaggaaatgggacaaaaaacgtctgaaattaaaccggtttttatcaatttctaaaaaaaaattaatttgtaaaggctacagactatttaatttgtaccacccgtttttctttcattatgagcaaatatgtgcgggcttttctatagctcacagagagagagaaagagagagagagatatagagagtgagagagaatgaaacacccccacgcagtctcaaccactcactcacttgtggagcaaaatatataaaaaaaaaacgaagcgattgacagtcgacaacagcctaatgacgtcaccggtaaatagtgcgtgatgtctgtgtgcaaatgtttgatgggtcacttgtgctttgcttttttacttcgccgtgttcgcctttacattcacaataattctgctaaatccgcaatttgtccttgcttttatggggcaccacagctgccgctcactggtcacccagtccatcgcccgccattatcctcttgctttcgttcgcttttcatcagcgtttttcttgtattattattggagctacttttcgctacacgcaactcggctttctttttgctgttctttttgcctcattcatacagtaaagctaccctagattaaactcttaaataaatcgtaaaattatttaagaggtacgtttctcaagtagattttaaaaaaataataactagagattctttgcttcgtaatttcgactataaggctgattaatttaaaactatattttacctattttagcataattatggcaggcgtccttaacataatttaaaatcatgtttaaatatatgttgatactaaaccaacaacgctagttcgtgctgtacgaatgactggtggcaagactggcgtggcctacgttatgttggttttgttctcgtttttaactgagaatttaggttatccccgtcgcccctgcaccattcacttgtcataatagctcggctattaaataataaaaagtaatacaaaaagtttgttttttattacattcgctgtctccaactaaaatgtgtggaaatgtgaatatctagatgggtgtgagtaagtttgttttgttggctagcaacaaaattacgttagtttagctgggttagttgctttccgttttcttgtattatgtaccgccggtggagtggaaaataaatgttgtaacatgattttttttttttttgctttttcatacattttgttgagtaaacgttaaagagaaaaggctcaatcaccaccagttgtgacctaacctaaatctattaaaacgggtcatgaaacagttttaatttcacagaacaacattcaaggttcgcaggaccagaatctacgtcttctgacttcccagttctgcttttcttatataactcccagaggtcaactagaatccccgataaagggtgctactgaagtccccggtttcttacccatcttgatgagcgacaagcaaacaagtgctttgtgtgagtatatatagctggaagacccgaaaatgcagacagcaaacattgggaagacccaatggcaaacatatgcgcgtacgtatgtataaagaactataaaaaacaaaaacagagatacacagacacaggaagacttcggcccaacaagaacctagaaatgtcaataagcgaacacgaggtaaaatcgtcagcaacgaaagctttggacccacattcaaggctaaaaaggcggctcttccgtcggcctgacacaaggaggccgatcgactgaaatgcctataaaatatttataatgtgcgtgagttgtgtgcacttcgtttcccgctctcctacacgaaagaccggtgctatctatcacgcacccacatatgtatgtatgtgggtattatgtattgcattggaaacccatttcattcacccccttctcatggctcttcttcttagtttggctggcgtgccagaggcgagaaaaagcagacgccataagccaaaagcaacaaaaacacttgcgaaaataaaataaaatcaaacacacaagtttaaatagaaacatctctttgctaaaaataaaatcgttcggcaaaaaaggcagctacaactaaatctgttgcttgaacttttgacaatgtacagtattcgctaggaaattaaaaggaattagctttatggaaatttatttatgttaaacgaaataaaattattttaaaccagactcattttctttaaaaattcgcagtttgcattcgttaatattttaaaaagttttatgagtgaaagaaaagctagttctattggttaactaagccaaccaaatcaaaactgttaggttttaaaacttgcaaacacgcgtttcccgacacagccataatcttatcgctatcaaaatatccaaccgcttctacgcctgataacagtgtactgtagtaccgaatatggaacatttatgagaacagacgtcgcttccgtagatagtggcaatggttttttagcacggcttatcaatgcaaaattataaatagtcgcaagcctatggtctctagtcaaaatttgagtaccgcttggagttggaaggtatagctaaggggcgtacaaaagattcagattcaaaagcagggataaagccagtgggctagattcgcttatcttgattttcgattgacaatagaaaactataaatgggtttcaatactgtagccaaaagcaatgccaacttaaatggtaggattaatttttaatttttgaaagagtcttagaaccattacctctttatgaatttgggggataatcgatatacaattacacaatcataactcaccttgcttgccgttctcgtcgctgcatttcgcctagctaatctcgcttgaattttgatcgcttttccgtaattttgataatgatttttttatcgactgccgctgctgcttttgtttttttttttccaacgttgaggctgttaatgttgctgacaggcaactggtttgatccgaaatgctgactctgtttgacgaacaaactggaggatctgcaggatctgtgggatgcgtgcgaattgagcgaattatcctcaccgcccacactcacacgcattcgcgcactcactcacactcacttagcgtccgcgcatgtcgcgcatgcgaacaacacacacgggagatccgtcgctctcttttgctctttcccccgctggacgacaggtgtgtgtacagagattgcctctctccctctgttcgctagcttacagttattccagttgttccttttccttctctttctgctgttgttgttgttgttgctatggggtcgtcgttgtttgacatcaagtatgaaatttgagcagcatctccttgaaatttcagctttggtgctatactttccgaatttattttatgtttttggtgagctgtgtggtagtttagttatgtgttcatatgtcaaaaggcgggctatttgtcgtaggactattttcctattgttaatcggctttaggttccggtgtaaattagccaaggcgagtgtatctatgttgttaagaattaaggaaaacagcctcgtgctacgctgaacaactatgtaaacaaataattttggctaaacaatttgacaaacacactttcgcacattttatccaacaatttttgtgacaacagatctgaatctccgaattcattcagattgttgctatgatatttttcctcccagtttttgatgacattttaggcaaaagggactatgttgctgtttaaatatgtagttaaatttcaattaagggaaatttaaccggtcagtatcacgcctaaacttttaatgctcacgatcgtggaaatcaaagcaatctgaaaaataagaatggaaaagttaaagcaattgtaaaagagctgaataaacaaaattgtaaacgtaaagatcggtcttaattccaagcgctttgaatgttttgacgaaagatcatgttaactgatacaaaatataaaaaaactcatattaccgacgatttaaacatttttcattctgtatggataataaaaatagtaaatagactaatgaatgtacgaaactgcggtatttcttttggtatgttaggccagccatagcgtatgctggtcacactaaaagcactgatgagagcgctaactaaatttgtttttttttttcaattgattttcatttaatttagtaagagttactattgactttaacttaaaacttttaaagtcatcgtcgcacaaatgaaagttactctcttctaaaaggtaccaaattaaaatttagaaaattacagaaaattaggctaattagctgccatggccaccgcgccgtataaattgttggaaaaatctctggggccgcaaggtcgaagtaaatatttccgtacgtgatttcgtttatttttataaattttcaagttttgttattcgatgcaaaaaacgagccaaggcggcgatggccaaagacccaaagagaataagagagagaaaaccaagaaaggcagaggggcaaagaggcagagagggtgtaactactcgacttttggccatatttttttcaatgggcctcctttctgccaacgcatcattttataaggtttgctttgatctttacggaatgaacgacttgtgggctttattaattaggcaacttttaactgccgatttaccttttatacagttttgcacgcattttcattacgcctcatttttcacccatacactctcacacgcacgcacgcacgcacagacacagttacacacgttcggaccgaatattgaaatttgcaactcgatttgctactgtgcgctcgtcgatttctggataacaacttagttcactactttttataaattaagctgggcttgtgtttaactgattttctacgaaacaatcctcgaaagaccaaaaaacgcacgcaagagagcacgagaaaaatggtgcgattttttcccctgcctgcaaacacacacacacacgcttatacatggacagagacggagtaagaccgtatagaaaaacgagggaaatactctaggctgatttaatgctgattactggtaaaagaaaaatgggataatttaattagcttttcccgtttattttaaacagatacttatatacttgtgctaaagacagaacttacctaaagccctctttacataaaagatgtttaaacataattatgaaataaaaatactgtttaaaatactgttgctggcgaaaccaattagccggtaaatttgtttatctactctttaaaactgtataggcccacggtaatatctttcgcgtttaactgataatttgtttttataatattataaattttatcttatttattggtcctggatccaaggatttctcggcaattggtatagacatttacacttcacattgtctaaatttgtaacttattcaacaactgtgtaccatgcaatatattttgctctaatttatttagtgtataaaaccttttcaatattttaattataattacgttcgacactgtttttgcggctgatttgggactaaaaaacgaatctgcccagttctagggtgaccatacaaaaacctctaatgaaataccgaattctgaaataccgcatctgcaacacgtgcgagtttagctctctctccaacaagtaaataaattttatattatatgcgatttgtacagggaaacatcatgccaggaaagttggtaagattgtctagatctttatggaaactatttggcctataacatactttgtttaggtgggctctccgaagggagctgctcgaacaggtacccaagcaattgcacatgccggggatcacagcgaccttgatgaaccaaaacccaaaatcgccaagagcgacccaccatccactgccataccaaagaagaacaacttcaagcagagagaaggtaccaagaatgtaaagccgcccactttggaggagatgaaggagctacgagacacccaaaatct

SEQ ID NO: 41366 - DNA, 3033 bp, DROSOPHILA
tgtgtgtgtgtgtttgcaggcaggggaaaaaatcgcaccatttttctcgtgctctcttgcgtgcgttttttggtctttcgaggattgtttcgtagaaaatcagttaaacacaagcccagcttaatttataaaaagtagtgaactaagttgttatccagaaatcgacgagcgcacagtagcaaatcgagttgcaaatttcaatattcggtccgaacgtgtgtaactgtgtctgtgcgtgcgtgcgtgcgtgtgagagtgtatgggtgaaaaatgaggcgtaatgaaaatgcgtgcaaaactgtataaaagattgctttgatttccacgatcgtgagcattaaaagtttaggcgtgatactgaccggttaaatttcccttaattgaaatttaactacatatttaaacagcaacatagtcccttttgcctaaaatgtcatcaaaaactgggaggaaaaatatcatagcaacaatctgaatgaattcggagattcagatctgttgtcacaaaaattgttggataaaatgtgcgaaagtgtgtttgtcaaattgtttagccaaaattatttgtttacatagttgttcagcgtagcacgaggctgttttccttaattcttaacaacatagatacactcgccttggctaatttacaccggaacctaaagccgattaacaataggaaaatagtcctacgacaaatagcccgccttttgacatatgaacacataactaaactaccacacagctcaccaaaaacataaaataaattcggaaagtatagcaccaaagctgaaatttcaaggagatgctgctcaaatttcatacttgatgtcaaacaacgacgaccccatagcaacaacaacaacaacagcagaaagagaaggaaaaggaacaactggaataactgtaagctagcgaacagagggagagaggcaatctctgtacacacacctgtcgtccagcgggggaaagagcaaaagagagcgacggatctcccgtgtgtgttgttcgcatgcgcgacatgcgcggacgctaagtgagtgtgagtgagtgcgcgaatgcgtgtgagtgtgggcggtgaggataattcgctcaattcgcacgcatcccacagatcctgcagatcctccagtttgttcgtcaaacagagtcagcatttcggatcaaaccagttgcctgtcagcaacattaacagcctcaacgttggaaaaaaaaaaacaaaagcagcagcggcagtcgataaaaaaatcattatcaaaattacggaaaagcgatcaaaattcaagcgagattagctaggcgaaatgcagcgacgagaacggcaagcaagtggcggtggcccacaaacgacaactgccggtccatccgctggtaatgtggcaaatgccaccacagccctagccggtggtaaaagctcaagcaataacatgtattccacccgccaatctgtaagcaccacgaccggtgtacttatggtcggaccaaattttcgtgtcggtaaaaaaattggctgtggtaattttggcgaattgcgtttaggcaaaaacctttacaacaatgaacatgtagcaataaaaatggagcctatgaagtcaaaggctccgcaactacacttagagtataggttttataaactattaggatcacatgcagagggtgtaccagaagtatattacttcggcccatgcggcaaatacaatgctcttgttatggagttgcttggtccatcacttgaagatttattcgatatttgcggcagacgtttcactttgaagagcgtacttctgatagctatacaattactccaccggatcgaatatgttcatagtcggcacttaatatatagggatgtgaaaccagagaactttctcattggcagaacgtcaacaaaacgtgaaaaaattatacatataattgatttcggtttggccaaagaatacattgatttagatacaaataggcatataccatatcgggagcataaatccctaactggaacggcacgttatatgtcaatcaacacgcacatggggcgtgagcagtcgcgacgcgatgatctggaggcattggggcatatgtttatgtatttcttaaggggttcactgccgtggcaaggcctaaaggctgatacactcaaggagagatatcaaaaaatcggtgatacgaaacgagcaacgcccatcgaggtgctttgtgatggacatccggaagagtttgcgacatatttgcgttatgtacggcggttagattttttcgaaactcccgactatgattttctgcgaagactgtttcaagacttattcgatcgtaagggatacaccgacgagggcgagttcgactggacagggaagacaatgtcaacgcccgtcggatctctgcaaactggccatgaagtcatcatttcaccaaataaagatcgtcataatgttacggctaagacaaatgccaaaggaggtgttgctgcgtggcctgatgtgccaaagccgggggcaacactgggcaatctaacgccggccgatcggcatggttcagtacaggttgtgagttcgacgaatggcgaactaaatccggacgatcccacggccggacactcaaacacgcccatcacacagcagccggaagtcgaagtggtcgatgaaacaaaatgttgttgtttctttaaacgaaagaagaagaaatcgacgcgccaaaaatgactagacggtgtacaatgtagtccagaacgcgaggcagtcaccctgctgcgtgccacttcacattcaaactcacgggatagcgtattgaataatccgagtcaggattatatccagcaggcaacgtcgcagcatacgttgcgttatcctccatccgcgtcgatgttgacgccaacaccaactacaaacacaccgacacttccgttgtaatttatataaatataaagccagatgcaaaatgcagaaagcaacaaaaaaaatattaaacgaaacccaacaaaacaaaaacaaaacaaatgaaccccgtacacattaaatacactaaaaaacagtaaaaacaaac

SEQ ID NO: 41367 - protein, 422 aa, DROSOPHILA; identical to SEQ ID NO: 26442

SEQ ID NO: 41368 - DNA, 3896 bp, DROSOPHILA
aataggaagtagataagttatcatttcggccaaaaaatagtaataaaatgaagagcaagatcagctggtttaattcataaggcttagtgggttaatagagagcttcccttctttattataaaaaaaaaaacatttttagtactctaccaattaaatataaaaagtaaataagcacgtagcttgaactattttttaagaatttaaattacttcgaaaatgccttgtgatttggaaaaagtatcgagtaaagtgtttaaatgtcattgcatacttatgggcgaatttctaaacggacaaaactcgcttttaggcgaaacaataaaataaggcggatagatttaaaatagtttaacggaaaataaaactgactaaaaaaatggggtttttgttattaaacattaacatcaattatttttatagattatatagatagataataaaatttcaaaatacttgcatataattgtactatttaattatgcatacaaataaataaatatatataactcataatttcataatttcatagtgcgatttatttattttgtatttcagttcaaacggttcttttggacaagttattaatataaacatttgtagttcggtaatttttccccagaacctgataaccttcagaggaaagtctagtcaagtcaagtcaagagtcgcagtgcgattcaaattgagatatctaactaatgtcgtgttgctgaaatgagtgccgagataccagggaaacaccactgagtgatcaataagagccgtgacactttcccgcctcctcgagcttcttcgaaattaaaaaacaattatagacaaagagggttcgcaatcagcagctgataatccaaattccggcgcggctgtcaacgtataaaaatatatataaactatatatacatactaaactaagtatgtatggtgtccgctggccaagaatcgatttgagcttataagccagtccattttggccgggtccgctagtttcactttcgtcgtccaacgccttcgaaccgccttcaagctaacccaacaacttcggagggatgcaaggtgcgtggtttaccccagaccttagaatcttatctagcattaatttcgatactaacgccctactggcggctggcttatctggctgacaattttttaattacccacccagttcgcgccgcgaattgtcaactataaaaacgcaaaggctgcaattgattgagttagtaacgaaatcggaacgttcgcttcggtcgtctgtctatcaagtgaatttgtccccgaaaaatattagcattccaagatgggaggtacgttggctcgaagaacggatacagttatctcaggtgcacagtattcaagacgtcttgcttcgactaaattttgaaaagtggtttcaaacatggttttaaggccctgaaattctcctgcaaaggagatgactttcaaaaatggctaaaatgactttcaaatttcgatttgttactcaaattgagtttttctttcgtccttaattgattttttatccaaaaaaagggctgccgtgttggctacaacaaaggcttaaccaattttagagacgctaacacgaattttggattgaaagctatcaattttgtcgtttctagcataatttctttgcattattaagtacaaacaaaatagaaaactattcgacgattacacatgtctatattttatttaataattcatagttcgtatccccctgtatcccccatttagcaatcaatatgaggatctgtgtcgtggccgcatgtctcctaatggcatcgcaggccaccggctacacgatggatgatctgtgccaacagtggtcgggctatggatacatcggcaatccgagcaactgccatgcctggggatactgcaagaaccaggaggttgtggcctggggcacctgtcccaacggcttggtgttcaacgcgcaggccggcagctgtgattacgctaataccacggtgtgctccaccagtgccgttgagacatgctccaacgtcaaatctcccatgtatgtggccaatccgttgaactgcaccgaatacgcctactgcgatggcacaggccaaatctcctatggcgattgcggcaccggcggcgtctattcggcatcctccacaaaatgtatatggggacccgcctgcccgcaggacaccatctgtcggttcatgttgtccaacatctttgtaggcgatccgaaccagtgcggcaactacatcaactgcgtcaacggctatggcacttccgaaaaatgttccagcaccgccaatccctactataataaagccactggcaactgccagtcgacgaatccgtgcaccggcgaagattcaaacagtggaaactctgaccagttcactgttgggcaaacaaatgcaactgcttgtgacgaagaagcttttaaagcagcagatccacttactgtaaatggggaatctgttgactataggtacgtttctgatggtgtcacctgctatgggtactactactgtgcagcagtaaacgccactggctattggaaccaatgtcccaccggtacccaattcaatgctggcaagtgcgtttcgccagcctcctttgtctgtacccataaccgatgtgggaacgttaacaatccattcatggcagatgagggttgcaagaactacacaatctgctccagcggaataaccggatcatgtcccaccaatgcgccgtactacgacgaggtgaacaatatctgcaccaccaaaattcccgattacgccatttgtaattcgacggctagtacatgagcatctcctccagccacgtctgtttgccgagataccttttatgaaatatataaataaataccaatgctgaaggcattcaaaagaaactaataaaaatgttgacttcgaccaagcgaaatttgttttaaatgttgttgtttttgaaattgttgattagttgttcgcctttttggtagcaaatctttcaaaaagaggctcacagaaaatgtgcctcaaaatataaatataatttctgcgggatgggtatttgtaaatgttatctgccaagctaagttaattaaataattaattaaaaaaattcaatggcctccatctattgtattagaagaaggtggaacagtaaaaccccattgcttgggaaatttctggagaagttacttgattgacgtcagcattgagatattgttttgaattcagtacttcaaagcctagtattgtagtaggctgctccttctaccctcttcctttactcttagtcatacatacctaattatacatagccaatctagtcataagcttatacactcatacacccatccttaacatacaaatattatcgagaaacttatcgactaatcgactcgccactctgcagagagcgcggcagtcagtcgctgttgaaccaagctaaaggacagatcaaaaataaaagagacacgtgaaattgtattagaatattaacttctgtaaacggcggctaaaatctcagaagtgggattaataatccaaaatgggacgataaaatcatcctgaacgacttttcgctgacaaccctaaaagattggctacgtattctgggccaaaatacggagggcacaaaaaccgaattaatcgcgaggctgcaagacatcccaacggcagttcggggcgattgtccaccggagcacccccagaaaaacgctccaccaggaaacgacattttttcttcactggattttcagaattgtgaaattaacaccgatcacgtaagtgtgaatgcgatgaacagaaaagaatcaaccgaaactggcagtgagagggagacaaacatgttcgagctacagcaactacgcgcagagctagcagaagcgaaggcaatgcttaacggaacacgatcgagcttgcagttccaag

SEQ ID NO: 41369 - DNA, 1290 bp, DROSOPHILA
caacgccttcgaaccgccttcaagctaacccaacaacttcggagggatgcaagggaacgttcgcttcggtcgtctgtctatcaagtgaatttgtccccgaaaaatattagcattccaagatgggagagcaatcaatatgaggatctgtgtcgtggccgcatgtctcctaatggcatcgcaggccaccggctacacgatggatgatctgtgccaacagtggtcgggctatggatacatcggcaatccgagcaactgccatgcctggggatactgcaagaaccaggaggttgtggcctggggcacctgtcccaacggcttggtgttcaacgcgcaggccggcagctgtgattacgctaataccacggtgtgctccaccagtgccgttgagacatgctccaacgtcaaatctcccatgtatgtggccaatccgttgaactgcaccgaatacgcctactgcgatggcacaggccaaatctcctatggcgattgcggcaccggcggcgtctattcggcatcctccacaaaatgtatatggggacccgcctgcccgcaggacaccatctgtcggttcatgttgtccaacatctttgtaggcgatccgaaccagtgcggcaactacatcaactgcgtcaacggctatggcacttccgaaaaatgttccagcaccgccaatccctactataataaagccactggcaactgccagtcgacgaatccgtgcaccggcgaagattcaaacagtggaaactctgaccagttcactgttgggcaaacaaatgcaactgcttgtgacgaagaagcttttaaagcagcagatccacttactgtaaatggggaatctgttgactataggtacgtttctgatggtgtcacctgctatgggtactactactgtgcagcagtaaacgccactggctattggaaccaatgtcccaccggtacccaattcaatgctggcaagtgcgtttcgccagcctcctttgtctgtacccataaccgatgtgggaacgttaacaatccattcatggcagatgagggttgcaagaactacacaatctgctccagcggaataaccggatcatgtcccaccaatgcgccgtactacgacgaggtgaacaatatctgcaccaccaaaattcccgattacgccatttgtaattcgacggctagtacatgagcatctcctccagccacgtctgtttgccgagataccttttatgaaatatataaataaataccaatgctgaaggcattcaaaagaaactaataaaaatgttgacttcgaccaag

SEQ ID NO: 41370 - protein, 346 aa, DROSOPHILA
MRICVVAACLLMASQATGYTMDDLCQQWSGYGYIGNPSNCHAWGYCKNQEVVAWGTCPNGLVFNAQAGSCDYANTTVCSTSAVETCSNVKSPMYVANPLNCTEYAYCDGTGQISYGDCGTGGVYSASSTKCIWGPACPQDTICRFMLSNIFVGDPNQCGNYINCVNGYGTSEKCSSTANPYYNKATGNCQSTNPCTGEDSNSGNSDQFTVGQTNATACDEEAFKAADPLTVNGESVDYRYVSDGVTCYGYYYCAAVNATGYWNQCPTGTQFNAGKCVSPASFVCTHNRCGNVNNPFMADEGCKNYTICSSGITGSCPTNAPYYDEVNNICTTKIPDYAICNSTAST

SEQ ID NO: 41371 - DNA, 3201 bp, DROSOPHILA
taattttgtacacaaccgttgtttttccatatattaattcgtttttcattttatcaaaataggacgactaaattatacagctgccatatgaaaatattaaagttgcatttcaaataatagaacagaaatcctatattcggcttccttcgttaatattagttttacctgtataatgagtttggcacattcgttgcacggaaatagtgtggtatacagtcgagttccagacaaactcatgccgttgctgttcaggattgcattggcctccgcgtggaccacgtacatcttcttgtcttccaggggatcaaattcctgcgagcctttcttagcttttgaccacggaaacacgtcatcgctgcagttgcgagggaacccattgtatccaatggccactatccgattctgggaatccacgatgcaggcgcccacttgggtgacgggatctttgctgcgtttggcggagagcagtgaggtggccataaagtagtcatcccaatgcagatattcctttctcttgtggctttcgggtgacttcgacaactgggatatcaaatcttgagcggaaacttcagccatttctgcaaaacaagtagaaaaccttattaagcgatggaaataattaaattatgatttctgatatccacttttcattatcgtaattggtttctttatgcgtatttcattcatataatgcatacattaaaccagctctgcaatgacaaatacttgcctcagttgtctgtatgtctttattttaataatcatttaatgaatgcaaatccatacacaaccatattccatttccaacccattgatatttccaacacacatatatgatgaaaacaagttgtatgtgtataactaactagagataagaataataaatggtttgtataatgcgttttatagagcaataaatattatttacaacaaaactggaagtaattaaagccccttgatgtgcaaccctgcttgattaacaaaatgaacgaaaaaacactttagttgtcatatccttggttttattttttatttgttctttttcctaactttttcatgtcgtttttcttattttgtgtgatggggtatatgatagtcaaggaaagcatgacaactgtgtgcacattctttattgcattcattagacaaaacgatgatcgcggctatgttatagcagcaataataatattttatgtatcataaattggaatatacagcgaatactttcaataataattttcatattcaactcaatgtggttaggcgagtgcgtaattaaaactacctaggtgctcttctgcacctggatgggattctgcttgaggtgcaggtagatggatcgcatgcgggagacgtcctttcccgccttgttcaccttgggattgaagtcgcagagcttggctatgcgctcccattcggtgcccggctcgatggtgccattctccagggtggcggcttgtttctcggcattccgcgacgccagtttggtcttcgatatggactcgccaatctggcgcaaccagtcgtccagctccttcttggactgctgtcggagttcctccttttttcgctcctcctcgatgtccttctcctccagtcgttgcttttgctcttcgcgccatttgcgtatcttttcgggctcttcccgcgacggcggcggaccggatatgcccacgggttcattggactcgccaccaatgacctcaaaactgccagtggaggattcgaggccacccgtgccgccagcagagagcagatcgccttcggaggcggtgcctcccagaagctcacccaagccctcgtctgtggatgcagccggaggagctgatgcagatccacccgtaatctccgcctccaagtccccgagagctgactgttcgcgcgccaggaactcggccgccggatccacgtcctccttggcagcgaaatcgtctccgaagtccatggctatgtgctctctggaaatgttgtgattgctatttagtgggcgtctcacccagatttacacgtacgcagaggagcagccagctgctggcggattccccccgattcattgacaattgggcactacgcacctctcctttgattcggttaggactaattgaagatcggtgtgggcggatgactaaccggaaacttggtcaaatgtattttttcagttttcttttagcaatgaatacgtaaaatgactgtcattagtacgtgaaccaaccataaaacagcgggctatcgaactggttccagccgaacagtgctggataatgcaacatatatcgcaacgcgatggttttaaatttaatgttatgatttttatattaaaaaataaatatttttttacaccagttattatgccaaatcttttaaatgtatacaaattagtaatatttaaggaacagaaaccattgttaactattttacttgtcaaagccgaattcaacattccttaacatcacggataacgagttaaagatttagctacattttgtattattaagctacaagtttatgataatgtatgttgaaaaaaccaaagtaagaacatttaatttttccttaactaaacttttaaattatatcagcagcgtcaattttccactgggtttctggtcaattagtgttgcaaaatgtgtaatggtggtggcttgattcgttcatatataatttagaaccgtacatatagttaataaaacctagatttaatataatatttaagtttggaattattttatttttttttttgttttcagattttgtaaagttctcatggtttttgaaatcaactagttccaattgatcagtgttaggaaacgcgcgagttcagtaaacacaaccttcagaggagttacgattaatttgtttatatcttatcaaatgtgccttaataaatgctcgtaaaatgtaaatacacaacaaagttaactagtaatgactgtagacccgataaaaagcgtattatacaacacttgttgctattgcatagcacatgggaatataattgctggtcaaatttcacggtgaattgttcacacaacatgacttaattatgtttttgactaacctatgccacgaagaacacaagacgcagtatactttttgaggaaattaacaaagacgaaatgcgaggacgacggcaaaacaaacaataaacactcggcgcgcgaactagtgaaccgatgaacaagttcaccgtggcatcattca

SEQ ID NO: 41372 - DNA, 1084 bp, DROSOPHILA
tactaatgacagtcattttacgtattcattgctaaaagaaaactgaaaaaatacatttgaccaagtttccggttagtcatccgcccacaccgatcttcaattagtcctaaccgaatcaaaggagagagagcacatagccatggacttcggagacgatttcgctgccaaggaggacgtggatccggcggccgagttcctggcgcgcgaacagtcagctctcggggacttggaggcggagattacgggtggatctgcatcagctcctccggctgcatccacagacgagggcttgggtgagcttctgggaggcaccgcctccgaaggcgatctgctctctgctggcggcacgggtggcctcgaatcctccactggcagttttgaggtcattggtggcgagtccaatgaacccgtgggcatatccggtccgccgccgtcgcgggaagagcccgaaaagatacgcaaatggcgcgaagagcaaaagcaacgactggaggagaaggacatcgaggaggagcgaaaaaaggaggaactccgacagcagtccaagaaggagctggacgactggttgcgccagattggcgagtccatatcgaagaccaaactggcgtcgcggaatgccgagaaacaagccgccaccctggagaatggcaccatcgagccgggcaccgaatgggagcgcatagccaagctctgcgacttcaatcccaaggtgaacaaggcgggaaaggacgtctcccgcatgcgatccatctacctgcacctcaagcagaatcccatccaggtgcagaagagcacctaggtagttttaattacgcactcgcctaaccacattgagttgaatatgaaaattattattgaaagtattcgctgtatattccaatttatgatacataaaatattattattgctgctataacatagccgcgatcatcgttttgtctaatgaatgcaataaagaatgtgcacacagttgtcatgctttccttgactatcatataccccatcacacaaaataagaaaaacgacatgaaaaagttaggaaaaagaacaaataaaaaataaaaccaaggatatgacaactaaa

SEQ ID NO: 41373 - protein, 219 aa, DROSOPHILA
MDFGDDFAAKEDVDPAAEFLAREQSALGDLEAEITGGSASAPPAASTDEGLGELLGGTASEGDLLSAGGTGGLESSTGSFEVIGGESNEPVGISGPPPSREEPEKIRKWREEQKQRLEEKDIEEERKKEELRQQSKKELDDWLRQIGESISKTKLASRNAEKQAATLENGTIEPGTEWERIAKLCDFNPKVNKAGKDVSRMRSIYLHLKQNPIQVQKST

SEQ ID NO: 41374 - DNA, 2972 bp, DROSOPHILA
ggccgcacgccactctcacctgaatggcctggttggctggttggtcaggtgggagctccttcgtgctggcatgccattgaaaaacatcccataaacattttgctcagcccggtatttaaaatggctgcatgcgaatttttagccaacacaacatcaaagttcaaaagtggctaacttaattaatttaatgtgtgggccagcaatagaattttcaaggtcctttaattacggagctataaagtggcacagagtagtttccattacacatataccctgtttttaattttcgatcagtataattattaatttaactttttaggaatgaattatgggatttaattccaagattcaatatgaaaataccatgtacttttacctgagtagagcacttccatggcgcttttggtctccggtggacacctgtgcatgctaagagtctcacctgacagtcttctgtttgccaagtcaattagtgcaagtgaacactcttcccaaatgggtactaattaaaaaacattttaagtatctttgcgtgcggataaaatgaagcgtctaatcgtttatgctctgcaaaaaaggagcaatactcaacgaaaaactattgttttttattccctattaggttagaatatgtacgttttgggatctagataagttctgcttttgattttgactatacttttacgaacatatttgaacaaacgtcaaaggaagtggtcagattcaatgatttactggattttgattttaatatcgattacagggaactcattttccgaagcatttttctgactcacagatagaaaagaacatcgttttacgttttgctttttagttaaactgtatttttttatttatattagtactgccaaactaagtataacttaattagcatgctattaaatttatttatcatttgtctacatatttagtccgatcacgtcaaatttactttaaacacattaaaagttgtcaagatagctaagattgtattagtacattacaaatggagttcgtttagtcccagggatgcattcggatcttcttccgggaaggtgtcaaaatcaatggtgatcgtttttttctgggggatgtgtcgcttatattccacgcccactgcatccagcatccgcttggatgcacgatatgtgggcttatcggcatatttgtcggacaaatatagcacctgagatatgcccacctggaatacaaataggttaatttatatgttatgatatgtatgtactatatattcttgatcaattttagaagatgagttcataaagctgccgtccgtttggtcgtcctttcgttttaacgaaaaacttaaaacctttttgaagccgtgaaactattggaaagattgtgcttccatgtttgtgatcatatattggtgtaattttgtacacaaccgttgtttttccatatattaattcgtttttcattttatcaaaataggacgactaaattatacagctgccatatgaaaatattaaagttgcatttcaaataatagaacagaaatcctatattcggcttccttcgttaatattagttttacctgtataatgagtttggcacattcgttgcacggaaatagtgtggtatacagtcgagttccagacaaactcatgccgttgctgttcaggattgcattggcctccgcgtggaccacgtacatcttcttgtcttccaggggatcaaattcctgcgagcctttcttagcttttgaccacggaaacacgtcatcgctgcagttgcgagggaacccattgtatccaatggccactatccgattctgggaatccacgatgcaggcgcccacttgggtgacgggatctttgctgcgtttggcggagagcagtgaggtggccataaagtagtcatcccaatgcagatattcctttctcttgtggctttcgggtgacttcgacaactgggatatcaaatcttgagcggaaacttcagccatttctgcaaaacaagtagaaaaccttattaagcgatggaaataattaaattatgatttctgatatccacttttcattatcgtaattggtttctttatgcgtatttcattcatataatgcatacattaaaccagctctgcaatgacaaatacttgcctcagttgtctgtatgtctttattttaataatcatttaatgaatgcaaatccatacacaaccatattccatttccaacccattgatatttccaacacacatatatgatgaaaacaagttgtatgtgtataactaactagagataagaataataaatggtttgtataatgcgttttatagagcaataaatattatttacaacaaaactggaagtaattaaagccccttgatgtgcaaccctgcttgattaacaaaatgaacgaaaaaacactttagttgtcatatccttggttttattttttatttgttctttttcctaactttttcatgtcgtttttcttattttgtgtgatggggtatatgatagtcaaggaaagcatgacaactgtgtgcacattctttattgcattcattagacaaaacgatgatcgcggctatgttatagcagcaataataatattttatgtatcataaattggaatatacagcgaatactttcaataataattttcatattcaactcaatgtggttaggcgagtgcgtaattaaaactacctaggtgctcttctgcacctggatgggattctgcttgaggtgcaggtagatggatcgcatgcgggagacgtcctttcccgccttgttcaccttgggattgaagtcgcagagcttggctatgcgctcccattcggtgcccggctcgatggtgccattctccagggtggcggcttgtttctcggcattccgcgacgccagtttggtcttcgatatggactcgccaatctggcgcaaccagtcgtccagctccttcttggactgctgtcggagttcctccttttttcgctcctc

SEQ ID NO: 41375 - DNA, 612 bp, DROSOPHILA
atggctgaagtttccgctcaagatttgatatcccagttgtcgaagtcacccgaaagccacaagagaaaggaatatctgcattgggatgactactttatggccacctcactgctctccgccaaacgcagcaaagatcccgtcacccaagtgggcgcctgcatcgtggattcccagaatcggatagtggccattggatacaatgggttccctcgcaactgcagcgatgacgtgtttccgtggtcaaaagctaagaaaggctcgcaggaatttgatcccctggaagacaagaagatgtacgtggtccacgcggaggccaatgcaatcctgaacagcaacggcatgagtttgtctggaactcgactgtataccacactatttccgtgcaacgaatgtgccaaactcattatacaggtgggcatatctcaggtgctatatttgtccgacaaatatgccgataagcccacatatcgtgcatccaagcggatgctggatgcagtgggcgtggaatataagcgacacatcccccagaaaaaaacgatcaccattgattttgacaccttcccggaagaagatccgaatgcatccctgggactaaacgaactccatttgtaa

SEQ ID NO: 41376 - protein, 203 aa, DROSOPHILA
MAEVSAQDLISQLSKSPESHKRKEYLHWDDYFMATSLLSAKRSKDPVTQVGACIVDSQNRIVAIGYNGFPRNCSDDVFPWSKAKKGSQEFDPLEDKKMYVVHAEANAILNSNGMSLSGTRLYTTLFPCNECAKLIIQVGISQVLYLSDKYADKPTYRASKRMLDAVGVEYKRHIPQKKTITIDFDTFPEEDPNASLGLNELHL

SEQ ID NO: 41377 - DNA, 15960 bp, DROSOPHILA
ccttatcctgctcacaaatggacacgtatagcttaagctaatataaagctaagccaagagaggaaagtatgaaatttaaaagtgttatctatatatatcacagcagtatgtatttgctcagtagtataattataagtatatttagtaatattatttatttaagtgtggaatatattaaatatattttctaatgtattcagtgtttttcaaccataaatctaatttcgatggcttactttgaagtaaatctgaagattttttccactttaaacgttttcattgttttaaatacgtgcattaattaaatttggtacccaaaagttatttctgtaggcaggttcaatacactttactaattttgacaccaatgcgccctctagcgagctacgagacaagctgctgctcgaacgcatgaaccgtaaactgcttgcattcagcatttgcactgcttgaaccgataacttttaacggtcacaatgtagtacgttgaatatttgaaattagttcacccttggccaacattaaagtgattatattccaccacccaagttcaatgccattggagaagtttctgcgtaggacgctttacatccagcagctcttcgttgaccatataacttttgaatggcgacatatcagcagagggggctaccccaagtcagaaaattcttacacccatcgtggactctagtaaaattatgacataggtcccggaaatgccgctatcaggaaggcattagcatcagcttaaacttggcacagatttgttacattcgctttgctaatttaagaacggcgatgccgataagctgatgatggtgctttttttgcggatcgtggataaatagtgggcttgagcctaacaattccgagtgttctgataaaccagctacggaatcgggcctataaaaggggctccccattcatggggaacattagtcgcgatcgcgcatcgaaatcgtcaagttcagtggatataattacagtgaaaaagtgctaagtgtaaaagtttttaaaagtgagttctaagctggattttaaacaggactaacagcttggcagtgtccttgcagaaatggattaccagtgctaactatcaacaggattttcctgtgtatacaattaaaccaacaatttccgattagcctaacaaaatggctaacaaagtgatttttgtggcgttgtggctgctttttatttcatctgttttgacagagaatggagacattataataaccgatgatgacgacgaggatatcaagtgagtggatgagaaagttacagtttttgtgcaaataaataaatactcgtaaagcggaataaatacgtcttcaaaaataattattttggagaaatacattgtgaacattaatatacatacatgcatgtgaactgtgggtcttaccagatttttcttcgataatattgttatatccttaaattataacaattgaataaaccatctaagttaaaaaatgaagatataaatagatttatatatacacaaaacaaactctctattaaattggaaatacttttacttcgaaactttacttttattaatgtcgttgcattaagtataaacaaactgtaacttaaggaaaaagatttcacaactcgcatccatattgaaaaaagtgttttttttttaagttgtcttcaaagttaccaatacgattctgtaaaaataagtcctttcgctaaaatcctagaaaatattgtcctttcaacattctaattgctagctgcgtaaaattaagctttgtgtcctaatgattatttgcgaatttagcccgctgctccaggccgcaccggaagtcgtcgataaggagaacgaacggaacgaacgccacattagcttcaacatcctcaaagccccagcagttaggtaatgataagtctgaagaaaccgcgataattcgccaagttcagcgggggattatttaactggattacattattttatagtgcacgatacacttatggcggttctgaaggaggccgtagtggattcggaggaggatatggtgttggtggaggtggaggtggtggttatggcgggataaagacgtctcatgccgctggaggactgcttaccaaaaccttgggctttttaggcatgggtggccaggggtaattataaaaaaaaaaactatgaagtgtatccgaagaattaaaataaaatcttcaacagaagtcagggcaacttttacggaggcggaggacactttctagcagccttcggaaaatgttcagccctccaactgccgtccaatgttcagtctgaatgccacaatggtcgttgcaaagtcttctgcccaactggctatagtttcgcacaggacgtttcagtcctggagatgttctgcagcaatgatggatggatcataggcaactccgtgtttgcggaggtgccaccctgtcaggcacaatgtacacctccatgccaaaacaatggcatctgcatttccgccggagtgtgccagtgtccggagaactactacggtccgctgtgtcagcaaaagaagtccatatgtgcatcctttccgaaggcaccgaaaaactccaaagtatcctgcaagaacaagtgagctctatgggtctggctttacatagggatactacaatccaattattttttaagtatgtgccacgcggagtgcatgagaggatttcagtttccagacggcagcggaattacgaacattgagtgccgcaatggccagtgggtgcacactaaaactgggctatccaaaactccagattgtgctcgtgagcagaaacctcaaaaaaatgcggagttttttgtttcaaactttttctttcagctacttgtgcgcccgcctgccaaaacggaggtcagtgcattagtttcaatgtctgtcagtgctctaagatgttccgcggagaccattgtcaatatagtaagtaaacagattatacttcaaaatattaacatgataacatttttgttatcgtatttgaaaaatttttaattttttttaaatttcttattacattttacagacattgacagatgcaatgtgactaatacaaattttaatggaaactacaagtgtgcctacgaaatggacgacgctcgttgcacatttagttgtcctcaagtaccgggattaaaaatccaaggacgaattgacatagagtacaagtgtaactatctgcaaggacaatatctgcctgccccgcttccaaagtgtattttccgtaagtatcctcaacataactgttgataagagttgtccaagtattatcagtccgatattaagattataaaattaaaggtagatttttttcttctaaaatcaaaatactacagctcctggatacaccgttcggtccacatcatccatgcaaggtgtaacgcatcagaatggcgtttatcatcgcggaatgagtggggaaatggcttatgaactccaaacagaacgtcaaaaactacttgctctgctcgcaaaatatcgggatctggaaagaagaagtgtacgttaatttgcatcatttccatataaaaaaaatttaatagaaaatgaatttaggaatggtggtcttcggaggaaactgttgtcaccatgagcagttattccttgtaccagagcaacaatttggatatcgtcatcgacaaaaccccacgaccagcactttgcaccacttggggtggtattaacatgaaaacctttgatggtctggttttcaagtaagcggagtgctataaaaatttaagtaaatcggtttgcttaatccattgttcccaacagggctcctctatcctgttcacacacgctaattacagacaaggtctcgggtacattcgacattatcctgaaggcttgtccttatggctctgggtatggctgcgcacacaccttgaaaattctatggcaatcggttctatacacttttgaaaacctgagtaagagctttgataccaacatgataaaacatgtgaaataatttataaaataaaattccttttagatggcaccatgcagctgaccacaccgattaagaagcttccaatgcctgtccaggttatgggcatgaaagtcatgccggtggcccagcatgtgcagatcgatctcgagtctgtaggtctcaagctggattgggatcatcggcagtatgtgtccgtgcaggcgggaccccaaatgtggggaaaagttggaggtctctgtggaaccctggatggtgatcctaacacggacttgacctccagaacgggcaaaaagttggccacggtcaaggccttcgcagatgcctggcgcgtcgaggatcgcagtgaattgtgccaggtggagaatagtgcagagatggagttcggtatggattcctgtgagcaatctaagctacaaaaggctgtatcagtctgtgagcgtctgttggccaacgaaaagctcggtgactgcattaaaccctttaattacgacgccctgatccgcacctgcatggcggactactgcaattgtgccaatcgagagcacccggaaagctgcaattgcgatgccattgccatgctggccaaggagtgcgccttcaagggcattaaactggagcacggttggcgcaatctggaaatctgtcgtaagtcagcaaaatcaaaaattggatcaaaagaaagtaatctagcttgagaaagtaactagcgggattgtaaaacagaaaatttgcttcgatttgaataactttttaaccgacattctgataatctctttttcttttccagccatcagttgtggctttgggcgcgtttatcaggcctgtggtccaaatgtggagccgacttgcgattcagacctagcgctaccagcctcaaaaggcgcatgcaacgaaggctgtttttgtccggaaggaactgtgcagtacaaggaggcgtgcatcactcgagaactttgcccgtgttcccttcgcggcaaggaattcaagccagagtcgacggtcaaaaagaattgcaacacctgcacctgtaagaacggtcagtggcggtgtacggaggataaatgtggcgcccgctgtggggccgttggagatccgcattatcagacgttcgatggcaaacgatatgattttatgggaaaatgctcctatcatcttctgaagacccaaaatacctcggtagaggcggagaatgtggcttgctcgggagccgtttcggagtcaatgaattttgccgctcccgatgatccgtcatgcacaaaggcggtgaccatccgatttatcctgcgcgatggcaccccatcggtgattaagctcgatcaaggactgaccacgatagttaatgacaagcccatcgccaagttacccaagatgctgggcctgggcgaggtcctcatccggcgggctagttccaccttcctgactgtggagttcgcagatggcattcgcgtctggtgggacggagtttcacgggtgtatatcgatgcaccgcccagtttgcgaggccaaactcagggcctttgcggaacctttaactccaacacacaggatgactttctaacgccagagggcgatgtggaaactgccgtggaacccttcgcggacaagtggcggacaaaggacacttgtcaatttaaggctgaaacccatcaaggacctcatccctgcacgttgaacccggagaagaaagcccaggctgagaagttctgtgattggatacttcaggacatcttccaggactgtcactttctggtggagccagagcagttctatgaggattgcctctacgatacatgcgcctgcaaggatgaaatgtccaagtgcttctgtcccatcctttccgcctatggcacagaatgcatgcgacagggtgttaagacaggctggcgaatgtctgttaaggaatgcggtgagttttgtgatgttttaaggaccttcttaaaaagaataattcttacaagagaaatgtttcatattgattcttttaccagctgtaaaatgtcctttgggccaagtgtttgacgagtgcggtgatggctgtgccctatcctgtgacgatctccccagcaaaggatcttgcaagcgggagtgcgtcgagggatgtcgttgtccccatggagaatatgtcaacgaagacggcgagtgcgtgccgaagaagatgtgtcattgcaattttgacggcatgtccttccgaccgggctacaaagaggtgcgaccaggagagaaattcctagatttgtgcacctgcacagacggcgtgtgggactgccaggatgccgagccgggggacaaagataagtatccgccatcatcagagctgcgctcaaaatgtgccaagcaaccctacgccgagtttaccaaatgtgcgcccaaggaaccgaaaacgtgcaagaacatggacaagtatgtggccgactcttcagattgtcttcccggatgcgtttgcatggagggatacgtatatgatacttcccgcttggcctgcgttctgccagccaactgctcctgccaccatgccggaaagagctacgatgacggcgagaagatcaaggaggactgcaatctctgtgagtgcagggctggcaactggaaatgctcgaaaaatggctgcgagtctacgtgcagcgtttggggtgattcccacttcaccaccttcgatggccacgacttcgacttccagggagcttgtgactatgtgcttgcaaagggagttttcgacaatggcgatggcttcagcataaccatccagaatgttttgtgtggcactatgggtgtgacttgttcaaagtcgctggaaatcgctctcactggccatgctgaagaatcgctgcttctgagtgcggactctgcgtacagcactgatcccaataagacgcctattaaaagtaggtaaatttcgtttctaatttatcataatatttaatccatttgttatagagcttcgtgacagtgtcaactcaaaaggtcacaatgccttccacatctacaaagctggtgtttttgtggtggtggaagtgatcccgctaaagttgcaagtgaaatgggacgaaggcacgcgggtttacgtgaagctgggcaacgagtggcgccagaaagtcagcggcctgtgcggtaactataatggcaatagtctggatgatatgcagacaccctcgatgggattggagacgagtcccatgctctttggccatgcctggaaattgcagcctcactgctcagctccagtggcgcccatcgatgcctgcaaaaagcatccggagcgcgagacctgggcgcaactgaagtgtggagctctgaagtcggatctgttcaaggagtgccatgctgaagttcctctggaacgtttctggaaacgatgcattttcgatacgtgtgcctgcgatcagggcggcgattgcgagtgtctctgcactgctgtggctgcctatgcggatgcttgtgcccagaaaggcatcaatattcgctggagatcacagcatttctgccgtgagtatataatactgacctaaccagatttacgtatattgtttcagcttaaccatatcatatcttttatatgtagccatgcaatgtgatccccactgctcggactataaagcctgcactcctgcctgtgctgtggagacatgtgacaacttcctcgatcagggaatcgctgagcgcatgtgcaaccgtgagaactgcctcgagggatgccacatcaagccgtgcgaggatggattcatttacctaaacgacacctaccgcgattgtgtgcccaaggccgagtgtaagccagtgtgtatggtgagagatggaaagacattctacgaaggtgacattacctttacggattcatgtgccacctgtcggtgctccaagcgcaaggagatttgcagcggtgtaaagtgtgatgttcctgcaacgacaggccttccggctccactagttgagggcacgactctaccaacgcctctggctactcaaaatcagaccaagtgcgtcaagggatggactcggtggtgcgacaaggatcgggatacatcggacaagagtgtgcgactaaatgatgaggagaaggtgccacgctacgatagaatggaaaatgtctatggcacatgcctaaagcaatatatgaccaaggtggagtgccgggtgaaggatacccacgaggcaccggagcaaatggacgagaatgtggtttgcagtctggaagagggtcttcggtgtattggaaaatgccacgattatgaactgcgcgccttttgccagtgcgatgaggaactagagcccgaattgcccaagcccactgaaaagccacaacttggtctggcctgcgatgccgccgttgtggagtacaaggaattcccaggagattgccataagtttttgcattgtcagcccaagggagttgagggcggatggatctacgtggaaaaaacctgcggggagtacatgatgtttaatccgaccatgttaatttgtgatcatatcgcaaccgtaacagagatcaaaccaaactgtggcttgaaacccgaaccagaaccggaatttgagcccatcaagcaatgtccaccaggcaaaataaagtcggaatgtgccaatcagtgtgaaaatacgtgtcattactatggcagcattctaaagaagagaggtctctgtcaggttggtgaacactgtaagcctggttgtgtggacgagctgcgaccagattgccccaaacttggaaagttttggcgcgatgaggacacttgcgtccatgctgatgaatgtccttgcatggacaaggcggaacactacgttcagccgcacaaacccgtccttggagagtttgaggtgtgtcagtgcatcgacaatgcgttcacctgtgtgcccaataaaccagaaccagttcccaaggatgaaggtaggtggtttgttgaatatatgaacctcacatacattacatattttctctttttttatttaagatgacgatctggatctggtatctgtggttcccatttaccctgttaccctaacaccacctctacaatgttctccagagcggtaggaaatcttaatctcatcataactaaaacactattgatatcgaacttttcgtgttcagccttattcccaagattgaaaaccctgcacattcactgcccgatagcattttcaatgccagttctcaattggcgcctgaacatggcccgaaaatggctcgtctgaccaaagaacaaccgaggggcagctggtcacctagcattaacgatcagatgcagtatctggaactaaactttgcgaagccagagccattctatggtgtggttatggctggtagcccggagtttgataactacgttactctattcaaggtaagtacttgttagtccttacttttgaatttttcattaatttgttactgcagatccttcacagccatgatggaatcgcctaccattatctggtggacgaaacggaaaagcctcaaatgttcaatggccccctagattcaagggctccagtccagactctgtttaagatccccattgaagctagttcccttcgcatttatccccttaaatggcatggctccatcgccatgcgtgtggagctcctgatctgtggagataaggaagagcctaagccagtgcccacagtttcaacaattctaccaatcactgagcgaccagctcgattggtagatttggaatgcattgatctcatgggcgtggatgagggtaaaatgtaccaggatcaagttcaatcgagcagtttgtggcagcaacccaatttgggaaagaaattacagcttctggagctgttaaagctatcgacaccactagcttggcgccccttggcaaatagtcaaaacgagttcattgagtttgatttcttggagccacgaaatatatctggatttgtcaccaagggtggtccagatggatgggtaactggctacaaggtgatgttctcgaagaagaaacccacttggaatacagttctctcaaccgacggacaggcacgcatcttcgaggcaaatcacgatgctgaaactgagcgcagacatcattttaagaatcccattctaacgcagtacattaagattgtgccggcttactgggagaagaacatcaatatgcgaatcgaaccactcggatgcttcttaccatatcgtaagttttttatttcaatttaatcccttaccccaatataaccatatatattatttaaagctgaaatacaacgtcaagtgcccgttgaggagagcaagcccaccaagtgcaatatctgcgatggtgtgtcgacctccagttcgactactggatgtcagtgccaggatcaactcttctgggatggcaacacatgtgtacaacacaatctctgtccttgcatagagaactatgtaagctatccgataggtagcaaatttgagaactcagcttgcgaggattgcgtctgtgtgcttggtggccataagaattgcaaacccaagaagtgcccgccatgtctgggcggtaaattgcgtccagtgattaccagcgactgtttctgtaagtgcgaaccttgtcccaaacaccaaagattgtgcccgtccagtggagattgtatacccgaaattctgtggtgcaatggtgttcaggattgtgctgatgacgaagatgccagttgcagtgattcattcactgttgagccggacgtcagccgagaaaagaatgagagtgagtcgcaaaaaaaatcacagtttccttatattgaatatttaattgtttaattcacagctgaagtcattacatgccccgtccccgtttgtccgcctcaaatgaaaataagaattacggagaaaaagtctagaaagatgtcaaagatgttcaccttctcgaagcaggtgtcaatagtggacgatggaacgaccatcacaaagaccaagttcatctcgtccaaggaacaaattctggctatgccgaaccgggaattggactttcaactggaagagcagtgcgatgagttcacttgtgtgcccattcccagcaagcaagtggacaaaaacgagactgtcacctgcacggaaccaaagtgtcctgagaaatacgatgtggaattggacatgagtgcgtcgaaagtgggtgactgtctgagatacagctgcgtccttcggcccaacaaagacgatgtgtgtgaaatcagtggcaagagttttaccacctttgatggaactgttttcaaatacggaccttgcagccacatcctggccagagatattcatagcagtagttggtcaatatcgggtaaggaatatacttttacgtttaggcactgtacttattgtcatcatttgttcttcatccgtagtccatcagcagtgtagcgatgagacacgtaaagtctgtcacaaggtgatcaccattcaagacaccgaggctggcaatgagttgatccttttgcctcatctgaagctcaagtttaatggctatgagttcacagtgcagcaattgataaattcgcccatttgcaaggcttcattcgttgtttcccagccgggcaagactcttctggccgtgtccaccaaatatggcttctgggtgcagctcgatgacattggaatcgtcaaagtgggcatatcatccaagtttattcgcacagtcgatggattgtgtggctactacaatggaaaccaaaaggatgacaagagatcaccagatggtcagattattccaaataccgaaaagttcggcgacagttggtatgataagcggatacccaaggaccaatgtggagatcttaagtgccccagggagatgcaggcaaaggccttgcagctgtgtaacatcattcagtaagtattcagagactatttcaatacaaaatacaaaaaattgatatattatccttttttatagtcatccaacctttgctcgttgccacaaggcagttaactacaagcaattccttaacaattactgcctcgaagctgcctgcaattgcatgatggccaacaatggagatcctgccgcctgcaagtgtaacatcttggagagctttgtgaaaaagtgtcttagtgtaaatccactagttcaattgactacatggagagctgtggcccagtgcgagattaattgtccctcgccattagtgcacaccgactgttacaagagacgttgtgagccatcttgcgataatgttcacggagacgactgcccagtacttccggatgcctgcttcccgggatgttattgtcccgagggaactgtccgtaagggtcccaactgcgtacccatatccgagtgtaaagactgtgtgtgcaattcattgggcgcctccaagtacatgacctatgaccggaagagttttagctttaatggaaactgcacctatctgctgtcacgcgatgtcgtcctccctggtgtccacacattccaggtatacgttagcatggatgactgtaagaaactgggacagccaactccagtggaaggcggcagctgcgctaaatcactgcacattctcaacggtgaccatgtgattcatgttcagcgcgttccacagaaacccaaatccctgcaggtcctggtcgacggattcgaggttaagaaaataccatacaaagatagttggattagccttcggcaagtggtaggcaaggaactggtgctctcccttccggaatcacatgtggaattgactgcctcctttgaagacctgatattctccttgggcgtaccaagtatcaaatatggaagcaaaatggagggactttgcggcgactgtaatggcaatgcaggcaatgatctccagccgaatccagctaaaaagaaagcaggagtggatgtcatccaaagctggcaggcggatgagcctaagctgggattggttgaagagtgtctaagtgaggatgtgcccaaggagcactgcatacccctaccgccagagaaggatccctgtttgcagttctacaatgctgaattatttggcaagtgtcctttggctgtggatcccattgcctatgtctccgcctgtcagcaggacatctgcaagcccggaaacacccagcaaggagtctgcgtggctctggccgcttatgccaaggagtgtaaccagcacggcatatgcaccaattggagaagaccgcaactgtgtccctacgaatgtcccagcgatatggtttacgagccatgcggctgtgctaagaattgcgataccatcaaggcattatccgaatttgatgcagtgagccttaaaaacgaggctgtagttcataccgttaagactgatgaaatgtgtttgagttcggagcgattcgagggctgcttctgtcctcctggaaaggtaatggatggtggacagtgtgtgcccgaaatagcctgcacaaagtgcgatgatggactccacttgcctgacgagaaatggaagaaggataagtgcaccgaatgtcagtgtgattctaaaggaaagaccacgtgtgtggaaaagaagtgccaggtggaggaaaatatctgcgccgaaggctatagacctgagaccatagtcagcgtggatgaatgctgtcctagatatcgatgtgtcccggagacgaaggacccatccaaactgtgccttgctcctctagtgcccatttgcggtcctggacaatttaaaaaggaaaagaaggatgtcaatggttgttcgcagtacatatgcggtaaggctttatagctcccctatatatacagtgtttatttaaccataatattcctcagagtgcataccgaaggaccagtgcgaaataattgagctgcgggagctgcttccaggcgagatcattgtgaatgtagaagaaggctgctgccccactcagaagattgagtgtaagccggagacttgccccaaggcgcctgttaactgtcaagaacgattctacgaagtaaagaccatcaaggagccaggaatgtgctgctccaagcactcatgtggtagggcaaatatcctcgttattgaaaattcgcttttaaaaaatactcacttcactttcagtacctcccaaggatctgtgcattgttcagtatgagctcgacgaagccacaaagttcaccaagacagtgggtgataagtggacccatgccaaggaggtttgcaagcaggagacatgttcctatggtccggatggcaatgcccaggttgtcagcactttggaacagtgtctcactgactgcgccccaggattcagctaccagaacttggacaaaaccaaatgctgtggcaagtgtgtccagacttcgtgcatctttgagcaaaaactatacgaagtcaacgcactttggaagtcggcggacaattgcactacctacagttgcctgaagaaggatggccaatttttggttaccacctcgagagaagtatgtccggatgtgggtagttgcctatcccacctgttgtaccaagatggctgctgcaaacgatgcaagtcggaaccattggtggaggacaaatgtgagtaaagtcctagatcccaggtccggaccgtcttaattccttgttctttgtagcatcttgtttacccgtttccttggccgagtcgcgtacgaaggagattctcaagttccctgtgcaaggacatggaacatgtgtgaatgccgatcccattcagggcttcaccgactgcgagggtgcctgctcctctggttccaagtacaatacactcacggacatgcacgagaagttctgtacttgctgcagcataaaatcctatcatccgatttccgtgaaaatgatttgcgatgatggtcacacatttacacagaaggtttgtcacattttctatttaattcccattaagtatttaatgatatacttattccagcacgaggtgccctccaactgcggatgctcgccgtgctcagagttttcggactctgcaatcgatgtgcgaatgcagcaggatgcgcagtctccactactccaattactcggcaaccatagacattaataacttattggttgtctgagaaagtcatttcgttagttttaagaatgtcgagcataaaaataaaatttttaaaaaaattaaagtagtttgtatttgatttgctataagatgtttttattcacacaacaaaactctacttgtaactcaacgttagccgcatcaaacatttgcatactcatcggggtttttatatacacatacacccagaaaaggtagaatattctacaaatattctacattttgcttacatctatcatatttgcaagtaatcgtttataaaattaggcggatcaacgtgatcagtaaagtctcacccctcttgacaagcaaaacagtatttaccaaaaattaaatgttgtgtcgagaaatcgcacagaagtttcgaatttcataattgacatttacgtgaaaaaaacattgtagttatacaaaatatacgtaacattttaacaacatttgtaacatatactaaatatattcataaattcatatatacatgatgttggggatataacaattcaagaaattcgttctgggctccctacgtttctagatactagaagataattggcgaagaggataatgattatacagcgtaaaaatataaatgtagattacagataagtgggtctaattctaagcaaataaacatgttgatactacagctaaaaaatggaaattttgcgaattacttctaattttttatgggaacagcggacatggggatcatggaataatttaaatatccttggtggctaaagctattttgtgcccgggcgaagagacgttgttggtggtggcattggccaaccagcaggcactgcctcagacggacttgataaggcgatcctgccgctcgaagagtttcgtcttgttggccagtgtctcagtggctgttgcaatgacaccactggtagcagccatggcggctgatgtggcactggccagccgctcctgcatcacggcggtcaagcactcccggaatcccagcaggaattcatctgcattctcccggttgaagcacatgggtggctttagcttgatcacgttatcgttgggaccgtcggaggaaacgagcaccc

SEQ ID NO: 41378 - DNA, 11768 bp, DROSOPHILA
gtgtaaaagtttttaaaagtgagttctaagctggattttaaacaggactaacagcttggcagtgtccttgcagaaatggattaccagtgctaactatcaacaggattttcctgtgtatacaattaaaccaacaatttccgattagcctaacaaaatggctaacaaagtgatttttgtggcgttgtggctgctttttatttcatctgttttgacagagaatggagacattataataaccgatgatgacgacgaggatatcaacccgctgctccaggccgcaccggaagtcgtcgataaggagaacgaacggaacgaacgccacattagcttcaacatcctcaaagccccagcagttagtgcacgatacacttatggcggttctgaaggaggccgtagtggattcggaggaggatatggtgttggtggaggtggaggtggtggttatggcgggataaagacgtctcatgccgctggaggactgcttaccaaaaccttgggctttttaggcatgggtggccagggaagtcagggcaacttttacggaggcggaggacactttctagcagccttcggaaaatgttcagccctccaactgccgtccaatgttcagtctgaatgccacaatggtcgttgcaaagtcttctgcccaactggctatagtttcgcacaggacgtttcagtcctggagatgttctgcagcaatgatggatggatcataggcaactccgtgtttgcggaggtgccaccctgtcaggcacaatgtacacctccatgccaaaacaatggcatctgcatttccgccggagtgtgccagtgtccggagaactactacggtccgctgtgtcagcaaaagaagtccatatgtgcatcctttccgaaggcaccgaaaaactccaaagtatcctgcaagaacaatatgtgccacgcggagtgcatgagaggatttcagtttccagacggcagcggaattacgaacattgagtgccgcaatggccagtgggtgcacactaaaactgggctatccaaaactccagattgtgctcctacttgtgcgcccgcctgccaaaacggaggtcagtgcattagtttcaatgtctgtcagtgctctaagatgttccgcggagaccattgtcaatataacattgacagatgcaatgtgactaatacaaattttaatggaaactacaagtgtgcctacgaaatggacgacgctcgttgcacatttagttgtcctcaagtaccgggattaaaaatccaaggacgaattgacatagagtacaagtgtaactatctgcaaggacaatatctgcctgccccgcttccaaagtgtattttccctcctggatacaccgttcggtccacatcatccatgcaaggtgtaacgcatcagaatggcgtttatcatcgcggaatgagtggggaaatggcttatgaactccaaacagaacgtcaaaaactacttgctctgctcgcaaaatatcgggatctggaaagaagaagtgaatggtggtcttcggaggaaactgttgtcaccatgagcagttattccttgtaccagagcaacaatttggatatcgtcatcgacaaaaccccacgaccagcactttgcaccacttggggtggtattaacatgaaaacctttgatggtctggttttcaaggctcctctatcctgttcacacacgctaattacagacaaggtctcgggtacattcgacattatcctgaaggcttgtccttatggctctgggtatggctgcgcacacaccttgaaaattctatggcaatcggttctatacacttttgaaaacctgaatggcaccatgcagctgaccacaccgattaagaagcttccaatgcctgtccaggttatgggcatgaaagtcatgccggtggcccagcatgtgcagatcgatctcgagtctgtaggtctcaagctggattgggatcatcggcagtatgtgtccgtgcaggcgggaccccaaatgtggggaaaagttggaggtctctgtggaaccctggatggtgatcctaacacggacttgacctccagaacgggcaaaaagttggccacggtcaaggccttcgcagatgcctggcgcgtcgaggatcgcagtgaattgtgccaggtggagaatagtgcagagatggagttcggtatggattcctgtgagcaatctaagctacaaaaggctgtatcagtctgtgagcgtctgttggccaacgaaaagctcggtgactgcattaaaccctttaattacgacgccctgatccgcacctgcatggcggactactgcaattgtgccaatcgagagcacccggaaagctgcaattgcgatgccattgccatgctggccaaggagtgcgccttcaagggcattaaactggagcacggttggcgcaatctggaaatctgtcccatcagttgtggctttgggcgcgtttatcaggcctgtggtccaaatgtggagccgacttgcgattcagacctagcgctaccagcctcaaaaggcgcatgcaacgaaggctgtttttgtccggaaggaactgtgcagtacaaggaggcgtgcatcactcgagaactttgcccgtgttcccttcgcggcaaggaattcaagccagagtcgacggtcaaaaagaattgcaacacctgcacctgtaagaacggtcagtggcggtgtacggaggataaatgtggcgcccgctgtggggccgttggagatccgcattatcagacgttcgatggcaaacgatatgattttatgggaaaatgctcctatcatcttctgaagacccaaaatacctcggtagaggcggagaatgtggcttgctcgggagccgtttcggagtcaatgaattttgccgctcccgatgatccgtcatgcacaaaggcggtgaccatccgatttatcctgcgcgatggcaccccatcggtgattaagctcgatcaaggactgaccacgatagttaatgacaagcccatcgccaagttacccaagatgctgggcctgggcgaggtcctcatccggcgggctagttccaccttcctgactgtggagttcgcagatggcattcgcgtctggtgggacggagtttcacgggtgtatatcgatgcaccgcccagtttgcgaggccaaactcagggcctttgcggaacctttaactccaacacacaggatgactttctaacgccagagggcgatgtggaaactgccgtggaacccttcgcggacaagtggcggacaaaggacacttgtcaatttaaggctgaaacccatcaaggacctcatccctgcacgttgaacccggagaagaaagcccaggctgagaagttctgtgattggatacttcaggacatcttccaggactgtcactttctggtggagccagagcagttctatgaggattgcctctacgatacatgcgcctgcaaggatgaaatgtccaagtgcttctgtcccatcctttccgcctatggcacagaatgcatgcgacagggtgttaagacaggctggcgaatgtctgttaaggaatgcgctgtaaaatgtcctttgggccaagtgtttgacgagtgcggtgatggctgtgccctatcctgtgacgatctccccagcaaaggatcttgcaagcgggagtgcgtcgagggatgtcgttgtccccatggagaatatgtcaacgaagacggcgagtgcgtgccgaagaagatgtgtcattgcaattttgacggcatgtccttccgaccgggctacaaagaggtgcgaccaggagagaaattcctagatttgtgcacctgcacagacggcgtgtgggactgccaggatgccgagccgggggacaaagataagtatccgccatcatcagagctgcgctcaaaatgtgccaagcaaccctacgccgagtttaccaaatgtgcgcccaaggaaccgaaaacgtgcaagaacatggacaagtatgtggccgactcttcagattgtcttcccggatgcgtttgcatggagggatacgtatatgatacttcccgcttggcctgcgttctgccagccaactgctcctgccaccatgccggaaagagctacgatgacggcgagaagatcaaggaggactgcaatctctgtgagtgcagggctggcaactggaaatgctcgaaaaatggctgcgagtctacgtgcagcgtttggggtgattcccacttcaccaccttcgatggccacgacttcgacttccagggagcttgtgactatgtgcttgcaaagggagttttcgacaatggcgatggcttcagcataaccatccagaatgttttgtgtggcactatgggtgtgacttgttcaaagtcgctggaaatcgctctcactggccatgctgaagaatcgctgcttctgagtgcggactctgcgtacagcactgatcccaataagacgcctattaaaaagcttcgtgacagtgtcaactcaaaaggtcacaatgccttccacatctacaaagctggtgtttttgtggtggtggaagtgatcccgctaaagttgcaagtgaaatgggacgaaggcacgcgggtttacgtgaagctgggcaacgagtggcgccagaaagtcagcggcctgtgcggtaactataatggcaatagtctggatgatatgcagacaccctcgatgggattggagacgagtcccatgctctttggccatgcctggaaattgcagcctcactgctcagctccagtggcgcccatcgatgcctgcaaaaagcatccggagcgcgagacctgggcgcaactgaagtgtggagctctgaagtcggatctgttcaaggagtgccatgctgaagttcctctggaacgtttctggaaacgatgcattttcgatacgtgtgcctgcgatcagggcggcgattgcgagtgtctctgcactgctgtggctgcctatgcggatgcttgtgcccagaaaggcatcaatattcgctggagatcacagcatttctgccccatgcaatgtgatccccactgctcggactataaagcctgcactcctgcctgtgctgtggagacatgtgacaacttcctcgatcagggaatcgctgagcgcatgtgcaaccgtgagaactgcctcgagggatgccacatcaagccgtgcgaggatggattcatttacctaaacgacacctaccgcgattgtgtgcccaaggccgagtgtaagccagtgtgtatggtgagagatggaaagacattctacgaaggtgacattacctttacggattcatgtgccacctgtcggtgctccaagcgcaaggagatttgcagcggtgtaaagtgtgatgttcctgcaacgacaggccttccggctccactagttgagggcacgactctaccaacgcctctggctactcaaaatcagaccaagtgcgtcaagggatggactcggtggtgcgacaaggatcgggatacatcggacaagagtgtgcgactaaatgatgaggagaaggtgccacgctacgatagaatggaaaatgtctatggcacatgcctaaagcaatatatgaccaaggtggagtgccgggtgaaggatacccacgaggcaccggagcaaatggacgagaatgtggtttgcagtctggaagagggtcttcggtgtattggaaaatgccacgattatgaactgcgcgccttttgccagtgcgatgaggaactagagcccgaattgcccaagcccactgaaaagccacaacttggtctggcctgcgatgccgccgttgtggagtacaaggaattcccaggagattgccataagtttttgcattgtcagcccaagggagttgagggcggatggatctacgtggaaaaaacctgcggggagtacatgatgtttaatccgaccatgttaatttgtgatcatatcgcaaccgtaacagagatcaaaccaaactgtggcttgaaacccgaaccagaaccggaatttgagcccatcaagcaatgtccaccaggcaaaataaagtcggaatgtgccaatcagtgtgaaaatacgtgtcattactatggcagcattctaaagaagagaggtctctgtcaggttggtgaacactgtaagcctggttgtgtggacgagctgcgaccagattgccccaaacttggaaagttttggcgcgatgaggacacttgcgtccatgctgatgaatgtccttgcatggacaaggcggaacactacgttcagccgcacaaacccgtccttggagagtttgaggtgtgtcagtgcatcgacaatgcgttcacctgtgtgcccaataaaccagaaccagttcccaaggatgaagatgacgatctggatctggtatctgtggttcccatttaccctgttaccctaacaccacctctacaatgttctccagagcgccttattcccaagattgaaaaccctgcacattcactgcccgatagcattttcaatgccagttctcaattggcgcctgaacatggcccgaaaatggctcgtctgaccaaagaacaaccgaggggcagctggtcacctagcattaacgatcagatgcagtatctggaactaaactttgcgaagccagagccattctatggtgtggttatggctggtagcccggagtttgataactacgttactctattcaagatccttcacagccatgatggaatcgcctaccattatctggtggacgaaacggaaaagcctcaaatgttcaatggccccctagattcaagggctccagtccagactctgtttaagatccccattgaagctagttcccttcgcatttatccccttaaatggcatggctccatcgccatgcgtgtggagctcctgatctgtggagataaggaagagcctaagccagtgcccacagtttcaacaattctaccaatcactgagcgaccagctcgattggtagatttggaatgcattgatctcatgggcgtggatgagggtaaaatgtaccaggatcaagttcaatcgagcagtttgtggcagcaacccaatttgggaaagaaattacagcttctggagctgttaaagctatcgacaccactagcttggcgccccttggcaaatagtcaaaacgagttcattgagtttgatttcttggagccacgaaatatatctggatttgtcaccaagggtggtccagatggatgggtaactggctacaaggtgatgttctcgaagaagaaacccacttggaatacagttctctcaaccgacggacaggcacgcatcttcgaggcaaatcacgatgctgaaactgagcgcagacatcattttaagaatcccattctaacgcagtacattaagattgtgccggcttactgggagaagaacatcaatatgcgaatcgaaccactcggatgcttcttaccatatcctgaaatacaacgtcaagtgcccgttgaggagagcaagcccaccaagtgcaatatctgcgatggtgtgtcgacctccagttcgactactggatgtcagtgccaggatcaactcttctgggatggcaacacatgtgtacaacacaatctctgtccttgcatagagaactatgtaagctatccgataggtagcaaatttgagaactcagcttgcgaggattgcgtctgtgtgcttggtggccataagaattgcaaacccaagaagtgcccgccatgtctgggcggtaaattgcgtccagtgattaccagcgactgtttctgtaagtgcgaaccttgtcccaaacaccaaagattgtgcccgtccagtggagattgtatacccgaaattctgtggtgcaatggtgttcaggattgtgctgatgacgaagatgccagttgcagtgattcattcactgttgagccggacgtcagccgagaaaagaatgagactgaagtcattacatgccccgtccccgtttgtccgcctcaaatgaaaataagaattacggagaaaaagtctagaaagatgtcaaagatgttcaccttctcgaagcaggtgtcaatagtggacgatggaacgaccatcacaaagaccaagttcatctcgtccaaggaacaaattctggctatgccgaaccgggaattggactttcaactggaagagcagtgcgatgagttcacttgtgtgcccattcccagcaagcaagtggacaaaaacgagactgtcacctgcacggaaccaaagtgtcctgagaaatacgatgtggaattggacatgagtgcgtcgaaagtgggtgactgtctgagatacagctgcgtccttcggcccaacaaagacgatgtgtgtgaaatcagtggcaagagttttaccacctttgatggaactgttttcaaatacggaccttgcagccacatcctggccagagatattcatagcagtagttggtcaatatcggtccatcagcagtgtagcgatgagacacgtaaagtctgtcacaaggtgatcaccattcaagacaccgaggctggcaatgagttgatccttttgcctcatctgaagctcaagtttaatggctatgagttcacagtgcagcaattgataaattcgcccatttgcaaggcttcattcgttgtttcccagccgggcaagactcttctggccgtgtccaccaaatatggcttctgggtgcagctcgatgacattggaatcgtcaaagtgggcatatcatccaagtttattcgcacagtcgatggattgtgtggctactacaatggaaaccaaaaggatgacaagagatcaccagatggtcagattattccaaataccgaaaagttcggcgacagttggtatgataagcggatacccaaggaccaatgtggagatcttaagtgccccagggagatgcaggcaaaggccttgcagctgtgtaacatcattcatcatccaacctttgctcgttgccacaaggcagttaactacaagcaattccttaacaattactgcctcgaagctgcctgcaattgcatgatggccaacaatggagatcctgccgcctgcaagtgtaacatcttggagagctttgtgaaaaagtgtcttagtgtaaatccactagttcaattgactacatggagagctgtggcccagtgcgagattaattgtccctcgccattagtgcacaccgactgttacaagagacgttgtgagccatcttgcgataatgttcacggagacgactgcccagtacttccggatgcctgcttcccgggatgttattgtcccgagggaactgtccgtaagggtcccaactgcgtacccatatccgagtgtaaagactgtgtgtgcaattcattgggcgcctccaagtacatgacctatgaccggaagagttttagctttaatggaaactgcacctatctgctgtcacgcgatgtcgtcctccctggtgtccacacattccaggtatacgttagcatggatgactgtaagaaactgggacagccaactccagtggaaggcggcagctgcgctaaatcactgcacattctcaacggtgaccatgtgattcatgttcagcgcgttccacagaaacccaaatccctgcaggtcctggtcgacggattcgaggttaagaaaataccatacaaagatagttggattagccttcggcaagtggtaggcaaggaactggtgctctcccttccggaatcacatgtggaattgactgcctcctttgaagacctgatattctccttgggcgtaccaagtatcaaatatggaagcaaaatggagggactttgcggcgactgtaatggcaatgcaggcaatgatctccagccgaatccagctaaaaagaaagcaggagtggatgtcatccaaagctggcaggcggatgagcctaagctgggattggttgaagagtgtctaagtgaggatgtgcccaaggagcactgcatacccctaccgccagagaaggatccctgtttgcagttctacaatgctgaattatttggcaagtgtcctttggctgtggatcccattgcctatgtctccgcctgtcagcaggacatctgcaagcccggaaacacccagcaaggagtctgcgtggctctggccgcttatgccaaggagtgtaaccagcacggcatatgcaccaattggagaagaccgcaactgtgtccctacgaatgtcccagcgatatggtttacgagccatgcggctgtgctaagaattgcgataccatcaaggcattatccgaatttgatgcagtgagccttaaaaacgaggctgtagttcataccgttaagactgatgaaatgtgtttgagttcggagcgattcgagggctgcttctgtcctcctggaaaggtaatggatggtggacagtgtgtgcccgaaatagcctgcacaaagtgcgatgatggactccacttgcctgacgagaaatggaagaaggataagtgcaccgaatgtcagtgtgattctaaaggaaagaccacgtgtgtggaaaagaagtgccaggtggaggaaaatatctgcgccgaaggctatagacctgagaccatagtcagcgtggatgaatgctgtcctagatatcgatgtgtcccggagacgaaggacccatccaaactgtgccttgctcctctagtgcccatttgcggtcctggacaatttaaaaaggaaaagaaggatgtcaatggttgttcgcagtacatatgcgagtgcataccgaaggaccagtgcgaaataattgagctgcgggagctgcttccaggcgagatcattgtgaatgtagaagaaggctgctgccccactcagaagattgagtgtaagccggagacttgccccaaggcgcctgttaactgtcaagaacgattctacgaagtaaagaccatcaaggagccaggaatgtgctgctccaagcactcatgtgtacctcccaaggatctgtgcattgttcagtatgagctcgacgaagccacaaagttcaccaagacagtgggtgataagtggacccatgccaaggaggtttgcaagcaggagacatgttcctatggtccggatggcaatgcccaggttgtcagcactttggaacagtgtctcactgactgcgccccaggattcagctaccagaacttggacaaaaccaaatgctgtggcaagtgtgtccagacttcgtgcatctttgagcaaaaactatacgaagtcaacgcactttggaagtcggcggacaattgcactacctacagttgcctgaagaaggatggccaatttttggttaccacctcgagagaagtatgtccggatgtgggtagttgcctatcccacctgttgtaccaagatggctgctgcaaacgatgcaagtcggaaccattggtggaggacaaatcatcttgtttacccgtttccttggccgagtcgcgtacgaaggagattctcaagttccctgtgcaaggacatggaacatgtgtgaatgccgatcccattcagggcttcaccgactgcgagggtgcctgctcctctggttccaagtacaatacactcacggacatgcacgagaagttctgtacttgctgcagcataaaatcctatcatccgatttccgtgaaaatgatttgcgatgatggtcacacatttacacagaagcacgaggtgccctccaactgcggatgctcgccgtgctcagagttttcggactctgcaatcgatgtgcgaatgcagcaggatgcgcagtctccactactccaattactcggcaaccatagacattaataacttattggttgtctgagaaagtcatttcgttagttttaagaatgtcgagcataaaaataaaatttttaaaaaaattaaa

SEQ ID NO: 41379 - protein, 3843 aa, DROSOPHILA
MANKVIFVALWLLFISSVLTENGDIIITDDDDEDINPLLQAAPEVVDKENERNERHISFNILKAPAVSARYTYGGSEGGRSGFGGGYGVGGGGGGGYGGIKTSHAAGGLLTKTLGFLGMGGQGSQGNFYGGGGHFLAAFGKCSALQLPSNVQSECHNGRCKVFCPTGYSFAQDVSVLEMFCSNDGWIIGNSVFAEVPPCQAQCTPPCQNNGICISAGVCQCPENYYGPLCQQKKSICASFPKAPKNSKVSCKNNMCHAECMRGFQFPDGSGITNIECRNGQWVHTKTGLSKTPDCAPTCAPACQNGGQCISFNVCQCSKMFRGDHCQYNIDRCNVTNTNFNGNYKCAYEMDDARCTFSCPQVPGLKIQGRIDIEYKCNYLQGQYLPAPLPKCIFPPGYTVRSTSSMQGVTHQNGVYHRGMSGEMAYELQTERQKLLALLAKYRDLERRSEWWSSEETVVTMSSYSLYQSNNLDIVIDKTPRPALCTTWGGINMKTFDGLVFKAPLSCSHTLITDKVSGTFDIILKACPYGSGYGCAHTLKILWQSVLYTFENLNGTMQLTTPIKKLPMPVQVMGMKVMPVAQHVQIDLESVGLKLDWDHRQYVSVQAGPQMWGKVGGLCGTLDGDPNTDLTSRTGKKLATVKAFADAWRVEDRSELCQVENSAEMEFGMDSCEQSKLQKAVSVCERLLANEKLGDCIKPFNYDALIRTCMADYCNCANREHPESCNCDAIAMLAKECAFKGIKLEHGWRNLEICPISCGFGRVYQACGPNVEPTCDSDLALPASKGACNEGCFCPEGTVQYKEACITRELCPCSLRGKEFKPESTVKKNCNTCTCKNGQWRCTEDKCGARCGAVGDPHYQTFDGKRYDFMGKCSYHLLKTQNTSVEAENVACSGAVSESMNFAAPDDPSCTKAVTIRFILRDGTPSVIKLDQGLTTIVNDKPIAKLPKMLGLGEVLIRRASSTFLTVEFADGIRVWWDGVSRVYIDAPPSLRGQTQGLCGTFNSNTQDDFLTPEGDVETAVEPFADKWRTKDTCQFKAETHQGPHPCTLNPEKKAQAEKFCDWILQDIFQDCHFLVEPEQFYEDCLYDTCACKDEMSKCFCPILSAYGTECMRQGVKTGWRMSVKECAVKCPLGQVFDECGDGCALSCDDLPSKGSCKRECVEGCRCPHGEYVNEDGECVPKKMCHCNFDGMSFRPGYKEVRPGEKFLDLCTCTDGVWDCQDAEPGDKDKYPPSSELRSKCAKQPYAEFTKCAPKEPKTCKNMDKYVADSSDCLPGCVCMEGYVYDTSRLACVLPANCSCHHAGKSYDDGEKIKEDCNLCECRAGNWKCSKNGCESTCSVWGDSHFTTFDGHDFDFQGACDYVLAKGVFDNGDGFSITIQNVLCGTMGVTCSKSLEIALTGHAEESLLLSADSAYSTDPNKTPIKKLRDSVNSKGHNAFHIYKAGVFVVVEVIPLKLQVKWDEGTRVYVKLGNEWRQKVSGLCGNYNGNSLDDMQTPSMGLETSPMLFGHAWKLQPHCSAPVAPIDACKKHPERETWAQLKCGALKSDLFKECHAEVPLERFWKRCIFDTCACDQGGDCECLCTAVAAYADACAQKGINIRWRSQHFCPMQCDPHCSDYKACTPACAVETCDNFLDQGIAERMCNRENCLEGCHIKPCEDGFIYLNDTYRDCVPKAECKPVCMVRDGKTFYEGDITFTDSCATCRCSKRKEICSGVKCDVPATTGLPAPLVEGTTLPTPLATQNQTKCVKGWTRWCDKDRDTSDKSVRLNDEEKVPRYDRMENVYGTCLKQYMTKVECRVKDTHEAPEQMDENVVCSLEEGLRCIGKCHDYELRAFCQCDEELEPELPKPTEKPQLGLACDAAVVEYKEFPGDCHKFLHCQPKGVEGGWIYVEKTCGEYMMFNPTMLICDHIATVTEIKPNCGLKPEPEPEFEPIKQCPPGKIKSECANQCENTCHYYGSILKKRGLCQVGEHCKPGCVDELRPDCPKLGKFWRDEDTCVHADECPCMDKAEHYVQPHKPVLGEFEVCQCIDNAFTCVPNKPEPVPKDEDDDLDLVSVVPIYPVTLTPPLQCSPERLIPKIENPAHSLPDSIFNASSQLAPEHGPKMARLTKEQPRGSWSPSINDQMQYLELNFAKPEPFYGVVMAGSPEFDNYVTLFKILHSHDGIAYHYLVDETEKPQMFNGPLDSRAPVQTLFKIPIEASSLRIYPLKWHGSIAMRVELLICGDKEEPKPVPTVSTILPITERPARLVDLECIDLMGVDEGKMYQDQVQSSSLWQQPNLGKKLQLLELLKLSTPLAWRPLANSQNEFIEFDFLEPRNISGFVTKGGPDGWVTGYKVMFSKKKPTWNTVLSTDGQARIFEANHDAETERRHHFKNPILTQYIKIVPAYWEKNINMRIEPLGCFLPYPEIQRQVPVEESKPTKCNICDGVSTSSSTTGCQCQDQLFWDGNTCVQHNLCPCIENYVSYPIGSKFENSACEDCVCVLGGHKNCKPKKCPPCLGGKLRPVITSDCFCKCEPCPKHQRLCPSSGDCIPEILWCNGVQDCADDEDASCSDSFTVEPDVSREKNETEVITCPVPVCPPQMKIRITEKKSRKMSKMFTFSKQVSIVDDGTTITKTKFISSKEQILAMPNRELDFQLEEQCDEFTCVPIPSKQVDKNETVTCTEPKCPEKYDVELDMSASKVGDCLRYSCVLRPNKDDVCEISGKSFTTFDGTVFKYGPCSHILARDIHSSSWSISVHQQCSDETRKVCHKVITIQDTEAGNELILLPHLKLKFNGYEFTVQQLINSPICKASFVVSQPGKTLLAVSTKYGFWVQLDDIGIVKVGISSKFIRTVDGLCGYYNGNQKDDKRSPDGQIIPNTEKFGDSWYDKRIPKDQCGDLKCPREMQAKALQLCNIIHHPTFARCHKAVNYKQFLNNYCLEAACNCMMANNGDPAACKCNILESFVKKCLSVNPLVQLTTWRAVAQCEINCPSPLVHTDCYKRRCEPSCDNVHGDDCPVLPDACFPGCYCPEGTVRKGPNCVPISECKDCVCNSLGASKYMTYDRKSFSFNGNCTYLLSRDVVLPGVHTFQVYVSMDDCKKLGQPTPVEGGSCAKSLHILNGDHVIHVQRVPQKPKSLQVLVDGFEVKKIPYKDSWISLRQVVGKELVLSLPESHVELTASFEDLIFSLGVPSIKYGSKMEGLCGDCNGNAGNDLQPNPAKKKAGVDVIQSWQADEPKLGLVEECLSEDVPKEHCIPLPPEKDPCLQFYNAELFGKCPLAVDPIAYVSACQQDICKPGNTQQGVCVALAAYAKECNQHGICTNWRRPQLCPYECPSDMVYEPCGCAKNCDTIKALSEFDAVSLKNEAVVHTVKTDEMCLSSERFEGCFCPPGKVMDGGQCVPEIACTKCDDGLHLPDEKWKKDKCTECQCDSKGKTTCVEKKCQVEENICAEGYRPETIVSVDECCPRYRCVPETKDPSKLCLAPLVPICGPGQFKKEKKDVNGCSQYICECIPKDQCEIIELRELLPGEIIVNVEEGCCPTQKIECKPETCPKAPVNCQERFYEVKTIKEPGMCCSKHSCVPPKDLCIVQYELDEATKFTKTVGDKWTHAKEVCKQETCSYGPDGNAQVVSTLEQCLTDCAPGFSYQNLDKTKCCGKCVQTSCIFEQKLYEVNALWKSADNCTTYSCLKKDGQFLVTTSREVCPDVGSCLSHLLYQDGCCKRCKSEPLVEDKSSCLPVSLAESRTKEILKFPVQGHGTCVNADPIQGFTDCEGACSSGSKYNTLTDMHEKFCTCCSIKSYHPISVKMICDDGHTFTQKHEVPSNCGCSPCSEFSDSAIDVRMQQDAQSPLLQLLGNHRH

SEQ ID NO: 41380 - DNA, 7642 bp, DROSOPHILA
ttagctatatactagctattaaaaaggtccttgaaataaaactattaaatgaagtttactcttttgaagttttctctgtatatgcagacaagctctgtttttcgaggtgccagaccgctgcttacaaaacacttggctgtccatccccatatgcatgtgtatctcaatttcgctgggcggctgcacctcgcaaataccaaacttaagttgagttttaagccatctcgaagtttgctcttgcagcctcagcatcattgatgaaagggctgccttaaagtggaatacttcagcagttcctagtctttctttgaattaggtctctggatgaaattaataacttatggtcattttcttgtatttcactgacatttaattatatattaagaatattcgtttgcataaggtatatgataactcaaaaaaacatgtcctttggatcccactacatgaataaaataagcatttgtcttctcaaagtattgttcttaaaataaaatataattaagtggacatcccaccacacctgccttgcgaatgatcatgtgtctgaagtccccgtacgcggaacacaccgagccccatcgtaaccccgcctagtttgacattttgccagctagctcgcccatggaaagagggttgcgttgttggaattggaaccgacttgtactgttggcaagtgcgccttggtattggtgttagtattggtattgacgtggtcgtatgctataacagtgcgatactgcggcgctcacctggttcacctggtcgtcgatttggatgcctgttgtttctgtttttgctgcagcacgctacttactagatgacttgtttgttctgcagccgaggcagcttcgtatttgctcggggtccgggtttttggtctcgggctagtcggtttttggtctggttgggtttttggcttttggacgaccgaacgaacgagagcgataagattccgtgatgtggcactaagcgctgttcgttgtttactgctctgtgcatgggacgcctctgttgtttggtgcccgtcatcgtggccagccagccatagaggcacactcaccaacacagacgcactgcgaacccatacatatatagcgcatgccatcgtataccacatatagcgcggcgacatcaggtcgttatagtcagtctagttggcatttcgtgcttaccttatgccgctaactaacttcttgatgagcgcaaaaaacagcggaggagaaaaaacaggcctcccgtaaataccatccataccataccttgccatacaacacaatactgaaatgccatacccagaccaagaccaaggcaaagaccaacggggcgtcgggcatcggtggcgtatgcgtgctattttcagccgcattaaaagcttatggccatggccaggaaaaccgagtcgccgagtgaaagcacagagcttgcacagagccaagcgttgataactggccatatgttacccaatccatcgccagccaagactatgaattcactgaatatttcaattggctggacatatccttacgcaatttgggttacactaagtgcgccatttgttgaccacacatacagaaattatttggatatggttgtaatgtattttagcttatttttattttattcatgtatatcggttgcaattataaatttaatttaccgacctcattgaatattaatataatcttaaaaaaaagaaatgatatatttatacaacctgcgcagttggagctaaagcgtcccaagagtcgcatatacctaaacgaaactgaagttggacccttggaggagctccccttttcatcttacaatccgcgaatcctgcaagaaggcttagaaggagaaaacctcaagaccttcgatatcattgagggctgcagtccacaggatttgtggacctggaatgtgggctaccagaagagagaggagcatatggatcaggagttcatatccgcctccctgccgaaatatggtgtgtagttagcgaatagaactatcttttttccaagagatttgcattcctaatctaggcttttcaaaatttcacagaaaacgacggcgaacttacgctctataatataccacaacagctggaaaagacgtttactgctgagattgtgtttgggaatcggaacatctatcctgaaccaaagaaggagcccaaccgtttgcagtgagtaatctgatttctttgctagtaatgcttagttactaataccctccaataaaatatataactcctccttacattaaatccaggtactattatcggcctagtgaaatcggtgccattatagtcgctttcgtagagacctttcgtttgaatcccgatttctggacgggatctacaatggatgggattctaaagcgcggagtgaaattgaccaaaaagagcgccgacctaaactacaagtcagacgtgaatgatttcgatataatccaacaggttgcggaacgagacgccgccgttgagattaagatacacttctcgggacttttgaaaaacgaaccaaatatgtacaaagcactttccctattcttctccaaatacaatgcctgcatctttacgtcccgggatctcttcctgctgatctggaagcgctgcttaaactcgtactatatcttcgatcccaatggacgtgatgaaaactgcgaacggaatttcgaggagggaaagtgctcactgatggccactcgctatacggagcacttggtccatttgatcaccaagtttagcgatctgcagccgcaggatgaattcaatatttttgagatatcgctgactcagtatggaaaacttaaggagccaccaattaattcggcggaaaacgaggagtatcacaaactctgggcgccagtcaatgagaactttgctgtaaaaactgcggccacaggtggcattcaccaaccgatctccggaaatgagaagaatgcatcgctagttgtgtcattgatagctctgatttactcggaatttgagctagccaagctatggaaaccgggtactgtggatgacatcataaggtatggtgtagcctactacaaaacccttcggaagaagttccgcctggatggaaaacgctggaagaataagaagccacatttgaatgtggtggatctgccagaaatgtttctcatgggtgcatttaaggccaccgttcgaaagcatccattcatgatcaatggtcatgtggcggattgcaggaactatttggaatcccagctaacgatggcactgcaccagttgttcaacttgccccagtggccatctgccctgcttcagatcgataattcagtgatggctgtatggcgggatagggagttcttctatgtcttcgatcccttccggcggaatcgaactggcctggtggtggatcccgatgactatagcataaagggattggccgtgctccaattgcacgccaccttcgactcctttgtccgtgtaatctacatgaatgccctgaagatgcgacgtggtggtaagttctttatccatggcgtgaggacaggctgcatccgaccgctgcaggtgatgaccccgcagacaaacagattcccgggattgcagatgggtctgcccaccttcacggatgaaccaccaatgccggagctgaaacagaagaagagtattgagagtataccggaagaggatcgcttccccaccgtcgatgaaaaggaaatggtagaggagctgatcaatatgatcatcaatagtattattaaggaactgccggaaccacaacccaagagaccacatctctataagccggcccaaaaggtcctcctgcgctcggatcaagagaatctgaaggctctgcggctaaggatcaagcggggctatgagctcggccaggaggaggaggaggatctgaagagagtgttaacggtggaggaggaggtggctctcaagagcaactttaaggcgttaccggacggctcctggatcattgtgggaaccacccaacttccccagttggacgaggagatggccaaactgggaggactcctggctgctttggtagccatggctgtttcagcaaagtataagctgtccacctggaattctgaactaatcgagtttagtttggaatctgcaaacagctttggagaagattaccaaaactacgagtacatattggcttgcctattggccaagaaattaccagatattgccattggcgagagcaacttcagtttggaggtgaagaaggtggtcaaatcctcgattatggttccccttcggcaagtccttgtggatctacttgtggacaataataggctgctactcgtttgccagcgtttctcctgcgtaatctttaagcgctacaactttgtatacatgttcatcggctttccctgcaacgcaattggctatagaaagggtggttccggtccagcttgtctccttcgatttgtggaactagatgcattaatcaagcgcattgaattcggctgcaatccgcagggttgttcggtaatgaacttcatcgtggcctgcgtccaaatggtggataataatcttcatggacgctttagaccttggagaaaggaggatgatgataaggaagtcaagcaggagacggccaggcagaagagattgcgcgagcaaagactggagaagatgcgctacatcgacgaggagctccaaaaggagaaagagcgcatacagatgttcctcaaggccaaacaggagcacatggaccgcaaggctggaattaaacgtaagggcgactacaaaatagtgtgctttgtttttgcagatccttgttgaaagtaattgaataaaaatgtttcataatttttttttaactttcagccgagtacagggacattggcatcgacgagggtgaaggcgaggagggcgacgaggaggacgacatgcttggtggtgaggagggcgaagaggaaggggaagaggaggtggaattgaagcacctaccaggcaagaagttacctaaggaagttcgccgggcatacaagcctcgtcccataatgtttggctacagaatgcgcgagaaggattgcaactttaagatccagggcagcctggcactcgagggacgcgacgagggctcattcaagaccatcaagccgtgctactttgcctccgccctggccatcatcagttgctccttgcgtcccttgaaccaatggaactcttaccgcatcgatagggtaatcaataatgccaaggcgatttccaagggcgtctgcgaattggaatcagtattcgaacgggtggtccgccacgtcaccattgatgattacgagtttgacatctggatccgttgctttgagccagctggcatgtggactcctaccccggtaaagaaacctggcactccggaagtaggtctcatgatcttcaagaagaagttcggcaagctgttgaatctgcgtaaatatatgatcatcttcacgcccaatggaagctatgccatctaccacgacgagttctttcacgtctttgatccctacggcagtatggagaaacctggacaggatgaggaagagcaggacgagggcgatgaggagggcggtaagaagaagaaaaagagatgccccaagggacctaagaggtggccggaaagaaatactgcctcctgggttctgctctatgatgttgattccctgcttaagtacatcgacgaacggagtgccgttaagaactggaaggagaagaaccagtataggttcttcgtggttgatgtcctgtcacacaaaaaggccgctccgaacgccagaatcctacagctgctcaccgatctctcgataccaatgacatgtacaaataagcagtatggcagtccggaatacgagatttgtgccaccaatgaatccctcggatggctagaactggagaactgcctgcccgtgtggagcagattgaatcgacggaatacggcgggcaagtatcgcaacctgcccatcagcaagataaagaagttcgacgtcgagatcgagggtcgcctatggtccctgtggggcaatctccatccagaggctcccgtcttcgaggacgaggtaaggggtcgtcagtatctgggctgctatgtgatggcctgctgtgcggccagcgtttatcggttgatggactggagtccacatctcctcgacaccattgtggtcagcggaagcacctacttcaaggagagcatcgatcagatcagcaaagaggactacgaattctcactggagaacctcaacatcgactgctctatggacaccatcaactttgtggtgcatatcgagcatgtgtgttacggaaaactgtatcgggtccctacgttcaaccgaatgaatctatccgaggccctgatctacttcttcagccactaccagttcggaattgtgagtgtccgaaaacggtcactggccattggattctgccccagtcacgatggcggatactttatgtacgattgccaggagaaggatcatccactgttccccaagcagcaaggtgcttcctacatgctgcgcacccggcacctacaggtgctcctctactgcgtagtggtcaccctaaatgtgccattctacaacatagacttcagcatccacaaggtagagatgttgcgcgaaggagccaccgtggagaacgaagaggaggagggtggcgaagagggtggtgcttgacgggatttagcagaaagagtcgcttggtatttgttggctatggagctctaaattcttttttacttattgtttggataaaatttatggaagcattaataaagtatataatctcttttttaatttgatagttttattagtcccaaagataaattaaaacagagatagaaaatacaaacgcttcagatgtgactaatataattcagacaggattatctaaagcatagtcgtcttcaaattcgaaatttaatatgctctttaagaactaagataaacatttaacaacaatcggatgacgcatcgtccgatgattcgatgtcgtcattgggtgactcgattttgagtgactcaatgccgcagacgacgctgttcctcggcttgtttatagtgatagccatcggcacggagttcgtgggcgggctccggttccagctgctcttgggtctccacatcggatggagccatgggctgctggacatccagaacgtaagttggttgctgctcctcctgtacaggctgctcttccaattgttggggctgctgctcctggggcgcatcgtgcatctggatctgctgcatctgctcctggtattgctggtaggtcagctgctgctcagaaactggtgcgggaggcagataacggtgtgcgagctctggctgttgctggaatttcgccatgacagcttccatttggggcatcatcgtgggatcaatggccatctgaactggaactgttacgggtgcaggtgcaggtggcaggtagcgagaggagggcatgacttcctgctcatccactgcagcgggaggagtgagaaggctgctgggcatgggctccatctgaccctgttcatttggacgcatgtactccacttgctcgggcagctcacgcagctcctgctgctcgatgctcatggacacagcgtgctccggatgaggtggtggaaggtagctggtgctgggctgtaagtgggacacatcggcggcggccaggcaggcgcacaat

SEQ ID NO: 41381 - DNA, 4737 bp, DROSOPHILA
atgggacgcctctgttgtttggtgcccgtcatcaccaagaccaaggcaaagaccaacggggcgtcgggcatcggtggcttggagctaaagcgtcccaagagtcgcatatacctaaacgaaactgaagttggacccttggaggagctccccttttcatcttacaatccgcgaatcctgcaagaaggcttagaaggagaaaacctcaagaccttcgatatcattgagggctgcagtccacaggatttgtggacctggaatgtgggctaccagaagagagaggagcatatggatcaggagttcatatccgcctccctgccgaaatatgaaaacgacggcgaacttacgctctataatataccacaacagctggaaaagacgtttactgctgagattgtgtttgggaatcggaacatctatcctgaaccaaagaaggagcccaaccgtttgcagtactattatcggcctagtgaaatcggtgccattatagtcgctttcgtagagacctttcgtttgaatcccgatttctggacgggatctacaatggatgggattctaaagcgcggagtgaaattgaccaaaaagagcgccgacctaaactacaagtcagacgtgaatgatttcgatataatccaacaggttgcggaacgagacgccgccgttgagattaagatacacttctcgggacttttgaaaaacgaaccaaatatgtacaaagcactttccctattcttctccaaatacaatgcctgcatctttacgtcccgggatctcttcctgctgatctggaagcgctgcttaaactcgtactatatcttcgatcccaatggacgtgatgaaaactgcgaacggaatttcgaggagggaaagtgctcactgatggccactcgctatacggagcacttggtccatttgatcaccaagtttagcgatctgcagccgcaggatgaattcaatatttttgagatatcgctgactcagtatggaaaacttaaggagccaccaattaattcggcggaaaacgaggagtatcacaaactctgggcgccagtcaatgagaactttgctgtaaaaactgcggccacaggtggcattcaccaaccgatctccggaaatgagaagaatgcatcgctagttgtgtcattgatagctctgatttactcggaatttgagctagccaagctatggaaaccgggtactgtggatgacatcataaggtatggtgtagcctactacaaaacccttcggaagaagttccgcctggatggaaaacgctggaagaataagaagccacatttgaatgtggtggatctgccagaaatgtttctcatgggtgcatttaaggccaccgttcgaaagcatccattcatgatcaatggtcatgtggcggattgcaggaactatttggaatcccagctaacgatggcactgcaccagttgttcaacttgccccagtggccatctgccctgcttcagatcgataattcagtgatggctgtatggcgggatagggagttcttctatgtcttcgatcccttccggcggaatcgaactggcctggtggtggatcccgatgactatagcataaagggattggccgtgctccaattgcacgccaccttcgactcctttgtccgtgtaatctacatgaatgccctgaagatgcgacgtggtggtaagttctttatccatggcgtgaggacaggctgcatccgaccgctgcaggtgatgaccccgcagacaaacagattcccgggattgcagatgggtctgcccaccttcacggatgaaccaccaatgccggagctgaaacagaagaagagtattgagagtataccggaagaggatcgcttccccaccgtcgatgaaaaggaaatggtagaggagctgatcaatatgatcatcaatagtattattaaggaactgccggaaccacaacccaagagaccacatctctataagccggcccaaaaggtcctcctgcgctcggatcaagagaatctgaaggctctgcggctaaggatcaagcggggctatgagctcggccaggaggaggaggaggatctgaagagagtgttaacggtggaggaggaggtggctctcaagagcaactttaaggcgttaccggacggctcctggatcattgtgggaaccacccaacttccccagttggacgaggagatggccaaactgggaggactcctggctgctttggtagccatggctgtttcagcaaagtataagctgtccacctggaattctgaactaatcgagtttagtttggaatctgcaaacagctttggagaagattaccaaaactacgagtacatattggcttgcctattggccaagaaattaccagatattgccattggcgagagcaacttcagtttggaggtgaagaaggtggtcaaatcctcgattatggttccccttcggcaagtccttgtggatctacttgtggacaataataggctgctactcgtttgccagcgtttctcctgcgtaatctttaagcgctacaactttgtatacatgttcatcggctttccctgcaacgcaattggctatagaaagggtggttccggtccagcttgtctccttcgatttgtggaactagatgcattaatcaagcgcattgaattcggctgcaatccgcagggttgttcggtaatgaacttcatcgtggcctgcgtccaaatggtggataataatcttcatggacgctttagaccttggagaaaggaggatgatgataaggaagtcaagcaggagacggccaggcagaagagattgcgcgagcaaagactggagaagatgcgctacatcgacgaggagctccaaaaggagaaagagcgcatacagatgttcctcaaggccaaacaggagcacatggaccgcaaggctggaattaaacccgagtacagggacattggcatcgacgagggtgaaggcgaggagggcgacgaggaggacgacatgcttggtggtgaggagggcgaagaggaaggggaagaggaggtggaattgaagcacctaccaggcaagaagttacctaaggaagttcgccgggcatacaagcctcgtcccataatgtttggctacagaatgcgcgagaaggattgcaactttaagatccagggcagcctggcactcgagggacgcgacgagggctcattcaagaccatcaagccgtgctactttgcctccgccctggccatcatcagttgctccttgcgtcccttgaaccaatggaactcttaccgcatcgatagggtaatcaataatgccaaggcgatttccaagggcgtctgcgaattggaatcagtattcgaacgggtggtccgccacgtcaccattgatgattacgagtttgacatctggatccgttgctttgagccagctggcatgtggactcctaccccggtaaagaaacctggcactccggaagtaggtctcatgatcttcaagaagaagttcggcaagctgttgaatctgcgtaaatatatgatcatcttcacgcccaatggaagctatgccatctaccacgacgagttctttcacgtctttgatccctacggcagtatggagaaacctggacaggatgaggaagagcaggacgagggcgatgaggagggcggtaagaagaagaaaaagagatgccccaagggacctaagaggtggccggaaagaaatactgcctcctgggttctgctctatgatgttgattccctgcttaagtacatcgacgaacggagtgccgttaagaactggaaggagaagaaccagtataggttcttcgtggttgatgtcctgtcacacaaaaaggccgctccgaacgccagaatcctacagctgctcaccgatctctcgataccaatgacatgtacaaataagcagtatggcagtccggaatacgagatttgtgccaccaatgaatccctcggatggctagaactggagaactgcctgcccgtgtggagcagattgaatcgacggaatacggcgggcaagtatcgcaacctgcccatcagcaagataaagaagttcgacgtcgagatcgagggtcgcctatggtccctgtggggcaatctccatccagaggctcccgtcttcgaggacgaggtaaggggtcgtcagtatctgggctgctatgtgatggcctgctgtgcggccagcgtttatcggttgatggactggagtccacatctcctcgacaccattgtggtcagcggaagcacctacttcaaggagagcatcgatcagatcagcaaagaggactacgaattctcactggagaacctcaacatcgactgctctatggacaccatcaactttgtggtgcatatcgagcatgtgtgttacggaaaactgtatcgggtccctacgttcaaccgaatgaatctatccgaggccctgatctacttcttcagccactaccagttcggaattgtgagtgtccgaaaacggtcactggccattggattctgccccagtcacgatggcggatactttatgtacgattgccaggagaaggatcatccactgttccccaagcagcaaggtgcttcctacatgctgcgcacccggcacctacaggtgctcctctactgcgtagtggtcaccctaaatgtgccattctacaacatagacttcagcatccacaaggtagagatgttgcgcgaaggagccaccgtggagaacgaagaggaggagggtggcgaagagggtggtgcttga

SEQ ID NO: 41382 - protein, 1578 aa, DROSOPHILA
MGRLCCLVPVITKTKAKTNGASGIGGLELKRPKSRIYLNETEVGPLEELPFSSYNPRILQEGLEGENLKTFDIIEGCSPQDLWTWNVGYQKREEHMDQEFISASLPKYENDGELTLYNIPQQLEKTFTAEIVFGNRNIYPEPKKEPNRLQYYYRPSEIGAIIVAFVETFRLNPDFWTGSTMDGILKRGVKLTKKSADLNYKSDVNDFDIIQQVAERDAAVEIKIHFSGLLKNEPNMYKALSLFFSKYNACIFTSRDLFLLIWKRCLNSYYIFDPNGRDENCERNFEEGKCSLMATRYTEHLVHLITKFSDLQPQDEFNIFEISLTQYGKLKEPPINSAENEEYHKLWAPVNENFAVKTAATGGIHQPISGNEKNASLVVSLIALIYSEFELAKLWKPGTVDDIIRYGVAYYKTLRKKFRLDGKRWKNKKPHLNVVDLPEMFLMGAFKATVRKHPFMINGHVADCRNYLESQLTMALHQLFNLPQWPSALLQIDNSVMAVWRDREFFYVFDPFRRNRTGLVVDPDDYSIKGLAVLQLHATFDSFVRVIYMNALKMRRGGKFFIHGVRTGCIRPLQVMTPQTNRFPGLQMGLPTFTDEPPMPELKQKKSIESIPEEDRFPTVDEKEMVEELINMIINSIIKELPEPQPKRPHLYKPAQKVLLRSDQENLKALRLRIKRGYELGQEEEEDLKRVLTVEEEVALKSNFKALPDGSWIIVGTTQLPQLDEEMAKLGGLLAALVAMAVSAKYKLSTWNSELIEFSLESANSFGEDYQNYEYILACLLAKKLPDIAIGESNFSLEVKKVVKSSIMVPLRQVLVDLLVDNNRLLLVCQRFSCVIFKRYNFVYMFIGFPCNAIGYRKGGSGPACLLRFVELDALIKRIEFGCNPQGCSVMNFIVACVQMVDNNLHGRFRPWRKEDDDKEVKQETARQKRLREQRLEKMRYIDEELQKEKERIQMFLKAKQEHMDRKAGIKPEYRDIGIDEGEGEEGDEEDDMLGGEEGEEEGEEEVELKHLPGKKLPKEVRRAYKPRPIMFGYRMREKDCNFKIQGSLALEGRDEGSFKTIKPCYFASALAIISCSLRPLNQWNSYRIDRVINNAKAISKGVCELESVFERVVRHVTIDDYEFDIWIRCFEPAGMWTPTPVKKPGTPEVGLMIFKKKFGKLLNLRKYMIIFTPNGSYAIYHDEFFHVFDPYGSMEKPGQDEEEQDEGDEEGGKKKKKRCPKGPKRWPERNTASWVLLYDVDSLLKYIDERSAVKNWKEKNQYRFFVVDVLSHKKAAPNARILQLLTDLSIPMTCTNKQYGSPEYEICATNESLGWLELENCLPVWSRLNRRNTAGKYRNLPISKIKKFDVEIEGRLWSLWGNLHPEAPVFEDEVRGRQYLGCYVMACCAASVYRLMDWSPHLLDTIVVSGSTYFKESIDQISKEDYEFSLENLNIDCSMDTINFVVHIEHVCYGKLYRVPTFNRMNLSEALIYFFSHYQFGIVSVRKRSLAIGFCPSHDGGYFMYDCQEKDHPLFPKQQGASYMLRTRHLQVLLYCVVVTLNVPFYNIDFSIHKVEMLREGATVENEEEEGGEEGGA

SEQ ID NO: 41383 - DNA, 12512 bp, DROSOPHILA
cactgtttggagcgaccgcttaattagattctctctgtacatacgtacatgcatatgtacatatgtgcgataagaaaagttaaaaacaaaaacagctgtaaaactcgatcgacaaataaagtgcaaagcaggtgaaaatcgaatttttgattagattgagctgaaaaactagaacaaaatagccggcacccaaaatcattggctatagcggagctccaaagttaatattaataattttaagttaagcaaggaaatgacagattttcagtaaaaaaataatttagaatatatgaaatattgattatacttactttacatgtagaaagtaccaacatcgaaacactaactttaacaccagaacgacctcattaatgaatagaaagtaaataatttttgagtgaacaaaataccagattaagatgacccaagtgaaatctgtactttgcgtgggttgcacggtgattgacttcgtgaccatcaatgggagctatcctatggaggacaccgatcggcgatgcctggatgggttctggcaacgtggcggaaacgcctctaatgtgagtactgtgctccgggttcttggatgcaaggtggacttctttggaatgctcagcaggtcggatggattccgagtgcttctcgacgatctctcgaagcgggaaatcggcacgaatgactgtcccttcacggacagggatccgccattctcctctgtgatcctggctcaggattccggcacccgcaccattatccactgcaataaggactacccgcagaccacctatgaggacttcagcaagataaacctttcgcagtatggatgggtacacttcgaggctcgcaacacgccgcacaccttaaagatgatgcaaagcatccgggagtacaaccaaaggaccggacaaggcatcattatctcgttggacttcgaaacgaggtatgaacaaaaccaggaattgtgtgcgccctgcgattttgtggtcttctccaaggagctggctggtcagttgggttggaagacaccgcggcagtcgtgcgaggagttggcctccaaaattcccgaaggtggtccaaagcctgtcttcatttgtccctggggaagcgccggagctggagctatggatgctaatggaaactactatgaaatgtcgtcctataaacaggacaaggtagttgacacgctgggagccggggacagtttcatggcgggattcatctacgccaccctcaaggctcgtcgaagtctagcggaggctgttgactttgccaaccgagttgccagtcacaaaatcactggattcggctacgaacacatttcccagcttagcttaaccaagtaaatattggtttaattctagcttagattaagtcacattgaaggaatttattaagataaaagcctggcaacaaaaatagcaaattgcattaaatattatattgattgttaaacagaataaactaatacgtgcatcacgctcaattatgaatgctttaaaacatatgtaaaacattttttgatttatatgattaaatgatgacatctctcgaaatagttaaaaaatcctttacccaaaaatgcaatcggattggaaatgaacagcgcttatgtattctcacaaattttataaacttgtcaaattcattattgtatattataattattttcgtgatcattgattaggcaaggagtttcttttgttggtctggagagactttatattgaaatcgtaaatcaagagatatcatggcaggatgcgtctataggtcctctgctcttttttaatagttgtccagttgggagcctctcgttgttgtctatgtgtatttaatgaagtcacctcgctggtcgtccatatccgaaccaatggctgaggcgttgattccgatgccgctcgaggcgcttccggatttttgctggctgtttaggccctcaattagctggttttgaggtgttaatcggttaatctttatcaacccctttaaaatcacaaatatatcttaccttcgatcgcaggcgctttagtttgcgcaatcgttctagccaattcgatgcgtacggatgctttttctgcacactttggtagactagcgacgcgagctgtaattgattggaattaatgaaaatcgcagttagcaatagatcctatgcttacattggcgtgcagcgccatctgtcgggccaaaagaggagcactgcgatcggacactatccggtattctgcgtggcacacgaatttcgaaatctccgatcgcgccttcacatacaccctgttcgagttcaggtcaagtggctcaacgatcacgcaggcgtagttgaattggccctgaaagattattaaatggaattaagtctggcttagttcaattaaaaaagaaactagagttaggattcaaactaatcatgtatggattggacttgtaaaacctacggatattgtgtttagattgtactcctcgccgctttcgttgtagatgatcttcacaaagtcattgccaatgtggctcttcttctcgttgcagttgggatcatcctgcagattggtgggcatcagcgtagcgacatggaacgtaacctacaagggaaaatacattggacatacgcgctttgtaagtcagttggggataatcattcacctgcagtatgtcatccttccagatataggcaaacttgccatctgctccgtttctatctagcattataaatagattgttctgctcagcttccttcagactgaccagggtgccgatgttacgcaggaactccacatacctggcacttccgtgcgaattgcgcaagatctccacctcgttgttgcactgcccttggcccacgtacagcacgccgatcttgtgcgtctcgaacggtgggactaaatcgataagggagacagcgctgctgttttccggacccacctttagaggctcatccgtaactcccagctggccagtggtgtacagttgcatgaaaataaagctcgggttcatgcacagcttggtgttgatgggcggctttgcggctccgaaattccggaaactgctggccggcggcggacgcgtatttccgttattcacttcacgcaccaccgaaatggttttcgaacgacctcgcatcatgtctccgtttccattgttgccgttgtcgtaatcggaggttatcactccaacattggtgccattgctgccactgctgctcgattttgccagtgcaccgggctgcggaacagaggtgccaccaaagctggtcactcgaccagtgcccagcagaggcggttgccccggcgacagcggtggtttacccagctttagcgtggaccctcctgcttgcaagttacttcctccagccacatgactgctgacatcgtccgccgaatgctgcttgggaggtagggtgccgctttccggctgcagggccaaggctgcggcctgcgacggtggtgtggagccggcgatctcctccggaatggcctcacagctcacacgcatatccttggtgctgtactgaacagtcttcttcttcaaagtcaacagcgattgcggttcatcggcggtggttttcacgggctcctgggacagtggcgtgggtttgttggttaggaacgactgccgccaactggaactcatctctgggctggaatttacccgtcggacgggatttcgtgcccgactctgagcatcctcaaaggccagggagtcatcgtcggcttcaccatcactcacacttccacaaagagctgcctccttgccgcgttttccagatgctgggacccgcggaatgggtatggcagcagcacctccagtgctgggagcatttccactaccattaccgttgccgttgccatttccatttcctccgaccgagtgaatttcttcctgtcgctgaagggcacgagccttggcaaccattcggctgcgcaatgcacttgcctgaggagctgttgctgcattaacctctgcttctggttctggttcgggatcagccaacgtatgtggtggggcctgaatggtattgtcaggtccaaaaactccgccatgggcagtgggaagaaacagcgacaccacattattgaacggcaactcctggccaaagcaatcgttggtgatggggttctgaatgcgggttatccacgatacgttgcccgtgggccgacgaaccaaaacctccgcccagccagtgcaggcgcgcacgcaaaccggctgctgcaccacggatcccgacgaagggctcatgctaacggaggattgggacaaagagtttcccaggagcgaggtgttgctccccgtatgtgccccctcgcccaaggcactgcccaaggcttcgggattagacccccgacgggaaagcgcgtctagcgatgccgtggaactgttagaaatctgtcgatgtggatgaccacctgcggctgctgagttcgacgacgaggaggaggtgagctccgtgctgccagccgactcgttgccgctgctgtgctgcaggctcaccttggtgtatcgtctctcccgctctggcgaaagtggaggagctgcatcactgaggctcttcgagttcagactaatgctgggagcctttcctagctgggcacatcgttcgcaaagcccactgcgcgcgggcgccgacggacagccggaggtggttatggtcaccaggttgttgcccactagccacgtctgcgagacgccgtccttcagcaggaattccgccgctggaagactgcaaagggaaggaaacatcttttactagtaagatttgttgtaataaaagaacacgcaccgcttgggcatcgacggacaaggcgaataagtgtgtcgcgccaagaaatcaaagcacgtctctgccagttcggcgtggaagtttcgtagaccgttgttcatttgcggtcgcatctccagatcgttccaggcattggcattgttgcgactaccgcgctcagttagactggtgctccgcttgcgattggatgaatcctcgtttaaggagtttaggttcacaatgtcgctggacaacatcttggcattcgactgaatcgactgagaaagtaaaaccaaataagttcaagtaaaaaaatgaaaatttctaatgcatacgcttttgatgtagttaacgcagttcctgcgcagctccagcttacacttaaggaaccatccagcgatgacatggtgggccaaggaaactgtatagtgatcgtagcgatgcggtttggtgtacggcagcgtgatggcaaacacgtacatgttgtgcatggaagtgaagtttgcgaagagatgcttggacagatgtatgagcactaaacaaaggggatcagttttattaagtcactacttcggaaagatcttcgacctaagttactcacacgacagaaattccagaaccggagtggccaacgcattcgtatccgacatcttactcatttggagcagtacgtccggcagctttcgcatcaacgcctccggcatctctagtataaggatggtcatggtgttgatgcagacgctggcaatgccagtaagtaccctcgaattgagagctgttataattccgtagtgctgctgcggctgcaggctttcgtgatagataaccaatgaagctatggcgggtaaaacgagggcgtggaactcatcggtgggtcgcttgaacttgttgttgctaaccaaattgatcttgaggagcgtgttggccagctcctcgatgtcattgccctgcaccagcgccttgttctgcagcaccttcggcagttccctgatgactagctggaacacctgataatcggtgtcgtgttccaggcacctcactatcagcttgcagactcgtcgtatggatatcgctgtcgggtgggcttgtggtaacagtggtgaatcaattcccaggtatggactaaatttcaccacctcggtgctgccctccggataaccaatatggtaggagccgttggcccgggccttcagcaaccaagcaaatatctaaaaatgtagatcaagaacgtttgagtacacgagggttcggaaaaaaaaaatataattttgacttactttatagcgcacaacacttatgtgctcgaaaatctttggtcgttcgtagtgcagttccaggtggtccattagaatgttaaatattttaagagcatggatccctggcagacgatgcagcttgatggcaaacactttgaccaaaccatcaactgcggcgataatatccgagatctcggattcgttgttgaccaatccaaaggtcacttctgcaagtgtaccctctccagatgaggatccatgccgcgtgtgctcaaagggtcgattgatgagcgcctccaggatatctagcagatccatgcaccgtttcgtgtcgcaatgggtggcaaaattggaaagagcccgggccacggccactcgcacctgcacactcgactccagatgaatatgggaaaggtgcaccagcaccacgcgactaaggatttcttcttcatagcaggcacggttttgatccataatctgaactagagcctcgatcgtcttaatgcgcacgttaacgttggacatgcggtagtagcgccggacgaactgggccagcacctgaagccaatctggccgcgttgctgtaacccgtcgggatcggtactcgattagggctagaacggaagcctctgggcgtcggtcggcaactcgctcgatgagatcgtagatgcgctccacattgcccagaatctgggatctatcctgctgcaacagcttctcgatgcagtcgatattctcgtggaaattgatctgcaggtgatgcagacgatccttgtttatattgacttcttcgtaatactcgatattgctaacgatcgaggacattatatcgcagatcagatcccaaatgatctctgaaagctgccgcttggtaatcaccatgcgaacgctgaggatgacttcgaaggtcacgatcacctgacgactgtctagtgcctgaggaaaaacaatgattattttcccgttttaggtacggattttcaggcttacccgcaggaaggctgtcagcacattcgttgcataggtcataggcgaaacctggaaaataatgttcgagccaaagatgttcatgtttagatggaacacggccccacgcaacaggtgggcatcatcgtaaagagctcgatcgttgaggatactgcacatcatcttcatggaatggtatcccaactgggtgcccaagaggttcttcatgatctggagattttaaaaatacatatgacttaatattattcttcattccaacgaaacaattaaagccagacatagaaaaatagcaatgacactaatagttattctattgtctttggtaatagttaggcctggtaattacattgcatctgcattttgttaacgaaattagtaacacttcaaatatctttgatatttcaatcggcttacaaacacatttggctagtgtcgaaattcagaagtttccacaatgaaaaagcaaatcgtaagggagttcataaccgtaaagaaggtacttcacctgccgccggagccacccccaccgccgccacctcctaagcgccacgttctggctgtgggcagctgcaccctggacatgatcaccatcgtggatctgcctctttttccaggccaggtgcaacgcaccacggagggaagctggcggcgcggcggtcccgctgccaatatatgcactgtgtggcggcgactgggcttggagtgcgaattcctcggagttttgagcagggttagggcgttcgagagcctgttgaatggatttcaatcgcagggaatcgacatttcgcattgcccgctgacgaatcaccggcctgcgcaccgcagcatcattgtccaacgtaacgtggatacgcgaaccatgctcgagttcgccaatgccaaccaggagctcacctaccagcagtttgtgggcgccgtggactaccagaagtactcgtggatacacttcgaatgtcgtaatcccgttgagatgctgcgcatggtcctggcggtcatacaattcaacgagcgctgccccgagtcaaggatcacactctctgtggatctggacaacttgcgaccggccaccatgttgatggccagtatggtggactacgtcttcgcccgaaagaccatgatgcgtacgtactgttttatgaatggacgcgaggttgtttgggcgattaggaatgaaatgcgaagagcacggactcaatgggaaaaaagccagcccaaaaagatgccctatctacctcctgatcccccagatgagcattccaacggatattgcccgggaccgctgaataaccaacccgtcgtcatatacaataattatatggaaggcgccagttgcctgatggccgacgacacctacttcaaggtgggctcccagattccgcccaaattagtggacgttgtggccgttaacgacaccttctcggcggccgtgatatatgcactgattaaggtcaagatgcggctgagggatgccatcgagtacggaacccgggcgtcgtctctgaagttgacgggaaacggattcgatgtgctgcggtgtatgcccaaagatctgattggttgttactatacttaagcccatggatttataatcattgattttgtaaaatctactctgtaaacttgtactaaggtcacttaaagggaactgggtcagcgacccactcatttatcgtcggtatcgaatgggccttgaatacactttttccaccggggggccacagattcaatgatcacttcttatttcgggaatagggttaatcatcatcggctggaacatgttgaatgataagaagtgctgaagtcagcggaaccctcgataagtggtggaaatattgagcagataaagactgagcagaatactcattagtattaaaaaacaaatgtcggagcaatctctgccagcgattgccaaatgggctgaaaaaattcaatcaaagcgaagacataaaaagccaagtcattagcaatcaacgccgcattcgacggattcccagcataaacgcgcatctgacgaaaatggagagtgagtgtaataagagtaccttattttagggtgattaaagagttctcgttttttccagatcgcttattagttatatggctgcttcttgccatcgccacggcattggttaaggccgaacttacagatatatccgctatctgcaggatatccgatccctggcaaatgctgccccacaaagaccactgccaaaggttctatgtttgcactggcgacgatgacatgcccttccaggagttcaactgtccggcggagtaccattttagcaagaagctcatgatttgtgtacccggagcctgcaccgatgaatccgtattttgtggacttacgaatagtgtggagcgagtccaaagcgattgcacgcgataccgacaatgcctggagggaggatccttcgccgtggccaaatgttccgtcggaaactactttgatccagcccgaagagcctgcctcccagtggccataagtgcggcccatcagtgcagctgtgtgctgccggataatgccaccctggcgaatccaagcgactgcgagacatatttccgctgtcactccggacaagcggagctggtccagtgtccatcaggagactactttgacgaacgagtgagcagctgtgtgccggatcacacgggaatttgcctggaaaagcccacaatgccgccgacactcacagagcaagctcttgccatggacgagtgcatccggacgggcagccgcctggcaccgcacagccgagattgccaacgttactacatatgcgccaaaaagagggtgctggaaatgcgctgtccgaggggtcagtattttgacgttgtacggcgctactgcgctcttgatctgggaagcgaatgccaggctctgcaggccgagaaacaagacctggagctggaggagaatattcaggtagagctggaaaagaatatccagatggacattccagcgaaacataaggtaaagaatcagggacacaagccggttcagaagaactccgaaaaggaagtggtccgcgaccaggaattaccagtgccgcaggctaatgacaaacttccacagccctcagccgaggcagtgagcagctacgataagttctcgtcgaagttcatttctatgtaaccgattaattctaagcgacattcattaaatataacaatatcagacgataactataaataaagggaactaaataattttgtatttgatcgctgtattctactatcaaataaatgtatatttgcattcaaactgaatgtattctatttcaaattatatatatattaactacatttcctaaaaagaactacatatttttgctctaattgactaataggaattttttttaaccttttatagctttaattagttcaatcatttgatgttttagggacttaccttgaaagaagacgggcagtaaggagcatgattcacagtccggcacaaggtggtgatgcactgcggcagcggttcgcttgggaagatggtgtacccgatgaccatctccagaattgtgaggcactgcagaccgatttcgtttacggtaacgctacagctcagatcgcaagcgttcctggcgaaaaaagggatcttcaaacaaaagatgtgggttaaagagtgcgccactcactgcacgatgcccacaaggatgtctttgtccagatgcgccgcattgaacttgatcaggttgaccagaatgtcaaggtagggggtaagcagattggcctccgtaatggctgggatccagagcagcataaacttgccaatctgtgggaggaagaaagtcagttaggtcaccattcatttaagtcagatctagggccaaccttctcctcgaagtttgtgatatccttcccattgtcggtgagggtgtcgagcagctcaagaaggtgacgcagatcttcgcgggcttcgtggttctggatgaccaggaagaacttctcccgcatgatggtcaggttcttgtactgtgtgtgaatgagccgtttatagaagctcaaggcaatctgccgcgtttctgccggcttgttgggcacgatgagatcgttggtgagattgaacagaatggtgatggcggactgtggggacgaattacgagaaataacacatgttcatggcatggcggcaattcgatggaacgcacctcgtccagattgaagttgtgcagctgcgtgtcgcccagctctttcagcatccggcagcgctgggccaccggctgctccggacgcagttccctctcaaactccggccgcagggtccgctcgcccacgtaacctgtgaatcccggaatcccaattgagttctcttgcccacaatggtgcacccactttgttacctgccggcagcgatttgaggaacaacttgaacttggacttgtccttggagttcatggtgggtccttgcaagggcggtggtcggtggagctgtggcgctgagtgtgtgcaaccagtaattcctagcctaggtcctaaaaacaatttatacacagcacagaacagaggaagtcactaaacagctgagcgcagtgttaccagtcggcgatgcggatttcacctcaagtccgcgcgagctcaaaaaaaaaatactgcaaaactcaccactttcccgcttaatttgaatttgtcgccaactttgcgtttgtattattttattcagtttaaattaattatgataaatatcaaaacataaaatcattgcatttggtattttccctaatattcaagatttctacacacgattttcaatatatatatatttttatttgctgtaatacttacaacattttaataacttattaacttaattaacaactttataataataatgtatttgtgattacttacacttttgttttctgttgcgaagcaaaaagtatatacttcgcagctttagaataacaatgatttatcgatatacatatgcttaataagaataattaaactttatttttgtatttaagaagagcgtttatttattttcttggataaatagaagaatatttccgaatattctgactgaagtatacgaacaattaaatttgtttttattacaaaaatggacatcaaaaagtataccattacaacaatctaaagaacgaaaagtgggccagaatcaaagcaatatatttttctccttaagtctttgattaagtcagacaatcatcccgcaggatcgtatttcgtttactcaattttatttattaccattcgaataagatgccagtgaaaatgttgtgatatttctttaaagtagtaagaatgcgtcaatctaatatttatcaaaatgattgtaagactatagcgtctttcacacatcttgaactccccccaaattgagtgatatcaggccccaaagcacttttatatttaaagtcggcacttgaacggatggcggatcggatattattggatcgggttggattggatcatcctccaaagtgacatctagcatgccacacatacatgagtaatctccggactgtctgcctacgtcataaatcagccaaaaa

SEQ ID NO: 41384 - DNA, 6477 bp, DROSOPHILA
gtgacttcctctgttctgtgctgtgtataaattgtttttaggacctaggctaggaattactggttgcacacactcagcgccacagctccaccgaccaccgcccttgcaaggacccaccatgaactccaaggacaagtccaagttcaagttgttcctcaaatcgctgccggcaggttacgtgggcgagcggaccctgcggccggagtttgagagggaactgcgtccggagcagccggtggcccagcgctgccggatgctgaaagagctgggcgacacgcagctgcacaacttcaatctggacgagtccgccatcaccattctgttcaatctcaccaacgatctcatcgtgcccaacaagccggcagaaacgcggcagattgccttgagcttctataaacggctcattcacacacagtacaagaacctgaccatcatgcgggagaagttcttcctggtcatccagaaccacgaagcccgcgaagatctgcgtcaccttcttgagctgctcgacaccctcaccgacaatgggaaggatatcacaaacttcgaggagaagattggcaagtttatgctgctctggatcccagccattacggaggccaatctgcttaccccctaccttgacattctggtcaacctgatcaagttcaatgcggcgcatctggacaaagacatccttgtgggcatcgtgcagaacgcttgcgatctgagctgtagcgttaccgtaaacgaaatcggtctgcagtgcctcacaattctggagatggtcatcgggtacaccatcttcccaagcgaaccgctgccgcagtgcatcaccaccttgtgccggactgtgaatcatgctccttactgcccgtcttctttcaagatcatgaagaacctcttgggcacccagttgggataccattccatgaagatgatgtgcagtatcctcaacgatcgagctctttacgatgatgcccacctgttgcgtggggccgtgttccatctaaacatgaacatctttggctcgaacattattttccaggtttcgcctatgacctatgcaacgaatgtgctgacagccttcctgcgggcactagacagtcgtcaggtgatcgtgaccttcgaagtcatcctcagcgttcgcatggtgattaccaagcggcagctttcagagatcatttgggatctgatctgcgatataatgtcctcgatcgttagcaatatcgagtattacgaagaagtcaatataaacaaggatcgtctgcatcacctgcagatcaatttccacgagaatatcgactgcatcgagaagctgttgcagcaggatagatcccagattctgggcaatgtggagcgcatctacgatctcatcgagcgagttgccgaccgacgcccagaggcttccgttctagccctaatcgagtaccgatcccgacgggttacagcaacgcggccagattggcttcaggtgctggcccagttcgtccggcgctactaccgcatgtccaacgttaacgtgcgcattaagacgatcgaggctctagttcagattatggatcaaaaccgtgcctgctatgaagaagaaatccttagtcgcgtggtgctggtgcacctttcccatattcatctggagtcgagtgtgcaggtgcgagtggccgtggcccgggctctttccaattttgccacccattgcgacacgaaacggtgcatggatctgctagatatcctggaggcgctcatcaatcgaccctttgagcacacgcggcatggatcctcatctggagagggtacacttgcagaagtgacctttggattggtcaacaacgaatccgagatctcggatattatcgccgcagttgatggtttggtcaaagtgtttgccatcaagctgcatcgtctgccagggatccatgctcttaaaatatttaacattctaatggaccacctggaactgcactacgaacgaccaaagattttcgagcacataagtgttgtgcgctataaaatatttgcttggttgctgaaggcccgggccaacggctcctaccatattggttatccggagggcagcaccgaggtggtgaaatttagtccatacctgggaattgattcaccactgttaccacaagcccacccgacagcgatatccatacgacgagtctgcaagctgatagtgaggtgcctggaacacgacaccgattatcaggtgttccagctagtcatcagggaactgccgaaggtgctgcagaacaaggcgctggtgcagggcaatgacatcgaggagctggccaacacgctcctcaagatcaatttggttagcaacaacaagttcaagcgacccaccgatgagttccacgccctcgttttacccgccatagcttcattggttatctatcacgaaagcctgcagccgcagcagcactacggaattataacagctctcaattcgagggtacttactggcattgccagcgtctgcatcaacaccatgaccatccttatactagagatgccggaggcgttgatgcgaaagctgccggacgtactgctccaaatgagtaagatgtcggatacgaatgcgttggccactccggttctggaatttctgtcgttgctcatacatctgtccaagcatctcttcgcaaacttcacttccatgcacaacatgtacgtgtttgccatcacgctgccgtacaccaaaccgcatcgctacgatcactatacagtttccttggcccaccatgtcatcgctggatggttccttaagtgtaagctggagctgcgcaggaactgcgttaactacatcaaaagctcgattcagtcgaatgccaagatgttgtccagcgacattgtgaacctaaactccttaaacgaggattcatccaatcgcaagcggagcaccagtctaactgagcgcggtagtcgcaacaatgccaatgcctggaacgatctggagatgcgaccgcaaatgaacaacggtctacgaaacttccacgccgaactggcagagacgtgctttgatttcttggcgcgacacacttattcgccttgtccgtcgatgcccaagcgtcttccagcggcggaattcctgctgaaggacggcgtctcgcagacgtggctagtgggcaacaacctggtgaccataaccacctccggctgtccgtcggcgcccgcgcgcagtgggctttgcgaacgatgtgcccagctaggaaaggctcccagcattagtctgaactcgaagagcctcagtgatgcagctcctccactttcgccagagcgggagagacgatacaccaaggtgagcctgcagcacagcagcggcaacgagtcggctggcagcacggagctcacctcctcctcgtcgtcgaactcagcagccgcaggtggtcatccacatcgacagatttctaacagttccacggcatcgctagacgcgctttcccgtcgggggtctaatcccgaagccttgggcagtgccttgggcgagggggcacatacggggagcaacacctcgctcctgggaaactctttgtcccaatcctccgttagcatgagcccttcgtcgggatccgtggtgcagcagccggtttgcgtgcgcgcctgcactggctgggcggaggttttggttcgtcggcccacgggcaacgtatcgtggataacccgcattcagaaccccatcaccaacgattgctttggccaggagttgccgttcaataatgtggtgtcgctgtttcttcccactgcccatggcggagtttttggacctgacaataccattcaggccccaccacatacgttggctgatcccgaaccagaaccagaagcagaggttaatgcagcaacagctcctcaggcaagtgcattgcgcagccgaatggttgccaaggctcgtgcccttcagcgacaggaagaaattcactcggtcggaggaaatggaaatggcaacggcaacggtaatggtagtggaaatgctcccagcactggaggtgctgctgccatacccattccgcgggtcccagcatctggaaaacgcggcaaggaggcagctctttgtggaagtgtgagtgatggtgaagccgacgatgactccctggcctttgaggatgctcagagtcgggcacgaaatcccgtccgacgggtaaattccagcccagagatgagttccagttggcggcagtcgttcctaaccaacaaacccacgccactgtcccaggagcccgtgaaaaccaccgccgatgaaccgcaatcgctgttgactttgaagaagaagactgttcagtacagcaccaaggatatgcgtgtgagctgtgaggccattccggaggagatcgccggctccacaccaccgtcgcaggccgcagccttggccctgcagccggaaagcggcaccctacctcccaagcagcattcggcggacgatgtcagcagtcatgtggctggaggaagtaacttgcaagcaggagggtccacgctaaagctgggtaaaccaccgctgtcgccggggcaaccgcctctgctgggcactggtcgagtgaccagctttggtggcacctctgttccgcagcccggtgcactggcaaaatcgagcagcagtggcagcaatggcaccaatgttggagtgataacctccgattacgacaacggcaacaatggaaacggagacatgatgcgaggtcgttcgaaaaccatttcggtggtgcgtgaagtgaataacggaaatacgcgtccgccgccggccagcagtttccggaatttcggagccgcaaagccgcccatcaacaccaagctgtgcatgaacccgagctttattttcatgcaactgtacaccactggccagctgggagttacggatgagcctctaaaggtgggtccggaaaacagcagcgctgtctcccttatcgatttagtcccaccgttcgagacgcacaagatcggcgtgctgtacgtgggccaagggcagtgcaacaacgaggtggagatcttgcgcaattcgcacggaagtgccaggtatgtggagttcctgcgtaacatcggcaccctggtcagtctgaaggaagctgagcagaacaatctatttataatgctagatagaaacggagcagatggcaagtttgcctatatctggaaggatgacatactgcaggttacgttccatgtcgctacgctgatgcccaccaatctgcaggatgatcccaactgcaacgagaagaagagccacattggcaatgactttgtgaagatcatctacaacgaaagcggcgaggagtacaatctaaacacaatatccggccaattcaactacgcctgcgtgatcgttgagccacttgacctgaactcgaacagggtgtatgtgaaggcgcgatcggagatttcgaaattcgtgtgccacgcagaataccggatagtgtccgatcgcagtgctcctcttttggcccgacagatggcgctgcacgccaatctcgcgtcgctagtctaccaaagtgtgcagaaaaagcatccgtacgcatcgaattggctagaacgattgcgcaaactaaagcgcctgcgatcgaagctaattgagggcctaaacagccagcaaaaatccggaagcgcctcgagcggcatcggaatcaacgcctcagccattggttcggatatggacgaccagcgaggtgacttcattaaatacacatagacaacaacgagaggctcccaactggacaactattaaaaaagagcagaggacctatagacgcatcctgccatgatatctcttgatttacgatttcaatataaagtctctccagaccaacaaaagaaactccttgcctaatcaatgatcacgaaaataattataatatacaataatgaatttgacaagtttataaaatttgtgagaatacataagcgctgttcatttccaatccgattgcatttttgggtaaaggattttttaactatttcgagagatgtcatcatttaatcatataaatcaaaaaatgttttacatatgttttaaagcattcataattgagcgtgatgcacgtattagtttattctgtttaacaatcaatataatatttaatgcaatttgctatttttgttgccaggcttttatcttaataaattccttcaatgtgacttaatctaagctagaattaaaccaatatttacttggttaagctaagctgggaaatgtgttcgtagccgaatccagtgattttgtgactggcaactcggttggcaaagtcaacagcctccgctagacttcgacgagccttgagggtggcgtagatgaatcccgccatgaaactgtccccggctcccagcgtgtcaactaccttgtcctgtttataggacgacatttcatagtagtttccattagcatccatagctccagctccggcgcttccccagggacaaatgaagacaggctttggaccaccttcgggaattttggaggccaactcctcgcacgactgccgcggtgtcttccaacccaactgacca

SEQ ID NO: 41385 - protein, 1847 aa, DROSOPHILA
MNSKDKSKFKLFLKSLPAGYVGERTLRPEFERELRPEQPVAQRCRMLKELGDTQLHNFNLDESAITILFNLTNDLIVPNKPAETRQIALSFYKRLIHTQYKNLTIMREKFFLVIQNHEAREDLRHLLELLDTLTDNGKDITNFEEKIGKFMLLWIPAITEANLLTPYLDILVNLIKFNAAHLDKDILVGIVQNACDLSCSVTVNEIGLQCLTILEMVIGYTIFPSEPLPQCITTLCRTVNHAPYCPSSFKIMKNLLGTQLGYHSMKMMCSILNDRALYDDAHLLRGAVFHLNMNIFGSNIIFQVSPMTYATNVLTAFLRALDSRQVIVTFEVILSVRMVITKRQLSEIIWDLICDIMSSIVSNIEYYEEVNINKDRLHHLQINFHENIDCIEKLLQQDRSQILGNVERIYDLIERVADRRPEASVLALIEYRSRRVTATRPDWLQVLAQFVRRYYRMSNVNVRIKTIEALVQIMDQNRACYEEEILSRVVLVHLSHIHLESSVQVRVAVARALSNFATHCDTKRCMDLLDILEALINRPFEHTRHGSSSGEGTLAEVTFGLVNNESEISDIIAAVDGLVKVFAIKLHRLPGIHALKIFNILMDHLELHYERPKIFEHISVVRYKIFAWLLKARANGSYHIGYPEGSTEVVKFSPYLGIDSPLLPQAHPTAISIRRVCKLIVRCLEHDTDYQVFQLVIRELPKVLQNKALVQGNDIEELANTLLKINLVSNNKFKRPTDEFHALVLPAIASLVIYHESLQPQQHYGIITALNSRVLTGIASVCINTMTILILEMPEALMRKLPDVLLQMSKMSDTNALATPVLEFLSLLIHLSKHLFANFTSMHNMYVFAITLPYTKPHRYDHYTVSLAHHVIAGWFLKCKLELRRNCVNYIKSSIQSNAKMLSSDIVNLNSLNEDSSNRKRSTSLTERGSRNNANAWNDLEMRPQMNNGLRNFHAELAETCFDFLARHTYSPCPSMPKRLPAAEFLLKDGVSQTWLVGNNLVTITTSGCPSAPARSGLCERCAQLGKAPSISLNSKSLSDAAPPLSPERERRYTKVSLQHSSGNESAGSTELTSSSSSNSAAAGGHPHRQISNSSTASLDALSRRGSNPEALGSALGEGAHTGSNTSLLGNSLSQSSVSMSPSSGSVVQQPVCVRACTGWAEVLVRRPTGNVSWITRIQNPITNDCFGQELPFNNVVSLFLPTAHGGVFGPDNTIQAPPHTLADPEPEPEAEVNAATAPQASALRSRMVAKARALQRQEEIHSVGGNGNGNGNGNGSGNAPSTGGAAAIPIPRVPASGKRGKEAALCGSVSDGEADDDSLAFEDAQSRARNPVRRVNSSPEMSSSWRQSFLTNKPTPLSQEPVKTTADEPQSLLTLKKKTVQYSTKDMRVSCEAIPEEIAGSTPPSQAAALALQPESGTLPPKQHSADDVSSHVAGGSNLQAGGSTLKLGKPPLSPGQPPLLGTGRVTSFGGTSVPQPGALAKSSSSGSNGTNVGVITSDYDNGNNGNGDMMRGRSKTISVVREVNNGNTRPPPASSFRNFGAAKPPINTKLCMNPSFIFMQLYTTGQLGVTDEPLKVGPENSSAVSLIDLVPPFETHKIGVLYVGQGQCNNEVEILRNSHGSARYVEFLRNIGTLVSLKEAEQNNLFIMLDRNGADGKFAYIWKDDILQVTFHVATLMPTNLQDDPNCNEKKSHIGNDFVKIIYNESGEEYNLNTISGQFNYACVIVEPLDLNSNRVYVKARSEISKFVCHAEYRIVSDRSAPLLARQMALHANLASLVYQSVQKKHPYASNWLERLRKLKRLRSKLIEGLNSQQKSGSASSGIGINASAIGSDMDDQRGDFIKYT

SEQ ID NO: 41386 - DNA, 3948 bp, DROSOPHILA
tatttgaacttccggcatagcttgatgctgctgctgctgctgctgtaccccgttgtccatcgttatggtgtactgctgctggggctgcatgtttaccgcctggattatgctgttcaagagatttccggactgctgagctccattaggaactggtggagctgactgcgccacactgaggctcttcccagtttcatcgaccgcatcccgaatgtatagcttgtcgctgcttggcgccgggcgaatattgagacagttgtttagcatggtctgtgagttacggcaagtggcgcgaagtccgtggatttgctccaccaactgcacacactgggcgcacaccactttgggcaagcgatccttttcatcgatctgcaagaagtatgggtttgttagccaaaagtaatgggagattgatgcactagcacgacctgcagtgagagacactcgagtatcttttggctcagattcttggcgcgtccctcgggtgagtagatgttcgtcttgtgatcgctgctgtccgtgcagatgcgacacaggtcgtagtagttaatgcagcgaacgttgcttccggccgcagccatttttccggtggctcagtggttttcgaaatgctatttatgtttagtgtattgcacatgcaaatatttgttgtcttttcttcgactgaacgacgcttagtggtgacactgcgcgaatacattgcagctcggcgtgattggcaataactatcggtaaattataatataaatgaaaggaacgacattatgtttaccctgccttataacctttaaccgaggaaattccacaaacttcttaatttatttcattctaataacttattcattctaattcccaactaagcgaagtaagtacttacagggtagctatcgatataagcaacgaaacttccacctatagtttcgtatcaacgttataattatcgataactactgtgcacccaagggatttacccaactcgaactaacggtcatactgcgtcggccatttgtcattgtgagcgtgacaaaaataagttctctgaaaatcgaaatagatcgaagcgtctgatttaaactggagaaaatgggatcacgcaacgagtgccgtatatatgtgggcaaccttcccccagatatacgcaccaaggatatccaggacctgttccacaagttcggcaaagtaactttcgtcgatctgaaaaatcggcgtgggccgccatttgcttttgttgagttcgaagatgcgcggtgagtaatgcgaatacacacagctggcccagcgccccggctaagacacccaactaattcgcgacaactgcttctcttccttccttgaccatggtccatatcctccggctgcctcttggcccaatttagggatgccgacgatgcggtgaaggcgcgcgacggctacgactacgatgggtatcgtctgcgcgtggagttcccgcggggcggtggtcctggaagctaccgcggcggcaaccgcaatgaccgaagccgcgacggtgggggacggatgggcggacgcggaccgccagccaagcgctcgcagtaccgcgtcatggttactggactgcccgcctccggatcgtggcaagatctcaaggatcacatgcgcgaggccggcgacgtctgcttcgcggacacttacaaggatggttccggcgtcgttgagttcctgcgccacgaggacatgaagtacgcaatcaaaaaattggacgactctcgcttccgatcgcatgaggtatgtaaattgtccagttccaactttgtaaaattcaaatgtattcgggtttcaaggtagagaatttacttttgcatttattttgtcagcatacattattcacaggctggaataattaaatatgatttcaggaataacattaagttatattggtgtagatgcttacacttacgcccttaaatgtgtcaatttgataaacatctagttcacattcctgtttacattttgaaaaatagtttggcgacattattcaaatgatattaatatttttattgtctttagggcgaggttgcctacattcgcgtacgcgaggatagcggtgataacgacagaggcggtggtggtggcggcagcggtggaggtggtggcggcagcggcggaggtggaagccgtgactaccgcgacaggtaaaccaaatattaccacagttcatttttcaatatttattctatgaatccctccacagatcccgttcgcgctcattctcgtcgaggccgcgccgtcgtggcactcccacatactccccagtgcgacgtcaatcttattccaggtctcgctcacgttctaactattaaacacaaccaagcattatccattaatctataatattttaatgagcaggaaacaggaaaagcaagctatattaggaaataccaatcaatatttgttcaagacccctcaaataccccaattgtaaattgatttgtaaaatgaaatcaacgaccaatcaagtttgttcagtcaagttccgaactctcaccgaagccaacatacttaaaaaagaaaaacacttgcttttccaacttatcacacgttctaagaagcagaaatgttctcttaagttataatccaccgggcaaaatttgacaaaaacagttctaaaatgacaactgtaaaccaaggaattctctttggccaaaagcactcggcattccttgatttgcttttgattatcttttgagcctttgctcagtctgcttcctacatattatattataactcttattttggctgcacgttttccaagctaatttattagaatctaccttaacgaaaacaagaaacatcgatacagaataaatatgtttgtaatgagataaagaaaagaaacagaaatccgaacacaacgcaatgtcaaccacattgataagcaaactattaatactttaatttttattttcttctcttccccattttgcgcgtttatgtttggagagtgatgaggatgtggaggatgaggattaatggatgtggaggaggatattttgatgttgattttggcgtggattggataaatttggattgaatttagtggaggcaggacctgtctatagatcttataaatatgaaaatatttatttgattgtaatcaggattggatttggatttaggattgttctgagcccttcgctaggacaacgtgggatgcagtgtcccatggctaactcgcacctcggaggaggaggagacaggaatttcgcattgttgaaggattttatgtgtgaactttggtcgtgttcaggttaacggatgtttggaggaggagaatgtcgatggcatcgttgacggtgaggaacacttgcgttgcccttggacaggactaaatcatacagtttcggactcggccgcatctcttcgagcctcgccccttcttcggcatctgcctaacggtcgggattaggattcgcttggacaggctcacacgctttgttgtcgccttctttggatcgcacttcagaaactagctcacccagggaaccgcgtatttcgtggccttcgcgcccctgtcgttgtcatttcacggatttgctgtgcatcatccaacgttgacttgcgcccaacgctggatagtggatagtggttcttggtctggtccgatccgatgcgttccggtctccctctgtctcgcctctctgtggtatgttagattgccacatcaaatttaacttttaatttgcgttatttagtttataatttatatactctttacccaaatctttcgtctccattgatattgttgcctctgaaatgtggcgattgtcgcgtgtgcgttttgtttttcattttttttgaatagaagggcgaaaattcataggccccgactatagcccacacccgcatcatttgcatgaactttcgttaacctaataaaaagtaataccacagcaattttggaacagaacagttctctcgttctccttgctt

SEQ ID NO: 41387 - DNA, 1478 bp, DROSOPHILA
catttgtcattgtgagcgtgacaaaaataagttctctgaaaatcgaaatagatcgaagcgtctgatttaaactggagaaaatgggatcacgcaacgagtgccgtatatatgtgggcaaccttcccccagatatacgcaccaaggatatccaggacctgttccacaagttcggcaaagtaactttcgtcgatctgaaaaatcggcgtgggccgccatttgcttttgttgagttcgaagatgcgcgggatgccgacgatgcggtgaaggcgcgcgacggctacgactacgatgggtatcgtctgcgcgtggagttcccgcggggcggtggtcctggaagctaccgcggcggcaaccgcaatgaccgaagccgcgacggtgggggacggatgggcggacgcggaccgccagccaagcgctcgcagtaccgcgtcatggttactggactgcccgcctccggatcgtggcaagatctcaaggatcacatgcgcgaggccggcgacgtctgcttcgcggacacttacaaggatggttccggcgtcgttgagttcctgcgccacgaggacatgaagtacgcaatcaaaaaattggacgactctcgcttccgatcgcatgagggcgaggttgcctacattcgcgtacgcgaggatagcggtgataacgacagaggcggtggtggtggcggcagcggtggaggtggtggcggcagcggcggaggtggaagccgtgactaccgcgacagatcccgttcgcgctcattctcgtcgaggccgcgccgtcgtggcactcccacatactccccagtgcgacgtcaatcttattccaggtctcgctcacgttctaactattaaacacaaccaagcattatccattaatctataatattttaatgagcaggaaacaggaaaagcaagctatattaggaaataccaatcaatatttgttcaagacccctcaaataccccaattgtaaattgatttgtaaaatgaaatcaacgaccaatcaagtttgttcagtcaagttccgaactctcaccgaagccaacatacttaaaaaagaaaaacacttgcttttccaacttatcacacgttctaagaagcagaaatgttctcttaagttataatccaccgggcaaaatttgacaaaaacagttctaaaatgacaactgtaaaccaaggaattctctttggccaaaagcactcggcattccttgatttgcttttgattatcttttgagcctttgctcagtctgcttcctacatattatattataactcttattttggctgcacgttttccaagctaatttattagaatctaccttaacgaaaacaagaaacatcgatacagaataaatatgtttgtaatgagataaagaaaagaaacagaaatccgaacacaacgcaatgtcaaccacattgataagcaaactattaatactttaatttttattttcttctcttccccattttgcgcgttt

SEQ ID NO: 41388 - protein, 255 aa, DROSOPHILA
MGSRNECRIYVGNLPPDIRTKDIQDLFHKFGKVTFVDLKNRRGPPFAFVEFEDARDADDAVKARDGYDYDGYRLRVEFPRGGGPGSYRGGNRNDRSRDGGGRMGGRGPPAKRSQYRVMVTGLPASGSWQDLKDHMREAGDVCFADTYKDGSGVVEFLRHEDMKYAIKKLDDSRFRSHEGEVAYIRVREDSGDNDRGGGGGGSGGGGGGSGGGGSRDYRDRSRSRSFSSRPRRRGTPTYSPVRRQSYSRSRSRSNY

SEQ ID NO: 41389 - DNA, 3222 bp, DROSOPHILA
gctcggtggacctgcggtgcctcttccgtatgacgggcgtttggaggagcagaagcatgcggcagcagcagcagcagcgggaacgggatgcagtggacgggcgggggaagccaggaaaacaggtgagttgagctcagctcttgttaatttatacgcaagatttgatcttattgaaagattttaaaaaagatgatcatattcaaatattataagttcttcagttgcaaagttaagggtgactaaccttttttttttatttatttatacaccatatgcatttacgtaatgtgtgtagttttgactgtaccgtttaatctttgactcattgccataaagacttctgcgtatagctgaccgataaatatagggctttattccgatttatcaatgcttcgttgaacgctttcgatttgcaccggaagttgcagtttcatggttccagaggaggttcgtcttgaagcgtcatcgatttggttgaacaactcatgaactctgttctcagcaaagaaatgagtgatatataccaaattctgcgaatcgtctgacatttttcctgtgtgcatcagttcctaaacaattagtttagttttccatcaagttctttaaaagaatattaggttcttggagagcaataggttctctagtactagtactaaaaacaaatgaaatatctcaccaattacaatatatcagtatcagatcgcttggaatatgaaatttcgattgggtgttagtttaaagtcgaaaagtttagtcaacaaatctaagttgtcgttttttgacaaaaattagcaaaatgcttacgtatgatgtatgatatatataaataatctttcattaattgcaatgatatcagaaaaaaagaaactgagcaacacgatcaatgggttctgatggtaattagttgatttaggttacaattgatacttactagtaagtggcattccattgcatccccttaattagttcccaaatgcacaaaaacttttatccgtggcgtggtcttaactatttgtatttgccaatttaaggatgttaaacgtgaatgaaaattgtaaacagttagtgtatagtacagcgacaattgacccttacgaacgtatagttgataattgattgcggataataactaatttgcacttaaatcgatctatgtataaagacaaatgtggatggtgtttattcggcggctgcgattggtatccccactattcagtttctactgcgtgtagtcggtgtcgcccttcgaatagtgtatgcaagccaacacggtgtccagcaggtacagtgcgccctcgataacgcacagcgagcccatggcaatgcccacttgacgctccgagttcacatacaggaatccctcgtcggacatgtaacccttccagtagtggagtgccactccgcccacggcgatccacatgatgcagccaaccacgttcatgatggtgtcgcacagctctctgaaaaacggaaagccattgaaaacaaacagttgtgagttgagagtgtggaattaagggcggaaaatacaagaaaaggaataagatgcgggtcaaagttcagctataatcaatatcggcattcaacataccccttatgtttggttgtgccgaaggcaaaggcaatggtgtggcatccagtgtaaatcaagaatccaaccatgacgcctgaggctacgatttccgcatcggcgctcttctcctcgtttaagttccacgtgccgccgatgcccaggaattcgccaccatcgccccaacggtacaagaagatgatcaccagattgatgatctgcgaaaaaggagcgcacaggagagcaattaaatgaggtcacaattgggaatgggaatgaatgaatcacttcttggccacgcctcgccttgccgtacaactcggcgtatgagtaacattgctaatacgccaggactgataaaacgcgcgcttatctatcagccgagttattgcgaccacaaacaggctattgctcaataggaagggaccaaagaagcccaaaacttaccagcttcagggccttgatgaaaatagagcctacagtctccacggacaccatttcgcactagatatgctgattgctcttatcgctgagctggaatttgggcaaatgctttagttcacagaggggtttctcccagtcaaggggcactcacaatcttttctgtaattttcacgcggaaactacagcgaaatgattcgttttcgtatcgttgtcgttcgtcgactaaactgaaaaatatcactgaaaggcaaccaaccaacctgtcgcgcccagttcgtcgtgtcgccaagaatttgtagcttttgcaatcagagcatacacggtcagcgataagataagatagggctcacgataacaggtgccgttcgaaatgggttactaattcgttgacggttcaacatgttcaggctccgaagcccaatgaaacccagatgcgcatgcgccagccccacccgcgtatcttatcaaaacggccttatcgcagctctgtcgccttacatcgcgatatatcaggtgctccgatttgccgctttccacagcattgttacacattattcatggcggccacaaagccacaaaacggggaaacatacccgcggctctgagagaccggaaacaattattcttgcgtcatcgatgtatttctgaaatactttcgtggtgacccattcccattcccactgataaagctcccggtggtgcatccctcgaacagattaaaaattcactgaccttgtcacgattccgatgatcgatagcccagtggattccagctactgattaaaaagtctcagacacacaaaaagtcactggaacctaatctgcatttcaattatcacaaccctagcacaataatcgtggctgtaggtggcccatgttcgagatttcgaatcaattggaagagcacaatgcaaaatgataggagcaattggggagcaaaaaagcaacttgcggttgatgtggggttcctcgatttacatattgcctatttatcacagtaaaatggtgtataaaaatacaactcttggatgaatggtgcgttttaagaacactgtgtaacatgaaaagcaaacaattttcaggtcacgaagaaaagaaagaacttagttagaaatagttacagtcccttgtttctaaattcaatgtttaaaaactaattgaaaatggatgcatatggtttttggacaaatgaataattgcataagttt

SEQ ID NO: 41390 - DNA, 801 bp, DROSOPHILA
cgatacgaaaacgaatcatttcgctgtagtttccgcgtgaaaattacagaaaagattctcagcgataagagcaatcagcatatctagtgcgaaatggtgtccgtggagactgtaggctctattttcatcaaggccctgaagctgatcatcaatctggtgatcatcttcttgtaccgttggggcgatggtggcgaattcctgggcatcggcggcacgtggaacttaaacgaggagaagagcgccgatgcggaaatcgtagcctcaggcgtcatggttggattcttgatttacactggatgccacaccattgcctttgccttcggcacaaccaaacataagggagagctgtgcgacaccatcatgaacgtggttggctgcatcatgtggatcgccgtgggcggagtggcactccactactggaagggttacatgtccgacgagggattcctgtatgtgaactcggagcgtcaagtgggcattgccatgggctcgctgtgcgttatcgagggcgcactgtacctgctggacaccgtgttggcttgcatacactattcgaagggcgacaccgactacacgcagtagaaactgaatagtggggataccaatcgcagccgccgaataaacaccatccacatttgtctttatacatagatcgatttaagtgcaaattagttattatccgcaatcaattatcaactatacgttcgtaagggtcaattgtcgctgtactatacactaactgtttacaattttcattcacgtttaacatccttaaattggcaaatacaaatagttaagacc

SEQ ID NO: 41391 - protein, 162 aa, DROSOPHILA; identical to SEQ ID NO: 28746

SEQ ID NO: 41392 - DNA, 3059 bp, DROSOPHILA
agggtcgtttttgtctatcactaattaaattcaactattagggtcgatgttacccattaggtccacaaatattgtatgagtgtgaaatgcaaatgaaatgcatcgacgcgctttcgttctccatagaaatcaattatgtccactttaagaaggaagttatacaagtccacagggcggatgattgatttgtatgtaggaaaggtcaagtattcaaatgacaaacggggcaactttgcagcctcgctataatgtattagtatttattgatcataacaaataacgataacaaattccgaaaaactcaataatataagttatcttgttatgacacctcatagacatatgtacatgtacatatatggtgcctaatgaataaagtggtttgaataatcaactttgtagtacgataacttcgtacttttccattcaaatctcctattgcagttgttaaaaacggtgatatcacccatgtatgggccatgaatgggatccaatggctacctccctggtactttcccatcgccaaatttccaagtggtgttcttgagtatgacatcacggtttcacgttaccgagtgtcttgctcggcaatcgattcaaggaaatcttggcccagaggtgatctggtaacttaatcgttattgcgcctgattacaccacttatatttattgtatcggcgtcgaaaaaacaaactgtctaattaaaactgattgcgtacgtcgctcacgagaccaaaatattgctgatagtgccattcatcagccgacgttttctggcaggcgggataagattatattatggctcggatggttcacaaatgagtcaacttttaatcgtacaactaagcttttcgaaataatctttttatacctaaatacatttgaaaattcagatgtttgtattgtgatcaattccacgaaatctaaacaaagagctgatctataatttgtatgggacttgggcctgataacagcactacttatacttatgaggagctgctcacgacaccgggaccgcaatggtggtgctagtgatggtgctgctggtggtggtggtggtgccacttggaacttgggacccggtggttgcctccgatatctgacaggcggtatatgatatgacctgggtggtgcaccgttgggttatttcgtcgaagtactcgtcctgcggacaagttccttggccaatgacgatgccatcctggcagatcgagtagcccctgcagccatcatccgactcgttggccagctgaatggtggaattgcccaagcccacgcatcgatcgtagccgcatttcaccttggatcgcgggacacaggctccgccatcggtggccaggaaaaatcttccatcggagcagacgccatgctccagcgagaactctccattgcccaaatccttgcagtagtagtagccattgcaggtcttgttatccgatataaatccacccgtctctggacatacacccttcttgctaatatctggcactgggacgaagtcacactccacattctgcggataatcgcactgggccgtggaggccttgaagtagaaggtgcccggacaggttccattgatcacctggccatcccagcacaactgatagccattgcagttgtccgtgtccttgacgaagaccccatccggcaagatgttgcaatagctatccgggtccattttattcgagcacggaaaatcgcggatgcagtcctgcgttcccgaattgaaattcatcccagtgttgcacactccgtgcgtccccttgccatccttgcaatagtaataaccattgcaggagtacggatcagccgcgaatccggtgggcagagcagcgcacggatcactggacagacacttgatactactggaactcaggcatttctggctctcccggtcgtagaagagtccagtcgcacagctaccactcacagggctcccatcgatgcactgaatccacgcgttgcacgcccgaggatcgttcatcttggttccgttgaccaccaagctacatattagagttgcattgaaggtcagggcgcctgatatcgtggggatcatgatgagtccggaaatgaaggcgagctttgtgtctgttttgcataaaagggtataagtacgatattcgaaataagttgcaagtgaagtatgctttcaatttcgatttaaattgcatatttttttttcaataaatgtttgagttttcgttatgaacttcttgagcctaagtctacggttttctatatttatatctgtctatgaaatggtaattcttctcgaaacaacaatatagttacttcgatggatatctgctagtgccagagatactcacccatctcgagttcagcaaacttttagtattccaaagatacaagtacctcttaacggctaacgaggaaaagaacgtctaactggatgccatccaagttcgccaataaatacaaatcgaaagacaatgcttatgccctcgctacttttgggttttccgaaaggtctgtaaattttggaagctctaagttagtctagaactgtcttcagtggctaaaatggacgcatgacgtattcatatttcacttttatcagattcggttaaatccaaatttgacaagtgataaacttggccaacgccggtgcgcagttcatttaaaacccaatttgtttttatttttgtcaacttgtgcggtcatacctttggttttttggtagtattcgttgtcgaattcgtatccgcttgtttataattactatctttagattgggtctaatttaatttattacacatatagtaattaactttatttcaaaatcaaatgttattatgtttatcgcctgcgatctgctgactcaggtgcacacgacattatgctattaatagtccacgatgaccgattcttactgacatacatacttattgagattactgtttaaaattatacattattgtgaaattatttacgattaaactaactttatgaaataatctgccgatcgtcggttttaattgtacctgatagtcgtagagtaaatgagtgtacagagtgttcgttgaaaggaaagatac

SEQ ID NO: 41393 - DNA, 1059 bp, DROSOPHILA
atgatccccacgatatcaggcgccctgaccttcaatgcaactctaatatgtagcttggtggtcaacggaaccaagatgaacgatcctcgggcgtgcaacgcgtggattcagtgcatcgatgggagccctgtgagtggtagctgtgcgactggactcttctacgaccgggagagccagaaatgcctgagttccagtagtatcaagtgtctgtccagtgatccgtgcgctgctctgcccaccggattcgcggctgatccgtactcctgcaatggttattactattgcaaggatggcaaggggacgcacggagtgtgcaacactgggatgaatttcaattcgggaacgcaggactgcatccgcgattttccgtgctcgaataaaatggacccggatagctattgcaacatcttgccggatggggtcttcgtcaaggacacggacaactgcaatggctatcagttgtgctgggatggccaggtgatcaatggaacctgtccgggcaccttctacttcaaggcctccacggcccagtgcgattatccgcagaatgtggagtgtgacttcgtcccagtgccagatattagcaagaagggtgtatgtccagagacgggtggatttatatcggataacaagacctgcaatggctactactactgcaaggatttgggcaatggagagttctcgctggagcatggcgtctgctccgatggaagatttttcctggccaccgatggcggagcctgtgtcccgcgatccaaggtgaaatgcggctacgatcgatgcgtgggcttgggcaattccaccattcagctggccaacgagtcggatgatggctgcaggggctactcgatctgccaggatggcatcgtcattggccaaggaacttgtccgcaggacgagtacttcgacgaaataacccaacggtgcaccacccaggtcatatcatataccgcctgtcagatatcggaggcaaccaccgggtcccaagttccaagtggcaccaccaccaccaccagcagcaccatcactagcaccaccattgcggtcccggtgtcgtga

SEQ ID NO: 41394 - protein, 352 aa, DROSOPHILA
MIPTISGALTFNATLICSLVVNGTKMNDPRACNAWIQCIDGSPVSGSCATGLFYDRESQKCLSSSSIKCLSSDPCAALPTGFAADPYSCNGYYYCKDGKGTHGVCNTGMNFNSGTQDCIRDFPCSNKMDPDSYCNILPDGVFVKDTDNCNGYQLCWDGQVINGTCPGTFYFKASTAQCDYPQNVECDFVPVPDISKKGVCPETGGFISDNKTCNGYYYCKDLGNGEFSLEHGVCSDGRFFLATDGGACVPRSKVKCGYDRCVGLGNSTIQLANESDDGCRGYSICQDGIVIGQGTCPQDEYFDEITQRCTTQVISYTACQISEATTGSQVPSGTTTTTSSTITSTTIAVPVS

SEQ ID NO: 41395 - DNA, 4243 bp, DROSOPHILA
ctcgtgacctttgaacccgacgctggcactttgaaacggaaacggaaacacacactcacacacacgtaatttggttagtctgatatcgatgcactatatgttggctaatttagacggactttggttttgaccaatcgccagggtcctacatatatggttttgactatatattctcgctatgtttagttgattatacgatttaggggtttactttaggtattttgagcattttcaattcatgcgattgtcgttgaaataacaattgggttttagctttgctttagctgccgtgacttttgtttgtatctctataaatttatcaatattctccgattctaattgcgttgggggtgtggttgtttattcgcaggacttctcacgtagttgtctataatttgcggtctcttaattggcacagttttagttttagctttagctcgtcgattttgcgaatccctatgtacacgcatagctcagtgagttgcagtgattgccattttgaataatttatttgtggttatttcttttcgtgagcaaaatgctttacggcttacagattttcgattggcgtacgtacatacatattacatattcatatacatttatcgaaatgagtttacaacctgtgcttaatttagtcgtacaaaaatactcagtatttacaacaagatataaacgacataaaatcataaataaataagttatcctatacaaagtcccgatctgtgctccaaggaacccggcaaactcgaattgagattaaatgttttaaaaacgaaaacaaaaatgaaaaaatgtgaagaaaatgaaatggcacgctccacagattgaataatgtcaacattacgagtaaatcagccgacgcatttgccggcatattaattttacaaattaatggaacactttaattgcattaaattgattccacccatccggctggcatcgattgattcgattcgcatccttacaccagtcgcaccatttgcaccatttgcaccatttacacatgactcgaggccgtcgaggcggcggcattgttgttcttgttccatttgttgatgtactccatgggtatttcaatctggatctcctgcacatcgtcgcccgccaagcaatcgacattggatttgcccttgcccgcatccttgcccgtatcctttgcatccttcgactccctgccatccttggcggcagctgccaattgtccgcccaggcgggatccgcccgccgccagccgctgctgctgctgggcgatgggggtcagcagcgcctcatccctgtattataagttgtccaccatctgagactggcggcgatgcgagggcgttgtcgagttaaggtagctctccgagtagacgctcttcgcccgctggtcgtagcgcaggctggagcgccggatgtcgatgtccagaggcaggtggcgatccttccaccaattgcagaacaggcagagcagcgtgttgcggaacgcctcccggaagtcgcggttgaagtacgcgtagatcagcgggtttagcgttgagttgaagtacccgatccagaagaggattgagacgactatgtccggcacttggcactcctcgcaggtcatggagagtgtgtacctaaaattaaaacaatataattattagcttacactcattatctttaacttaatttaagtcaattttaaattagttgcacaggtaatgcaattttatgtactttttttttcccggcattgcataatatctattttttaataatacaaaagcaaatataaaagatcaaatgaatatttttgtttcataaaagttaaacctcataaacgatctatatttgaatactttgatcaccatttgaaatctttctgcatcactttttgtctgtgtagcacataaagatgagatatatatacccataaattccagatgcatgagtgggccagggctttgcataaatgagattatactctgggtggtgtgaaaaacaacaaccgccgaaacaatggcgcacgggccgtatgagtaatatttaattatgcatgcttgacattagataaattatgcctggaatcccatgtcagcgggattggcctccaactctcaaccaaacgttcaaccttcgacggctggttggtactcaccacaggaagaaaggcagccagcagaggatgaaggtgcccatgatgatgcccagcgtgcgtgcggccttgtgctcccgcttcattttgattaagtgcttgtccttagtgggggtgtgctcctgctcgacctcgtgcagcgtcaatgttttcgacgacccggatccgctcagcgcctcgcctgccgtaggagataagatggagatttgataaaagtccaggctggagatgggccactgaactcaatgcactcgcactgcatcactgtccaggatgcttgtagaacaaactagtgatctttcacgctcactacctgtttgctattcagaaagtaataagactttctgtcctggtaaatttatatttttgaagtattatttccacttaaaacccattatatatattcaaacaaacatttctttacagccaaactaggtaagccttgttgtttacaacccaactttgactccaaactcacctgatggctgcatggatggtcggtgcatcagcatggcattgccgtgccgcatcatcagctgcttctcctgccgattggcttcccggaagatggccaggtaggtgaatatcataatggtgcagggtatccagaacgatatggagctcgagatgacggcgtagtacttgttcaccacgaacgagcactgcgtcggattctggatgacgaactgctggtgctgcggcgtggtgtaccagccgatgaagatgggcaagaaggagagcagtgccggcgatatccatgtgtttagcagcataatgccgaccacgcgtttcgtcatgctaatcggatacttgaggggcttaacaatagcatagtatctgtgaagtgggcaaaacgccaggttattgggccctcatatagctatagttctggctgtggcatgcaacttacctatccacagatatgcagcataaatgcaaaatactcgctgttgagaagtagacatcgaggctgttccacaaatcgcacaggaaggggctgaagttccacctgaaagggtccaatgaatggaggcattagtatcgcgatgcttacccaataacgaggcaataaactttggcctttactttctaacgtcattgtatctgattatcgagtccatgaatttgcagtatatatttttgttgactcatttctggttttttgcctcacctaaaatgccacgcgaaatacttttatgaagtcatcgctttaaaactgatttcctggtttttagctgtgcaaaaaatttagtttttcacgattaattccctttgtgacaacacagttatttacgtactctgattaaaatcatttgattgtgggtaaaattgcgctagttctaatatttactaccatttaaaatacagatatataggccataaaaactcactagatatgcgcaataaggttgctctaaatttaaacggcattttactgccaattcctgaatgtaggtctataaaaaactcaaactgactagacacactctctttttcgcctattttcgttatcaggccgcctgatttatgtgtttatcgatttcatcttagtttcggttgccaggtgacattgcccctgaactgccattctggagggccaaattaaaagcttagatgcactgtgagaccagaaaataggccataaggcccgaggtgaaaagtggcaaggaaagcggaggcgactctgttcgctgcatgaaaaactcattaaaacttgcgtcgtcgctgttcgcctgtcgcttctgccgtcgcccttggttgccactccgcattttggccatttcggtgaaggcggatacccggcctttttggggccaggagccagtggaatttattatcgggcgccccgtttggcatcagtttcaaaaacttttcgactatccaacgaggctgtttttgctcgctggtttttggtgctttacactacattgccatttggggcgggcgcgccatcggttttgacacttaagccatgaaatggcagttcctcgtgctgcaattatgcaactggcaactgtgaaggtaaaatgtctaatgaatgccaagtggcggcgagttggctgttgccagaaccaaaccgatgccaatttatatgcaactcgcgcttggccaaagtttttc

SEQ ID NO: 41396 - DNA, 1224 bp, DROSOPHILA
atggactcgataatcagatacaatgacgttagaaagtggaacttcagccccttcctgtgcgatttgtggaacagcctcgatgtctacttctcaacagcgagtattttgcatttatgctgcatatctgtggatagatactatgctattgttaagcccctcaagtatccgattagcatgacgaaacgcgtggtcggcattatgctgctaaacacatggatatcgccggcactgctctccttcttgcccatcttcatcggctggtacaccacgccgcagcaccagcagttcgtcatccagaatccgacgcagtgctcgttcgtggtgaacaagtactacgccgtcatctcgagctccatatcgttctggataccctgcaccattatgatattcacctacctggccatcttccgggaagccaatcggcaggagaagcagctgatgatgcggcacggcaatgccatgctgatgcaccgaccatccatgcagccatcaggcgaggcgctgagcggatccgggtcgtcgaaaacattgacgctgcacgaggtcgagcaggagcacacccccactaaggacaagcacttaatcaaaatgaagcgggagcacaaggccgcacgcacgctgggcatcatcatgggcaccttcatcctctgctggctgcctttcttcctgtggtacacactctccatgacctgcgaggagtgccaagtgccggacatagtcgtctcaatcctcttctggatcgggtacttcaactcaacgctaaacccgctgatctacgcgtacttcaaccgcgacttccgggaggcgttccgcaacacgctgctctgcctgttctgcaattggtggaaggatcgccacctgcctctggacatcgacatccggcgctccagcctgcgctacgaccagcgggcgaagagcgtctactcggagagctaccttaactcgacaacgccctcgcatcgccgccagtctcagatgcagcagcagcggctggcggcgggcggatcccgcctgggcggacaattggcagctgccgccaaggatggcagggagtcgaaggatgcaaaggatacgggcaaggatgcgggcaagggcaaatccaatgtcgattgcttggcgggcgacgatgtgcaggagatccagattgaaatacccatggagtacatcaacaaatggaacaagaacaacaatgccgccgcctcgacggcctcgagtcatgtgtaa

SEQ ID NO: 41397 - protein, 407 aa, DROSOPHILA
MDSIIRYNDVRKWNFSPFLCDLWNSLDVYFSTASILHLCCISVDRYYAIVKPLKYPISMTKRVVGIMLLNTWISPALLSFLPIFIGWYTTPQHQQFVIQNPTQCSFVVNKYYAVISSSISFWIPCTIMIFTYLAIFREANRQEKQLMMRHGNAMLMHRPSMQPSGEALSGSGSSKTLTLHEVEQEHTPTKDKHLIKMKREHKAARTLGIIMGTFILCWLPFFLWYTLSMTCEECQVPDIVVSILFWIGYFNSTLNPLIYAYFNRDFREAFRNTLLCLFCNWWKDRHLPLDIDIRRSSLRYDQRAKSVYSESYLNSTTPSHRRQSQMQQQRLAAGGSRLGGQLAAAAKDGRESKDAKDTGKDAGKGKSNVDCLAGDDVQEIQIEIPMEYINKWNKNNNAAASTASSHV

SEQ ID NO: 41398 - DNA, 3381 bp, DROSOPHILA
ttttagcaccggatgacggttattgcgagccgtttttaatttatagacgcatttatcatgccatgattgcccgtgtgctgaaaacagaagtgccccggcgccgcagactagaggattttggaggtaacttgccgggtggtgcaagcaaatgaggcgcaaagtggcttgttgaggccatttgtagaaatgtcagctgcagaactttgataggagtttattgggaaagctatacgattgttaaataagctcattaaatgaatcaaacaaatttaattgtattaattcagcggtataaaagttaaagaaccgaatcacattgtgaatgcttcaggtttatacatatattcctcgctttttttttacttttgaaaaatgatatttttcaagttttacaaatttgcatattaaatttgataaaaattaagtgcttaccgaaaatgaaccacatacgagttaaaagtcaatttacattacatcgtgtaaaatcggatgcaattcatgtagaatataaaatgacagcactcttttgcgcgcacatgccctaacccaatgttcctcctccatctttcagcgattatgacctattgctggtgcgtggtctatagtgaatacgccaacctgtccgaggagaacgagcgcggtcgttacaacaagcagccgtaccgtcgctagaatctccaggagcactattcatcagaaattgcattcaagaagctgaatccaccacccacacatcttcatcctagcttcctatgttcgtttttagtgattatgtctaactaataattataatttagttgaggcgagccagcccttcgctcacatcgaatttacgcggcccgtggcattaagtgcaatggaattatgtatttaacatttaaataaaactttaatccagatattatgtgaatttctgttgtaatttgtacgtaatacttgtaattgtgaaagaggagttcaaaaaccgaaaactaataacaaaaataaaaacaaactatttatcaaccgtttgagaggacgaggtcttgtgtgtttgttgttttttatttcaaaatataggttttatctttaggcatatatagttatattcaattctctcaaagtctatcaaaattgtaaattaactaaaaatatggatgtgtagggggcgtttcatgtggttgttgttttagctaagtgggcgtgttccatgtaactacacaagtaactgactgcgctctacagctcgctgcgcgagtacttgggcttcagctcctcgatacgcttgatgaagtcgcccttctccaggcaaccgtcacagctctcgtcccagtcgttgaggattttcttcaggtcgcgtaccttcagcttcttcaggtccacgctgttcagatcgatttgtttctctgcaatgaacaatccacataaataaatgtttatagaagtatattaaggcgaagagcagcgacagaaaagctaaatgttaagccaagttaagagtttttgtttctaatagacaccctagattaattgactcttagtaaatgacgattaacgttttctaataatctaaaccattaacattcattttacaaacagacctatctcataaaatgtagaattttatgcgagttaccacaaaataatttaacaagctatgatataatagtaaagcatacatgcgaaattgtattcctgaattctttccttttgccaagaaatgctaggtgcttcatattgaattctgtatacccacacttcctatatatgtatagttcctaactaaaatatttaccatagcgaaggtcgcagatttgtgcgtccttcttcttcagcttctcgcagatcttctcagctggcatggaccaactgaggggtttgctcagctcgttgaggatgcccgtggcggattcttccagaccgccgaggtagtaacactacgaagaaacgcatacgtgtatcatttttcccagagaataggaagtgagggagagggggcggcacttgtttgccggctactcacgaatctgtgttccttgtttttctgcgctttgcagaactttttgaaggccgtttcgatctgtttgtagtccttcttggtggagtcgtccagcgaatctgcgaaccgcctaaccgtcttgacgcaaactgcggaacgaaagaatggagcccggtgaaaatctgttccagaacatctcaaccacttacgtggccaatcacataccttcgcagtcctcctctttcagggccagcgacgtttgggccaacgtcgccaggaagccgatcactaccaccatgtaccacgtcttcattttgttattacttcgactgtgcttgagcgtactttaattaactgtactgaattctttgcatgcgatttgattttgtccccgaattgttagcgttaggtggccgtagatatgggtgttcaccgataggtcaggcatcgataaaagtactcatttatcggcggggcagcgccacgttttcaaattggaaaacaaccgatatggtcatactatcggggtccggaatttactggctaacaggtgtggggatcgctcagctgctccgttttacgcagaggcactcctgctcagttttcaatcacgcgcgaatgcgaacggaactgcgcgtcgtggaattatttaaattagttaaagctaagcaaatatgctcgactgcacgttgcccgtgacgtagtcttggacttaatcctcttccagtcccttaatatagcaccgtatctgtgtaatcgccaacagtattgaccaagtcgtccaagtgctcactactccctcggctatttggagttattgtaaccgttggcaactgccacagcaaacgtatttacaattatccggataaaatttgcaattacacaccttgctaaaaataaaacggaaaagaagcagcccattataataaatcgtttaaaatgcctgatgtgaagttctttgccgtgctgcccaccaatgccagtacctcggatcgagtaacccggctgtccatcagcggcaacctgctccaggatccccagcagtgagtcctttgatatttcgcgtttaaattccgcgaactttaagaaaatcgattagccacttcccgcgaactgaggtggagaaattgcctctttgcgtgctgaaaatataaatatagtgttcttaaaatcgtttacgtatgtgacccgattagacgaaatactcaccaaactcgcgaacaatttatggcgcacacaaaaaacatgcaaatgggctcatgaatttaaataatttatacttcttctgccagatgatgtttgttttttataaattccaaagacctcttatgagtttatgatctattagggcgataaggcggtggtgatgggaccataaagaaatctctgccagatgtatacgt

SEQ ID NO: 41399 - DNA, 830 bp, DROSOPHILA
ctaacaattcggggacaaaatcaaatcgcatgcaaagaattcagtacagttaattaaagtacgctcaagcacagtcgaagtaataacaaaatgaagacgtggtacatggtggtagtgatcggcttcctggcgacgttggcccaaacgtcgctggccctgaaagaggaggactgcgaagtttgcgtcaagacggttaggcggttcgcagattcgctggacgactccaccaagaaggactacaaacagatcgaaacggccttcaaaaagttctgcaaagcgcagaaaaacaaggaacacagattctgttactacctcggcggtctggaagaatccgccacgggcatcctcaacgagctgagcaaacccctcagttggtccatgccagctgagaagatctgcgagaagctgaagaagaaggacgcacaaatctgcgaccttcgctatgagaaacaaatcgatctgaacagcgtggacctgaagaagctgaaggtacgcgacctgaagaaaatcctcaacgactgggacgagagctgtgacggttgcctggagaagggcgacttcatcaagcgtatcgaggagctgaagcccaagtactcgcgcagcgagctgtagagcgcagtcagttacttgtgtagttacatggaacacgcccacttagctaaaacaacaaccacatgaaacgccccctacacatccatatttttagttaatttacaattttgatagactttgagagaattgaatataactatatatgcctaaagataaaacctatattttgaaataaaaaacaacaaacacacaagacctcgtcctctcaaacggttgat

SEQ ID NO: 41400 - protein, 173 aa, DROSOPHILA
MKTWYMVVVIGFLATLAQTSLALKEEDCEVCVKTVRRFADSLDDSTKKDYKQIETAFKKFCKAQKNKEHRFCYYLGGLEESATGILNELSKPLSWSMPAEKICEKLKKKDAQICDLRYEKQIDLNSVDLKKLKVRDLKKILNDWDESCDGCLEKGDFIKRIEELKPKYSRSEL

SEQ ID NO: 41401 - DNA, 3411 bp, DROSOPHILA
aaccaaagaaaccaaccaagaagaaaagaaaacctaaaaaaatgtttaagaccgttcaaaagtatctctactaagaagaataaaataagaaacaggaccctttaagaaacgttaattgttactaaaatcctacggatcgggagatctagtagtcaggacggccgagttgtagtaggctgctccttctaccctcttcctttactcttagtcatacatacctaattatacatagccaatctagtcataagcttatacactcatacacccatccttaacatacaaatattatcgagaaacttatcgactaatcgactcgccactctgcagagagcgcggcagtcagtcgctgttgaaccaagctaaaggacagatcaaaaataaaagagacacgtgaaattgtattagaatattaacttctgtaaacggcggctaaagtatagtatagtatattctagtatggtatcgtataatatagcatagttataggtaacaaaatgatacaaaaaaataataataatattcaaagagacatgacgaagagctcagttgacgcagaaatcgttcagcaattcatttattggtccgaactccgaattaagatattcgatgagattgggagttcggtctgtagatgactattccagcgtttctcagatgttcgagaaccgtcaatggcgctgagatcttggagatcttggcgtgacatatgcaattcccttatcaatccgatgcgataccaccgccaccacaggagtctgttcttctgcgaaataggcaattccgatgttattgccgtgtaatttacatgcggccccgctatcgtacatcagtaaatcaaaaatcgaagaacgaaaaatcagcgctatcttggagttctgattgagatagcgtgtgcattttggaaattgtttttcgccgaacaaaaccgagcagaatggcctttgcatatttaagagctccagcctccgaaggtgcagtatcatttgagttgtgagtgccgccaagatcgcagcggggcgttcgagaaaccaggatacaagttaaccaaaggatataaaacatgaatagaggtaaactaaagtgggacgccagctgaacattgacagtgatggatttcgtttgaaagaattgctctttaaaaatgtacatataaattaaattcaaacattaagtttttaagttgatagggctttctggcagaagggtaattttcgtaccagctatcgtagtttaaatttaaaaattgactcacatgtttggggttaataaatggtaaagcacactggatatgccatcctgttcctgacacaatgttcccacgattttcgattttacttgcagctagcggtgtcctgtcgctgctgtttgtggccagcgccctgggcggcgtgatcgaggactttgaatacctatcggtggccgagatgtgcgacctgctgccgcaggagacaagcttcctgcgaccgaatacctgcgacaactgggtgcggtgcgccagcaactacagcgtgctggagcagggcggctgtgccgcaggactcaactacaacaaggagctaggccgctgcatcctggcatcctccagcgccgcggtgtgtccctatgccgacagcattgcggacaaggccacgaacctgtgcgccaacgaaacggaaggcgccttcatcgtggatcccagcagcagcgattgtcgcggctacatcttgtgcaagtcgcacaagcagatcaaggccaactgtcccaacgagctgatcttccatcccgtatcgaggtcttgcgtgtacgaaaagcagtaccgttgccccatcagccagacgaagaagaccagtcccgcctgccgatccctgccgaacaacacccgtctggccgatcccgtccactgtgaccagtactacgagtgcgtcagcgaggtcttgcacagccgagcctgtccagtggccagtgcctacgatgctaatctcggctactgcgtggatgtggctgaggtgtcctgctacgagagtgccgccctgccggaaccggaaaacaccttctgcctggacagtgccaccggatccgctcgcgttggctactttgccgacgacgagtcctgctcccactactatatctgtggcagccccgtcgccggcaagcacgacacggagcccaagcacctgagctgtccacttggccagtacttcgacttcgagaagctctcgtgccgcgacagacttaacgtacgctgccagctggacaggtgtgtgggcaccaacatcacctacgtaaacgtcgccggcgattgccagagctatggacgttgctccggcggagtgaccgtcagcctgggccagtgcccaacgggctactacttcgacgagcgcaaccagggatgcacacagaccaactaccacaacatcgcatgttccgtgtaggctgtcccagaagatcgcatccttaccacaatccttaccaaatcgcatccaatttaaatatccaataaatcgatccaattcatggtggaggtcaaatgcattgcttgaaaggaattcatgtactttgtggtgggaagtgttaagttttatgacattcatccatttactttttaccatggaaatgggtctacaaatattagcttctcgaaaaatgtccaataaatgtgttactccattgaaacctgaaatgtatatatatatagtttatccattgcatttggctctattgtagttttattccctttccattcgaattttaccgtctgcttcctctttatagaagatgttaccctaaccttgaacaataaaatatgaattggtataaataatgctagagaaatactatgattttttggactgatttttgaactacattggcggaaatgttcattagcgaaacgaagttggcgtgataaaattcttctggcaacccttttgatatcaaaactgcgccacacaacgattcatatttggcaatctgttttcgtgacacttgcagtgcccaaaaaattatcagttttaattaaaattgtaccccagtggagggttcggagaatttcaaaccgattccagatagtccagataatgaattcgctactcggagctgccgcgatcgcttatttccgtgttggccatcaggcgagcaagaagtatccaacgcccaagggtcgtttttgtctatcactaattaaattcaactattagggtcgatgttacccattaggtccacaaatattgtatgagtgtgaaatgcaaatgaaatgcatcgacgcgctttcgttctccatagaaatcaattatgtccactttaagaaggaagttatacaagtccacagggcggatgattgatttgtatgtaggaaaggtcaagtattcaaatgacaaacggggcaactttgcagcctcgctataatgtattagtatttattgatcataacaa

SEQ ID NO: 41402 - DNA, 1086 bp, DROSOPHILA
ccaagatcgcagcggggcgttcgagaaaccaggatacaagttaaccaaaggatataaaacatgaatagagctagcggtgtcctgtcgctgctgtttgtggccagcgccctgggcggcgtgatcgaggactttgaatacctatcggtggccgagatgtgcgacctgctgccgcaggagacaagcttcctgcgaccgaatacctgcgacaactgggtgcggtgcgccagcaactacagcgtgctggagcagggcggctgtgccgcaggactcaactacaacaaggagctaggccgctgcatcctggcatcctccagcgccgcggtgtgtccctatgccgacagcattgcggacaaggccacgaacctgtgcgccaacgaaacggaaggcgccttcatcgtggatcccagcagcagcgattgtcgcggctacatcttgtgcaagtcgcacaagcagatcaaggccaactgtcccaacgagctgatcttccatcccgtatcgaggtcttgcgtgtacgaaaagcagtaccgttgccccatcagccagacgaagaagaccagtcccgcctgccgatccctgccgaacaacacccgtctggccgatcccgtccacttggccagtgcctacgatgctaatctcggctactgcgtggatgtggctgaggtgtcctgctacgagagtgccgccctgccggaaccggaaaacaccttctgcctggacagtgccaccggatccgctcgcgttggctactttgccgacgacgagtcctgctcccactactatatctgtggcagccccgtcgccggcaagcacgacacggagcccaagcacctgagctgtccacttggccagtacttcgacttcgagaagctctcgtgccgcgacagacttaacgtacgctgccagctggacaggtgtgtgggcaccaacatcacctacgtaaacgtcgccggcgattgccagagctatggacgttgctccggcggagtgaccgtcagcctgggccagtgcccaacgggctactacttcgacgagcgcaaccagggatgcacacagaccaactaccacaacatcgcatgttccgtgtag

SEQ ID NO: 41403 - protein, 341 aa, DROSOPHILA
MNRASGVLSLLFVASALGGVIEDFEYLSVAEMCDLLPQETSFLRPNTCDNWVRCASNYSVLEQGGCAAGLNYNKELGRCILASSSAAVCPYADSIADKATNLCANETEGAFIVDPSSSDCRGYILCKSHKQIKANCPNELIFHPVSRSCVYEKQYRCPISQTKKTSPACRSLPNNTRLADPVHLASAYDANLGYCVDVAEVSCYESAALPEPENTFCLDSATGSARVGYFADDESCSHYYICGSPVAGKHDTEPKHLSCPLGQYFDFEKLSCRDRLNVRCQLDRCVGTNITYVNVAGDCQSYGRCSGGVTVSLGQCPTGYYFDERNQGCTQTNYHNIACSV

SEQ ID NO: 41404 - DNA, 11847 bp, DROSOPHILA
gtgaatcgtttttgcagcgaatggcgaaatttcctacagcttgccaattgttttggttgttcgcagttcattctttttactcattggtaagattgtctttctgcatgaaaattcataacgtcagctacacaattctcttccattcaatattttgtccatacataatttcgattgcgtaatttgtaattttcaataactctgttatgtagatttggtttgctagttttctaggttacatatgtatgatacttagagctagaggtaacattatgggattgcactttttccatgatttaggctagttctatctgtaacaacattaaaaagtgtgtttaatatgaaataaaagcagggagttcattccgctcaggatttgcaatcctaatatacgatgatgacacatgtgaataatccaattttggatcgtattaatactccaaaaatcgatggaaaaagtgtttcgccttcgacaagccgaagtggtgtacataattcttagatgattcatttgacaacatttcacttgaagttggaacttttctacgcaaagagtcgctcgatttctaattggctttcgctctgccatatatgtatagttattacgtatatcttctgtttagttggacaaacaacacttatatatggatagtatagttccggggcagcattgtccctgcagccgcggcttggcgggcttagaacacaactttaatttaaattccctatcgttgcttaaacgaaattgtacacgtatacataaacacacatcgagtattgcttagcttcaaggattatgctagctatatcctggcacaaatgccactggtatggccgttgctcttgttacttctcttcacttcagctggtgttttccctccttgggcacatatacatgtgcgacgattcactcaagtattaaatatcacttataggggcattgttccgcatccacgagggtggacgaagcaggaatgtggccgggatgcagacgctatccggtctagacgtagtaggcgttgtacggatttcgtttctccagacagggcagcacacactccagcgtattgcggaatgcctcgcgaaaatcgcgattaaagtaggcgtatataagcggatttagcgtggagttgaagtaaccgatccagaataacaccaccacgagcacatcgggacatgggcaggccggaccgcagagcgatgtgatgacatacctggaaggaggagtgagaatcacatgaatatgagtcaccagaaaaagaagaataagaaggccaacaatggattacggatggcggtaccacatccgtacggcctatctaccgtcactcaccacagaaagaagggcagccagcagagcagaaagacgcccatgatgatgcccagggtgcgggcggccttgtgttcggccttccatcctttggccggtcgcacggaaccgcctgtggggcagatagagagtttagaagggatatgaaagctggcaattggctgattaagttcaattcgaatcgattcgtttcgatccgccagtctgttttttttcttttgttgggtcatagcaatcgacagttttctggttcatttctgtctgtctgcgaaagcactcgaaaaatgggtttctttttaagtagtctataatatgcttaatgtggtatttgttgtctacctgttggatgtgtttgttttatggtttattgcttctaggatgaaattgtttatacagctaatactggaaagtataggtgtttgcttaagctttaatcggcgatacccttttatgttaactatgtatgtaaattaattgaacttcaatcaattaaaatacagaaaatttcaaacaaacaaattttaaagaggtaactaaactaatcttaaaaattattaaatattttctctgtgtgtaaattgccaagaaatgcggtttatgttcgttttattgtgagagaaagattatgccggcatgttgcgtatacgccatgtgtgtggtatccttgtttaactttgacattagtaatacttttgctgttatatgttgttggctatcgatggcatttcaaaccccacaccgccccgctccctgcgtccaccttgcaagtgactgtcattaaagtgctggaaaggccaacatgtgtgcagtatcttggtgctcgggcgtgtgggtgtgcgggaaaagcaataaaaacgaggcaaacaattgaaaatatttacacaggacacttgttatcacaaagacatacaatcccccgcatccatccagtccagtgcgcccgccccaaacataaacataaacatcactggcggccaggaggaaaaacaaatcagacagacaacagtgagcaacaggaagcaacggaccatcgcccttgttcacccattgcccatcgcccattgcccatgttcccccatccagtttgccacctggatcccttgatggacgccactcggtgatggccacagccaggtgaaatcataatgcaaaggctgtgtggagggaggcgtaataaagcaaagcaaacgcacgtgcaaacggaagcaattatgtacagcatgagagcagcgaaaggtgaaggattcggatacggattcggaggcagattaggtggaggtggagacagcatgaggtttcgatggtgtaacactccggattcagttgcctaagctggttagcttggcatccggataaggaggtgccaaaaaactggcacttctgtgggtatttgccactaaagctgggggctacaaaaatttgaggtagttcttttcggtttcatttcacggttgatttaatgatacttaggttaaccaccgttgaaatgattgggattgcagaaattcagggatatctattctagtatgatttttggtaagaacgttaactagtttcaggtgtattcaaaagctttcaattttaaacataataggtttaaacatatacggaacagtaatattgattgttttttgactgacaggatatttcatatgaaataaatagatttttgatatgtttggtctaatgcagtggcataaaatacgaagtgaatgggacttgatttgattaagattttctgatgattatatatgtattgatatagagaaactataactattggtgttgtgaaattagtgaattctgagtgtgaaatgtattataatataatgcacaagttctggactgtgggaaatcgaatgattcagatggataatgggtagcaatgagataggtgctgaagctgagacaagcagaaagacagagatagagagagaagcgggagagaaagagcgaaacgtagagactgggggaggagaggaggggagatacgacaagactcaccggttgcaccacagtgactgcatccggttttgaagcggcgcttccggttcttgctctgctgccaacatgctgtgaccgccgccgttcgcttgtgccagaatcgagtggaactggacgaggaggcgggcctctggccaagatctggagtttgctcgtgaatactacgtttactactagtggttactgtggtgtcgattgtgctgtcggcgttggcggttgcggttgcgtttgcggtggtgccggtggtgctgctgatgtcggcgccgcagagcggacacttgggcagcggactgggcaccgcggcgaaggtgatgccgcggggccgctgctcaatgatctccgcctcctcctcatccacaaagatgcagatgccgccgcgtcggatcagcgaggatttattggaaaattcgtgctctgcttgcagttgattgttgcattttcgtacgatttcgattgtcaatttggccatggcatttttggggttttattggttggatttggttttggagtagaagtagtttgtttgtttggttggacataatttggtgatttcgatttacatatatacacatacaacacacaacgaaatggcgtggaagagagatagatataaagagatagagacaagtagtaaacaatgtacacagggtatttcacaggatacgaaaggacttcaacttctgagatcacatgcagccatgcaccggcaaacgcaaaggatcgggatcgaaaagggaatggattcagattcattatcgttggctccctgtctctggaagtaggtcgtccctttctgtcttcgtttgcaggtgcaactaactaaatgctatacattatattatatatatatagtaagctagttaactaaagtttcattcgaagcatttgagtattacttttccaatgagggtttataggttctatacattttaaaacactgtatgatttttcagaaattcgcaccgcttttgaaaggaacttaaatacacaattcacagttttcttcaaggtaagaactatatttaaatatggtaaaagttcgtatctttattttaagatcaaaattctagtaagaccagattccttatgttaaacccgaattcaggccaattactcctcaaaaaaacaaggacaaaagaatgtgcgaaaaagttaagtcaaacattgaaacacttgaacttttcgtggaaaactgacaaaaacagaacgaatttctctggggcagatataaattgtcttaaaagagctacttaaatcaagcacgagctatacagtctacacaatgaccaaatggatgactactcacttgcggaactggtggaaacgcggcccatcgggatgtagctgcgactgtcgctgttctcctgcgagaagttgatgacattcacgtcgtaggtcaccacggacgcctgtctcttccgcacagtttggatgccatcgtagcctgccaggatgctgcagcggccttggcggccacccactcctccaacgccaccagcccctccattgccggaaacgctcacgtccgcatcgccggcgctatctttgcgcttgaacagtggcgacgtgacatcccggtgctcatcgccgcatccctcaaccggcgacagcgtggaatcgagtatgatctccggcttgggcgatatgttggactgtgaggccatttggggatttggctgcggcactggaacgggcataggcaggctggtcaccacatccaaggacacagtggatgtgtcactgggcgtataaccaggtgcggcggcatgcggcggcggcgataggaagtacacattgatggacgccgactgcgcgttggaagaggcggaagagtccatggcacctccgttcggcacggaaatggccggcggagccggtgtgttcggtggggacatcagatagttggcgcacacctggtcactgagcgtgctcaggcgctgtggagcaccagccggtcggcccagcggaaagctcagcgagcgaaagatctcggccagttccgagctgctggcaatgagcaggccactcggttctggcaattctggcggcgataacgatggtggcggcgtggccggctgctggggcgactccccaaagcaatcggccagctgcgccaactcgtcgtcgctccgaatcctctcgggcggtgttttcagctcactgaagtcaatcagctgtaccccgtcgctgaactgctggatcacactggctccactctgctcgctgagcacattgatgtccagcaggatgtccggcttgttgggcgtggagtccgtatcgctgtgctgccgctggcgtctctcaagtttgcgttccttgccgccaccgcatccgttgtagctgtgcgacaatttccggttccgggagcgccggaagaagctggatccctcggagttggcctgatgtcgcttcttttccagcgtaaagcactcggtgctcgagcgtttcgtcttcgacagcagggacagaatgttgaagcccttctccttcccgggcactggctgctccggcaacgcccgcgattcactaatggtgcgcaggaactccgaatcgctggaggcgaatgccttacgcccacaggccgctgcgcccgccttcagcctgatgaagtccgtttcactgagggcagcgtactttcctccgcctgggccactgataatggtgccgcccgtctggcgcttaaagtacagatagttgtcctctatcaggcgcttcagctccttgttgtcctcggccagcggcaggtgggtgtcgtacaggtcgttgccctcgctctcgtcgctgttgagaccaccaaagacccggtacgcagtggactccggttccggttcgctgttcccactgccgctggtcaggctgagctgctgttgcgggccattgggatgagaatgctccttatcgagctccttcgaagggatcatcttgccctccgtccatatctgcggattgaacactggcgccggtggctgcaactgattgtgggagggctgctgttgctgcagtgccatcatcgagggagcactgtccgtgtgggtgaccttctcgtaccgctcctgctccaagtccctcagatcgatgctgctgcggctgaggcggcgtggcggcggcgatggcactctcagttcatcgcactcgtccctatcgtcgtcctcgtcggtggccggctgcagcatgtcctgtgggcaaaggacaatcactcaaagggaagtcatggtggcgcatcaattacgcacagccacaagggaaaaggaaaaactctcaagcggagtgcttccctctagcacctaatctaatcgctccacatccgttcattgaggatgggcaaaaagctttagagcaggatgtcaatgttgcccgtttgtatacatgaactgcattgctttaaagtctttgtatatttatttaggatactatctggatgtatcagcaactttaccaaattttactcaataaaaaataaataatgttttattcaactactaagagatcttcagaatggcaagcaaatgcgagtactaaagcatttatcggtttaataaaaataaaacatttttaagtatctctaggtattttaggcatctttggattaatgtgtattttttcattttgaacatctttgaaatgtttattgtttattgaatgatttattgaatttatatcaataaaatgcagcaaaatactcttttggctttcaataaatgacatctgtatcttttcggttcagtaacatttagtaaccttccaaactcacctccaagttactaagcgcactgtgcgtctcctcccgggcggatgtggcattcagatcacagtcactgggatgcagatagctcaggctggtgggctgctgggtgtggcccatgtggacgctgttaaggaggatgttggagctggtgcggctgagggccttgcgttgacgaatcgcctccctggaaaaccacagagcacagatcagcaattaagcaaactcatccactacgaccagcgaccatcgaccatcgaccatccgggtaagaactcacttaaagatgcgccagtacatcaccagcatcacaatgccgggtatccagaagctcaccgaactggagatgagggcgtaggccttgttgaccacaaacgagcactggtccggatgcagggaaatctcccgcaggtgctcctccgtcgtgtaccagcccagaaagatgggcgtgaaggatatgagggcgggcaggatccacacattggcgagcatgaagcagaccgttttgtgtgtcatattcaatggatactccagtggacgcacaatggcgtagtatctgttaaaaagaagagggggtcatctttattaatggaaatgaattgcggacaggtcctccgcacaaaggtgccaggtggctttcagccatttcctccttctcctcctcctccttttggcttactaattgattatcgctctttggttggctgaataattgtgtttcggtactcaggttgccatgcacagaaatcgatttattaaccttttaaagatcatgttgcatttaaatgaaggataaatgctcttaaccgaattcattatcggaatccgtgaaaataaggtggtgtattctttttaattatcaatatattaataaatgcaattgaaatgaaataattattaatccacgtatattgtacctcattattttatcgaaacttaatgctccttttaaagagtaatgattatgtttggaacattacagatttattagtttagccaaatttccgttagtggccatcattaattctctaattttgataggttctggttgaatttccctttgtttcttggtatgttttgtggcccgtcgaaaggtgagtgaaacacaaattaattaaaacagacaaaaggcccatgactccagtgtccatcgaccatccctccattgttgctggtcagcccgaaaatcgcagctgttggtgccttccaagtggggaatggcgccaattaacggcttgacaggatggagaaggttgtgggagttgggtggaatatgggtggaatatgggcaacgcccacgtttcggccagctgcaaatcatttgggccgcattcatcatacgggcgggcctaatgtttgcttttgatgtgcgcgcctttcatagtaattaattgtttcttcttggcaattcgccgggctttggtattgaaagtgatttggttgccaggcatctgggcaagattaatggtatttggccaaactaaacggctttcttcagtaccatagcccagcacaattgactttaaaccgcttaatatatagatagagagcgacataaatgggcactcacctgtccactgatatgcagcacaggtgcaatatgctggccgtggaaaagtaaacatccaggctgttgtacacgttgcacatgaacggtccgaacatccactttccgccggacagttccacggaggcgttgaatgtcatcgcacagagggccaccagcatgtcggccatcgccagcgacacaacaaagtaattggttatcaccctgcgaacgaaacaaaagcccaggaatttgtgaatatggcgtggttctgggcgggatttgaccagcttctccccacatctaaccacttgtcacagcgcaaaaccacgccaaacgtaatggcatatggcatgcatcatatgtgcacatgccgctgtactaagcgctttggttggctccttccgttggccaagcagtgcaccactgctttccatttcctgttccggtgttcaggagtttggaggcaataggtcaccggtatgcagcaatttccttggctgtcataagtcactcgactcaccaggcagctgccaccttcagctgcaagctactggcttgtgaagttatcatcttgtcttcggggcgtatgtggtttaaggagctgtttatgcgaagatgaaagcacttttgtgcttccaagtcatttattacatattgcgacatctattacgttggaaagtgtagttttacaggggctgacaacattgtctaaaacatgttattaacgtatattgtaatattgtagtaatgaagctcaattaaatcaagattattaatctgtgcatttagaagggctgttaatttcgaaagatccttttatgtcaagccgttttttcttttatgcactgctttattttgtaatatctcaacgcaattctatatggcgaacgttctatcgtaaggtagtaaatgataatctgagcactttaagctcctttagcggtataataaagactttaatcaacatctacccttgctgcagaaggcataaacgttgcgcaacattaaacggatgtcgtgggtgtacgtgtgggggcgtggccgggggcgctggcggtggcagagcgctcaatggtatgctacacttatttgcactgcactctggggcgtcctgtcatcgcgacgctgacatggcagcgatgggcttgggatcggcttgtgtgccgcatttaacttcgttttgttctttattattccacttgtcgctcatttaaattacatttatcgcgatggcgaaaaggattcgccctgccgcgtcactgtttgtttgccatttccattgtcctgcgacccttgcggcaatgaccctcaattaaactcagttacaggtggtgaaaacaaaagtaattggatatagacttaccgcagctttcgattgcgctgcactgaaatgatgaccaatgcattgccgaggacagcggccaggataattgacgagaagatgaatcctttgagcagcagcagcgatagatccagccagctctcctccagctccgcctggttatccaccgcaatgtcactgccattggccgttatatttgggccgactgtcgagaggagctcaaacgtggaatccgacgacaagtaggatgaaaagggcgaggagtaggaggcatctgacgatgtggctgttaatgatagcgaagtcaacgaggcatccacaaattgcgatgttataggcaaactgctcgtcggcgtcgtcgtagttttggctgctgctgtcgtggaaatgtggcctgttaatgttgcaggttgcaggtggctggcgttggtggctgatgttgctgctgcttgtgatgttgctgctcctgctgcggctgttatgggtaatgtcattgtcgtggccagaaggtcagccacgttaacccctgacatctcgtcgatttcgcagcccaattgagtcgcagctcattcaagttgctccgccaatgctttttcgctgtacttgtcgtttatctttttcccggctgctgtgcgtaatttaaaactcgagtaattgcaatctgcaatgcaaacaaggctgccgaagtttgccgtcatcctggttgccaatgttgctcctctgcgattccagtatttgctcacagctccgactgaaggtctctgctccatttcccaatcctccataggacgcttttcccgtttgagttgctggaaattggcaaaaagtcgagactcgcgcttcgatttggcactcaagcgcgcaacagtcggcgacacgggaactgcaaatgaataaataaataatttatgaaataatcggcgagtgtgaggctgtgaaactgcatggcaaaattggtaaaatgggaattcgaacggttgcgccgcccggggtgtttttatgtacatacgcaatattcaacagggggcataaaccctattgcctatttatgtgccgcagtaacacataaatgggattcttctgtttctccagtgccccgtcaaatgtccgttcgttaaaagtgcgccacttcaactttgctacactagattaaaataacagaaatatattgcgtatacgcagtgtgtgcactcggcatgcatctgcatttctatatccccagcgagacagcggtgctgtcaagtgctgacacttgtgcagagtggaatgtggaatatggacaagttgttgctttaaaagtgagattaaagcaagattatcagtgggaaagttgtttcagtagtgcctcacgcctgggcgcagtgaaaactgcaaatcctttttgtcccggtacttgtaagtaaaacaaaagactcttcataatctgtggtaatctcgaattttttcttttttattattttaaactttttgcgactcaatttggccgtaaaaatgctaacacatcatcagggaaaagctgaaagcgtgcttacactttactttctcccccgcaacattgaattgaagctgaatccgtccttggcactcagacaaatcgctggctacacgttttcattgcacttattctgtgcactctagatgccctgccctcattccaatcttcagagttttgaatctaatatttttaaggatttatgtacttatacagataaccttgccgaattgattgcattgcgttgtccttgagctgtcgattcgacttgtttactcagaccatccggtcacatcctcctgctagattggcaacttaatgttttaatgctcggacttaaaccacatcagtgcgctctatcatccttggcttatacatttcacaagccatt

SEQ ID NO: 41405 - DNA, 2092 bp, DROSOPHILA
ttcccgtgtcgccgactgttgcgcgcttgagtgccaaatcgaagcgcgagtctcgactttttgccaatttccagcaactcaaacgggaaaagcgtcctatggaggattgggaaatggagcagagaccttcagtcggagctgtgagcaaatactggaatcgcagaggagcaacattggcaaccaggatgacggcaaacttcggcagccttgtttgcattgcagattgcaattactcgagttttaaattacgcacagcagccgggaaaaagataaacgacaaatgtcaggggttaacgtggctgaccttctggccacgacaatgacattacccataacagccgcagcaggagcagcaacatcacaagcagcagcaacatcagccaccaacgccagccacctgcaacctgcaacattaacaggccacatttccacgacagcagcagccaaaactacgacgacgccgacgagcagtttgcctataacatcgcaatttgtggatgcctcgttgacttcgctatcattaacagccacatcgtcagatgcctcctactcctcgcccttttcatcctacttgtcgtcggattccacgtttgagctcctctcgacagtcggcccaaatataacggccaatggcagtgacattgcggtggataaccaggcggagctggaggagagctggctggatctatcgctgctgctgctcaaaggattcatcttctcgtcaattatcctggccgctgtcctcggcaatgcattggtcatcatttcagtgcagcgcaatcgaaagctgcgggtgataaccaattactttgttgtgtcgctggcgatggccgacatgctggtggccctctgtgcgatgacattcaacgcctccgtggaactgtccggcggaaagtggatgttcggaccgttcatgtgcaacgtgtacaacagcctggatgtttacttttccacggccagcatattgcacctgtgctgcatatcagtggacagatactacgccattgtgcgtccactggagtatccattgaatatgacacacaaaacggtctgcttcatgctcgccaatgtgtggatcctgcccgccctcatatccttcacgcccatctttctgggctggtacacgacggaggagcacctgcgggagatttccctgcatccggaccagtgctcgtttgtggtcaacaaggcctacgccctcatctccagttcggtgagcttctggatacccggcattgtgatgctggtgatgtactggcgcatctttaaggaggcgattcgtcaacgcaaggccctcagccgcaccagctccaacatcctccttaacagcgtccacatgggccacacccagcagcccaccagcctgagctatctgcatcccagtgactgtgatctgaatgccacatccgcccgggaggagacgcacagtgcgcttagtaacttggagcggccccgcggcatcaccttcgccgcggtgcccagtccgctgcccaagtgtccgctctgcggcgccgacatcagcagcaccaccggcaccaccgcaaacgcaaccgcaaccgccaacgccgacagcacaatcgacaccacagtaaccactagtagtaaacgtagtattcacgagcaaactccagatcttggccagaggcccgcctcctcgtccagttccactcgattctggcacaagcgaacggcggcggtcacagcatgttggcagcagagcaagaaccggaagcgccgcttcaaaaccggatgcagtcactgtggtgcaaccggcggttccgtgcgaccggccaaaggatggaaggccgaacacaaggccgcccgcaccctgggcatcatcatgggcgtctttctgctctgctggctgcccttctttctgtggtatgtcatcacatcgctctgcggtccggcctgcccatgtcccgatgtgctcgtggtggtgttattctggatcggttacttcaactccacgctaaatccgcttatatacgcctactttaatcgcgattttcgcgaggcattccgcaatacgctggagtgtgtgctgccctgtctggagaaacgaaatccgtacaacgcctactacgtctag

SEQ ID NO: 41406 - protein, 603 aa, DROSOPHILA
MSGVNVADLLATTMTLPITAAAGAATSQAAATSATNASHLQPATLTGHISTTAAAKTTTTPTSSLPITSQFVDASLTSLSLTATSSDASYSSPFSSYLSSDSTFELLSTVGPNITANGSDIAVDNQAELEESWLDLSLLLLKGFIFSSIILAAVLGNALVIISVQRNRKLRVITNYFVVSLAMADMLVALCAMTFNASVELSGGKWMFGPFMCNVYNSLDVYFSTASILHLCCISVDRYYAIVRPLEYPLNMTHKTVCFMLANVWILPALISFTPIFLGWYTTEEHLREISLHPDQCSFVVNKAYALISSSVSFWIPGIVMLVMYWRIFKEAIRQRKALSRTSSNILLNSVHMGHTQQPTSLSYLHPSDCDLNATSAREETHSALSNLERPRGITFAAVPSPLPKCPLCGADISSTTGTTANATATANADSTIDTTVTTSSKRSIHEQTPDLGQRPASSSSSTRFWHKRTAAVTACWQQSKNRKRRFKTGCSHCGATGGSVRPAKGWKAEHKAARTLGIIMGVFLLCWLPFFLWYVITSLCGPACPCPDVLVVVLFWIGYFNSTLNPLIYAYFNRDFREAFRNTLECVLPCLEKRNPYNAYYV

SEQ ID NO: 41407 - DNA, 4399 bp, DROSOPHILA
atttttaataacagatcgatttaaaagcgccgcttagtacagtagttatttaatgccccactgattgcagaatctcgcccgttttcttcagtgtatctatttgtgtgccccacgtgtgccgcgagtcaaagtttgcgggggaggaaggacgtggctgacacaggccattcggaagccaattggctgtcagtggacgactggtcacagcgtgcactttgaccccttcgccccggcaaagtgcagttccgctgattgcacaaatcggaacgtgaaaagcgttttgcgacgtgccgcacacaatacaattacactttatttacaatttccttctccggattactttctctcagcttttttgttcgcgtggcccgattttcctgctagcgttgtcttggccaagttaagcaatttgctggcggactccttggacgaactaaaattaaacgggacacaaatagatcacattagtagatgtcaactgttgggtgcattataagctcgacttttattaataatgtattcattgttacagttagatcgttaagcagtttatttgtatctaatcactaatatttatatacgtatagtaataaaaaagcattattaaacctatacatgtcagcaatcatttgaatgaatgtttttcacttggtaacgaatcacgccatccctaagctcacttaagtaagcttttaatataattcactgttttccacttggtgacgaattatttatgaacataattcacacattccttaaacttagaaatcttgcagtttattttttagatattgggagtttttcgaatttattgaggctcattatttaggcttttaggcgcctgaaatttgccataggaaaggtacaaaactggcagagctttctgagcttgggtttgctggcgaattcttatcggcattgcccagttggctttacatatgtggattgccagtttacagttgccagataaattctccatatttcggtttcggtgagagggcgacgataagctagtcggcaaatcgtgacaaatggcaaataatttggcgttgtaagatctcttaccgatcgccaggcgtttgcagttgcattgccgccggaatgccaatcagtcgctccatagctgaggttacgctttgtttgcgccacatttcctattagtgtagtgtttcgtgtatatgtgctggaggctgtgcctcctccaccgctacgccatgagcagcatgtcatggaccctgccacgcctctcgcagtccagtgcatccaccgcccacggactagtgggttccgttcgcctgacctacgccatatgtgcctttttggcaacttgcctacacgccgccatgaggaacatgctcggcatgatcatcctcaagatggtcatgccccggccggaggatgcactggtcgttccagcggggttgagtcgcctaacggagggcaatgtcacctccacgggtcgatgtggatctcctcgggtcgttttcaatccgcagattcaagagactcaggcaagtagttatcacactgaaagggaaagccaaaatgcacaaaaaataaaaactgaaatttttttgcgttgctattagttaaacaaacagtaagacactaatatgtgaattttaggtaaacagtgatgatatattaatagttatgaaagtgaataattgctatgaaaattagtaaattagttaatatatttagctgaagaaacataagtcaaacgaacacccatttaagccattaaaatatggagttgataatccagagtttattattattaaacttaatttagtctctacaagttgtgaacctattaaatccccccttaatatttcagtttaatttaattcttgcagtcgggcgacttaccatggacccgaaaccaggagctgaccttcccaggtgtctactactatggctacgtggtttccatctcgctatccggctatctggcagatcggtgcagcagcaagcggctgttcatcgtgtccctgatcttcgaggctgtggcctacatactgctcccagcaatggcgcactctagtttcgaggccggagtggttgatctggtcatctgtggtttactggcggtaaggaatagcatcattcagatactaatagatatatatagatcctgctacttgacagggctgtggaaatccggcaatgtataaactgttcgtgacctgggctcatcccacagagagaacagcgctcctgtccttcgcctacagtggtcttctgatgggctccatgttggtttacccggtggccagttatctgagcaacttcggctgggaactgtccttctatgtagtcggtggagttggcctctcattcggcattgcctgctgctttctcgtttacgacaccgtggagcaacatccaaggatatcgaatgaggaggtggattacctgaggcagggcaagagtcaattgggacagcagcggcagccagtgagtagttccttgtacttttaactttaaaattataaattaattagcttctttttaggtggtaaccattccctggaagagcctgctcgccgcgccgcccgtctacgccttcatcctgacccacatgttccacacctacaccttcctggtgattgtgcaactgatgccgcgatttatgcgcgaggccatggagttcgatctccgcgaggtgggcttcctctcggcggcgccgtatctgggcgggatctgctcgaaggtgatgtgcatcctgggtggcagctatgtggaacgacgcgtgggtcctgaccagaattgtgtgcgaagaatgctgtacgggatctgtaaggcataccgataatcggagtgccacagacatctataaagaacaccttcccttagtggattcctatatagatttccgtagcatctccagaaacatcaccaatctctcttttatatcccattttataataccaggcagcatcctgaccacttctttgattggggtcatcatcctggctaattgtgatgacaaaatactagacttgtgatgtttgccttcatgatggccactacggatatgggtttcagtggctactggcccacgctgctctactttgcgccctccttcgcgggattgctatcgggattggccaatggaatggcccatctttccggattcttagctccccatcttgtggccgctctggtccacactgtaagtttaaatacaagtagtttatgattaaactgatttatttatgtacctcgcagggcagcaaggatgagtggaatgtggtgttgatgacgctgattgtctttaatacgatggccatgttggtatttgcattttgcagcagtacgaacctacaaccttgggatcctcgtagcagaatggagaaaactgcatcaccaagtgctcaggaatcaaatagttagcacttatttgtttaaatgttttaacttttttgtactttcgaagcattttatttgtttactataaatgtagagttaattgtgttaaaataaaaacaaaataaatgtaaatatacaatatacatatcaatttagtttaaaatgataattgaactttcttcaacgcaatcttcaaataaaatttttaaaaaccgcgcctagcacatagtatctttcaatcttatcgatagttttaccgttgtataaagcaagctgacaaatgtttcacaacgaccagttttctacatttcaagtacaaaattacacaaatattcaataattcaaaaatatgtgtgaaagcagacatctattggcagtcaatgtactaaatgctcatattctttacacgccaatcgatagctgtttgatttgacgcatagatttggtttgagtcccggctgagaactgtaagacgaagaaatagctcatttacctactttaatggtgctaaatcgcatatatcacaatgctttaggaaaagtattaatatttctagaaagcgtatgctataactctttgtgctatactatatataggtggaaagacatcgatagtcgcaggggagtatcgatgcatcgatagtgccatcgatgtttctccaccttgctttattaatcatttcaattttttttcaattcggttgcttgacgttcactgacgtgattccgcacacagcacatagtcgaatacgtttcgcaatagaaatatcaaaattctccgtgtggactcaatctggattggatgcaacactaaattaccagtgttttcctcgattttctagcgacgcaaaattctcagtacaacccaaaaaaaaaacggagagtctcttcaacaacaaaatcaagcatcatcgataaaaacaacaagtctcccggaggaagtggctccaaaatatccagtgcaacagcggacgaacttctcggcaggattgagagtgagtagatcggattaaacaaattaaata

SEQ ID NO: 41408 - DNA, 1743 bp, DROSOPHILA
cgacgataagctagtcggcaaatcgtgacaaatggcaaataatttggcgttgtaagatctcttaccgatcgccaggcgtttgcagttgcattgccgccggaatgccaatcagtcgctccatagctgaggttacgctttgtttgcgccacatttcctattagtgtagtgtttcgtgtatatgtgctggaggctgtgcctcctccaccgctacgccatgagcagcatgtcatggaccctgccacgcctctcgcagtccagtgcatccaccgcccacggactagtgggttccgttcgcctgacctacgccatatgtgcctttttggcaacttgcctacacgccgccatgaggaacatgctcggcatgatcatcctcaagatggtcatgccccggccggaggatgcactggtcgttccagcggggttgagtcgcctaacggagggcaatgtcacctccacgggtcgatgtggatctcctcgggtcgttttcaatccgcagattcaagagactcagtcgggcgacttaccatggacccgaaaccaggagctgaccttcccaggtgtctactactatggctacgtggtttccatctcgctatccggctatctggcagatcggtgcagcagcaagcggctgttcatcgtgtccctgatcttcgaggctgtggcctacatactgctcccagcaatggcgcactctagtttcgaggccggagtggttgatctggtcatctgtggtttactggcgggctgtggaaatccggcaatgtataaactgttcgtgacctgggctcatcccacagagagaacagcgctcctgtccttcgcctacagtggtcttctgatgggctccatgttggtttacccggtggccagttatctgagcaacttcggctgggaactgtccttctatgtagtcggtggagttggcctctcattcggcattgcctgctgctttctcgtttacgacaccgtggagcaacatccaaggatatcgaatgaggaggtggattacctgaggcagggcaagagtcaattgggacagcagcggcagccagtggtaaccattccctggaagagcctgctcgccgcgccgcccgtctacgccttcatcctgacccacatgttccacacctacaccttcctggtgattgtgcaactgatgccgcgatttatgcgcgaggccatggagttcgatctccgcgaggtgggcttcctctcggcggcgccgtatctgggcgggatctgctcgaaggtgatgtgcatcctgggtggcagctatgtggaacgacgcgtgggtcctgaccagaattgtgtgcgaagaatgctgtacgggatctgcagcatcctgaccacttctttgattggggtcatcatcctggctaattgtgatgacaaaatactagacttgtgatgtttgccttcatgatggccactacggatatgggtttcagtggctactggcccacgctgctctactttgcgccctccttcgcgggattgctatcgggattggccaatggaatggcccatctttccggattcttagctccccatcttgtggccgctctggtccacactggcagcaaggatgagtggaatgtggtgttgatgacgctgattgtctttaatacgatggccatgttggtatttgcattttgcagcagtacgaacctacaaccttgggatcctcgtagcagaatggagaaaactgcatcaccaagtgctcaggaatcaaatagttag

SEQ ID NO: 41409 - protein, 410 aa, DROSOPHILA
MCWRLCLLHRYAMSSMSWTLPRLSQSSASTAHGLVGSVRLTYAICAFLATCLHAAMRNMLGMIILKMVMPRPEDALVVPAGLSRLTEGNVTSTGRCGSPRVVFNPQIQETQSGDLPWTRNQELTFPGVYYYGYVVSISLSGYLADRCSSKRLFIVSLIFEAVAYILLPAMAHSSFEAGVVDLVICGLLAGCGNPAMYKLFVTWAHPTERTALLSFAYSGLLMGSMLVYPVASYLSNFGWELSFYVVGGVGLSFGIACCFLVYDTVEQHPRISNEEVDYLRQGKSQLGQQRQPVVTIPWKSLLAAPPVYAFILTHMFHTYTFLVIVQLMPRFMREAMEFDLREVGFLSAAPYLGGICSKVMCILGGSYVERRVGPDQNCVRRMLYGICSILTTSLIGVIILANCDDKILDL

SEQ ID NO: 41410 - DNA, 3485 bp, DROSOPHILA
atgaagcttcaaaagaaaaaaattacctctaaaatattttaactataataatcacctaatatacataaatataaattgtattgcatttataatgaacaaattaagataaattgtagtagcaatatgaattctaataatttacataacattttctgagttttagcgaatattagaaaatcttataaaatcaaataacgtttttttttacaaattattaattttaatatattttggtacaataacttaactaagtagttaacattttcaacttaaagccatcaattttccagctttacagtcgcaaggcaataaaaacataaactaccgaaaagatatcgttcagcacatatctttacgatgctccataaactcgcatgggttttataagcacgatatcattgtgcataaagcgatttaagtttcttaaaatcgcaaatgccacatgaccttgaattcggtgcaacaagaacaacaagtgggtcgttgaccgactcgcagcattcgaaaccgaaaagtggataaacatctaatttacccattttcaattggatttgactggacactcgatatgtagaaatattatgcaaattctatattctctatttttagactctttgttcgcgatttcttcgtttgcaaagcgttttttgcacattttctgcctttttattcgctcacctttttgaagcgggcgctgctgtaggtgcgagcgagatggttgcgtattgcctggacgcagagcagcaaacgcatgaagtgcctgcttcagaaattgcacaaaaatttgccaaaagtgccgacgttttatttttattttattttgctgccaatttgacttgcaattttttgcttgccggctaatagagatgtgacttgcacgacgataagtcgatgtcagctatcgataagtgcagaaccacttttttctttcagcctggccaccctgctggtgtcgtggaagtgtcatccctaatgagaagtaccaccactaactggaaagcaaaacaagcgtctggaaaacggcgcttagtttttaaagattttaattgattgcagtaaattgagtttaaaatggcaattattatgactgaatcgagttacgaaaggcgcgtaaaggctttgtacgaaaaacaaattcacatggaagccctcgaggcgaaattcatcaaaaaggtctttaaattcaacagcaatttgtgtgagttggaatttatctccatatatctccatttcaattgatatatttcactaaatattttagtggatgtcaaggaagcagcttcgcgccatcagcggaaagtgggaaagttgcaaaaagtgctcatggagcggcgggaggagttggacaagcgagtttccttcatagaggaacttgatcgagaactggaggccaccaaacttcacaatttggccatgaaagattggtttaaacagcagaaaatgctggccaaacagcgcaaaaacgaaatcatggaaaggtcagggattaggtcaaagataatcatattaagattttcttagcacgaatggctagctaatattttccgggctccaatgggttcgatcttgtccttattatacataaaaatgactattcatattgatttttagtccatccaaaactactattggtacaaatatatgtatatgacaataatgtattgtcaacatttatggtctttacatgcgtacaagttgcagtgagagactaatcaaatactttatttactttaactaaatctattaggagcatcatcaaagtctataaactgcaaataatagatatagttgaggtcgtgttccaaataacttatttagcttacatacataatttatttgcatagcctcacatgcgctcttatttttcaaacaaatccgattttaatgcggtcagttttaaacttagtatactataatgagagcaatgtgtgtttatttgttttattttatagcattcacacgctgtcgaagacaacaagaacctatataaatcaagaagcgctgccggcacgtgtgaagggtgtcactgtactccgtggcgataaacgcgaccagttgataccctttgatctgaaggcgaccgatgtggaaggactggactcactgtgtcagcatctcgagagtctaaatgtggacgtggcgcagtggcagcagcttatctcgctggccatggacatggctatggagtcacgtgctcccactactccgcccaaggaagcagacaattgcaagtctataatcgagattgatctcacatcgccgatgagccacacctgacttccgattaactgatttacttggattagggggaagacccttttccaatggagcactttattttagcattataaatagttggcttccaataaaagctcaattgggaattcatcttaacgaattaagcatcttattatagcagttttttagccatttaagtactgcttgtaattgtttaagtgcagtgtaaattatacatatatctcccaaaatttttttttttttcttttttctgatatatcatcttcactggaagcttaaaaatttttagagatatcgccaaagaagagatatcgcgaaaggctccagtttaagtagttccaattcaaacttattcaaattaaaaaccagttattgaatttattttaaatcaaaagtcttcttatcatatttaaccaaatttacaactttagtgataattatatcataaatttggtttaatgagttctctattactataaggttttatatatatttcaaatgtttgggtaatttccttataactatatcagaacaagacctgttttattaaacacctttctttaagatttgtatgattatctgagagcttttgacatggcggccggtgttaatcgagaaatctcgaaagtcacaagcgactcagagtgccaccgactaaccgatctatgaataaacagcgatccatatagattggcgctgctcaattgctattgtccggcgaaagttagagcgacctatcgtggctacaaaaacgcagccgcaccgcagccgcggattcagttgttgtccggaatccacgatgatcacggaaactctcctgacgatctgcgcggcggtgttcctctgcctttcgtatcgatatgcagtgggtcgaccctccggctttccacccggttcgttttatctggctttgctgctctctgggtggactcaagcttatcggattattcacaggtcctccaaagattccgcttttcggcagctacctcttcatgttgatcatcaactttaagtatctgcacaaggcggctctgaccctcagtcggtggtacaagtcggatatcattggactgcatgtgggtccttttccggtggccgttgtccacagtgcggatggagtgcgcgagatcctcaataatcaggtgttcgatggacggccgcagcttttcgtggccgccatgcgcgatcccggccaagatgtgcgaggtgagtccaatcgtatcgtg

SEQ ID NO: 41411 - DNA, 948 bp, DROSOPHILA
caaaacaagcgtctggaaaacggcgcttagtttttaaagattttaattgattgcagtaaattgagtttaaaatggcaattattatgactgaatcgagttacgaaaggcgcgtaaaggctttgtacgaaaaacaaattcacatggaagccctcgaggcgaaattcatcaaaaaggtctttaaattcaacagcaatttgttggatgtcaaggaagcagcttcgcgccatcagcggaaagtgggaaagttgcaaaaagtgctcatggagcggcgggaggagttggacaagcgagtttccttcatagaggaacttgatcgagaactggaggccaccaaacttcacaatttggccatgaaagattggtttaaacagcagaaaatgctggccaaacagcgcaaaaacgaaatcatggaaagcattcacacgctgtcgaagacaacaagaacctatataaatcaagaagcgctgccggcacgtgtgaagggtgtcactgtactccgtggcgataaacgcgaccagttgataccctttgatctgaaggcgaccgatgtggaaggactggactcactgtgtcagcatctcgagagtctaaatgtggacgtggcgcagtggcagcagcttatctcgctggccatggacatggctatggagtcacgtgctcccactactccgcccaaggaagcagacaattgcaagtctataatcgagattgatctcacatcgccgatgagccacacctgacttccgattaactgatttacttggattagggggaagacccttttccaatggagcactttattttagcattataaatagttggcttccaataaaagctcaattgggaattcatcttaacgaattaagcatcttattatagcagttttttagccatttaagtactgcttgtaattgtttaagtgcagtgtaaattatacatatatctccc

SEQ ID NO: 41412 - protein, 222 aa, DROSOPHILA
MAIIMTESSYERRVKALYEKQIHMEALEAKFIKKVFKFNSNLLDVKEAASRHQRKVGKLQKVLMERREELDKRVSFIEELDRELEATKLHNLAMKDWFKQQKMLAKQRKNEIMESIHTLSKTTRTYINQEALPARVKGVTVLRGDKRDQLIPFDLKATDVEGLDSLCQHLESLNVDVAQWQQLISLAMDMAMESRAPTTPPKEADNCKSIIEIDLTSPMSHT

SEQ ID NO: 41413 - DNA, 13595 bp, DROSOPHILA
actagggtttaacaaatcacctgaaacatacatatatacatatatacaatatatctccctatatatagcctcacctgacgcgttgtttacagcacttacgaatgaaaataaacgcatttcaagctaattaaacaataaaagcgcaaaggggcaccatcgccctccccccaaaaagcaaatgaaataacaaagcaaataaaaatggaggcgggcgtcaggatgttcgggtaattcagcaaataaaagtgcacggcattggcattagtcggtgggcgttgcctgcggggtgggcgtggcatttcgccccaccacccactactcgccacccacctgccaccacccacctgccgcctctctgacagctgacaaactcgcgagcgtgaaacgccggagcgcacaaaagtaggcaacaaagacggcagcgatgcgatgtgatgcgattgcaacgatggtgacgacgtggcacaatgatgttgcaatttaatttgtattgtcggcgggaatggaatggtagggtatggtgatagtgatggagatggagatggaaacgcgaatgggaatggaatggttgccaccgaaacaattgcactgacggcaaagaaaatgccagctctggtgatgatcacgctgacgatgatgagaatggcaatggccatgccgcgtctgatgaatccacttagatgtcgggcgcctggcaacgacagcagcagcagcagcagaaacaccagcttgcaacaccaaagcagcagccagagtgtcgcttaattgaacagacaaaggacaaagtgacaggcaaatacaaagctggcaccaactacacgtggatatggaactgtgttttttagcatgttaactacacaaactgcaaattaaattggcttaaaaaacaccaccaatttgggatggatttgattatacatggaaattatttaactcatttgataagctaatgaagctaaagttagattacagacaccagattccaaaaacagagtcatttaaatttcatacttcttgtatttctaaataatattgattttttaatgcctgtcggctacacaaattgacttctgatgccggattgcaattgggcaaagaaaatgatggaaatgttaatccagtcaggcacgtggcacagtaaaaggcaggctgagttaatcgcggcaccagcgcttcgagggcggctcctcgtctgtggaggcgatggattgaagcagcttggagtcagtgtgcccgccgaagagggtcaacaacagggaaacgccgtatccagtggcacgctccccctgaaacagaaccgaaatcatattaaatacgcagggaaataattataaaacggatatagcagtcgaatcgaatcacttacacaatgaacgggcgtggccatatcgacgtgcatccagatgccgggataatcgaagccaagatgggcggcaatgaaaaggcctgcgcaggaggattgggcgttctgacgatcctgcaaaggcggaagcgaaatctcagttagacatggtgacatatacgctcggatgtacatatgtgtgtgtatattcctttatggaatgcattctcttggtgtgcatgaggatgtgatgtgctgcatgcaacaagcaaaacttggcggcgctttattaaaaaagcgtcctgtggtgcagcgcaacaagaaaatatatttatagagatagatgacaaacgagggtggcttgaaaacaaagttatgttgcttaaatttaaaaatatttgtacttattaaaaaggcaacatcattatacacctcttcctcgatatttcgaacagataggttaagttatgttaagcagaaaggcatattatttagtatttattttgtaactctgtattacctttgaaacgcccttcgctagctgtaagcctgggtgtgctaatgcctaaattatatgccatgcactggcagctgcgtagcggaagcagtcgctctactaacttgagcggaaattgcagcgcttaaatgccaaacataaagtacactttgaacatgcacacacactcacacacagacagttgggaccgaccggccaaataaaggacgaaccaacgcacacatgcgaacactctgctgacagttggccaaaaaaaaggagttaactggcagacttcagcagcaggagccacggaattgagcggacagcaggacgacaggacgagcggacaactcggggatgcagtgctgcgaaaattacatgacaacgcgttcagttcctcctcaagatgaaaatcacacacacacacacacacacacattcgccgggggacgtgcaaacatcgtacgtcgagaagcggaagtcaaaagtccattgaagcaacagagccatgaaccaagtgcccaaaaacccagagccagacttgaagaatgaagtctgaatttgaagactgcctctcacacataaaaaaatattttcacaattgaaaactggaacttggaagcaataaaatctcaattaaaaataggtattttatgctaggtataagagattcttatctgaaatcaacaaatttgcatttacactctttacagaaatatcgttcctgaatttctctcagtgcagcaattgttccagtttctgttgttcctgccgctgctgacgaaactgcatttcatctcctaacagtggcggtactgcttttggcggttttgcagctaataaccagcttttgttatgaaacttgcggctgaagctgctatggccgatggtgcacatagccggcatgtcttggccgcttcagttcggtttgatttgcctgaagtgtgtgctggcaaaacttttcaaacgcaatgcttcccaatgaaccaatttagtgaatggcaaacgaaagtggtaagccgcagagttgctgttgcactttaaagccaagcatgagattctaattgtcttgaaaagtttctagaacattaaataatcagatttaagcaatctgcttattaatctctcattttcttaaagcttatttaaaagcatttcatgcacccccagcgacatgttcctataacattcgggcaaatcaagatgggattacgcgcaaataggaaaggtcaacaaggttgcgatgttactgcggcgctaattaaatgtttaacctttgccgagcctgatcagagcactcacgcacatgtcatggcattcagcagcccgaatcgaatccagtcgaatcgagtcggcctttcatcaataatggcaaacatttgtcaacataatgtcattaacattgattgcattagacccgtcctgattgtctgtatgtgcgtgtgtgagcccgatgatgtgagtttgtatctgactaggccttttgtaaataacgaagcaacatccccacatattcacgcacccgacccaaaatctccaccagagtttgacaatgggtcgccgactaattgcggtttagaacgtgaccattcgaggaccgccctgtggcgtttaccccggccaaaatatacgacggtccagaccaacaccatacgtatacgcacattcgcatcctaaatatccgcatttgcgattaacttgaattgaaattagccagcgacattgtctcacactcgaagcagtgtttagtgatatgcgatctgcgataactgccaatatgtatgaatgccgcgggtattgcgagattacatcggtgaccgattcacgccccgcggcatcaagcagttgggagtatcaattacgcattcattcaataatcgggacgagcagtgaaaaggatttggaatcgatgccatcgactggtttcgctgacggcggctacagtttttattcaatttgctcgatgtcgcagctagcgctttaaaaaactttccagccgcaggaaagagagcacaaaaaatgtatatttatatacatatatactttcatgccaaaagagaattctataggggaaaaggaaaatattagaaaactctggtgatgcccagctatgattttgaacagctttagacaaatttgtaaaatatttaatcctagaatgtttgaactcaaaacgaatggtaggtacatctatatttttaaaagccccctactttttacgatatgtgccgattttagtgtaagcttttcgcatctctggcgttggagaaagttaaacggaaaccgaggaataacaagcggaaagatttgtgttgacaaagtcggcgccccttcaagtaggcaacggaaatggggatcatttcgcaaattacgtgacttgctacccccacccaccatttttttgaaatagccggcgaaaaatctccatggaaaactccgcatttggaccactgagcttgggctttatttataaactgctgcggctggctttaatcaaaaaacttaaccccggctaagcataaccgcaacaacgacgaaacactcggcgcctggaggtcgtgccgtaaaaaacttttgccgcataaaaagttcaatttaattcattaaaacacgtaaaaagtcgccgtacaattgaatttaaaatgtcgacgcccaataaaaatgaactgaaagggggaggagggtcgaaaaacaaaaacaattacgcatacgccgcgtgtgcggccaagagactgcaacacgttgctgccacggaatgggtttatctaaaattcatgccccgccgcgccaaggaaaacgggaagcagctttttacgatttaacataaaaatcaattaccaacaatgggaaaatttcacagtcataaaacgtcgagtaactttcgacttagattcctgtgtgcgacgacgtcgggaaattgagaaacaattggaaatgtttaagcaaattttattgtctcgtcgccgtgttgcttatgttttacttatgacaccgcaccgtggagtccatccaccacgaatatcctgccagctaagaaagccgcagacaacagaagcctgcgagtctgatttactccaaggaagccagccagttgaatggatgaatagatggatgggtggatggatggtttctaggtcggaccgtcgtgtctcagggtcataaagttgtcgaaatttgggataatattatttttatttctctcactttctgtttgcctctgttcagtgaattggaagagagaatttggttttaaaaagcaaacggcctaaagcttaaaggcaactgaaaagttatttgctgactattgaaatttaatgagcagttattactcagtcgatactacgcaaatttgggttcataaaaaattaataaagttgccctagagctttctattatattttattcattccttacgttacatatgatttttttaaataaattcaaattgaatggtctaaattgcgtatagaatgagctcaaatactttatactatattattgcagttattgcaaaaaaaaatacaataatgtttattgccataattaaaacgctgaagctggcagcacattgacagagccaaaccacagacagactattgggaaaatggcaatttaaaagtggtcaccgaacaaaccgaccatccaccgccatcgattcctgcagtttgacccaaaaaagcgagaacctcctaattaccggcttaaatggtttcgcttaattcgcgaatatgctgcatgttttaaacgagcatacagatcccttctgacagccaatagccgcagatatcaccacgcaccatggggatcacacaactcgaaaagggcgtaaaacaaatgggaatcctttatttaaggacagcggcaaacaaagggatgggatgggggatcatcacctgcgcagatgaccatctgaccaccagatgctcgtgctcgtgctggtgcttgccaaaatgagctgaatagagccgcagactgaaaaccaaagccagcggccaacaaagcgccctagcgaccgctaacaacactcataatccccccatttagtggcaaactaggggaaaagacacccaaaagaccggaaaaaaatcaaaaaaaaagagaatacggctggcataggtgggtgtggaacgcaaaaagctagctcatgtaatttaaacgctgcgcgtgggaatttgcctcaaaagccagaaaaaatgcgacgacgctgatgggtggtaatggtagtgatggcttggctggcatttcacctttttcgcatttaacgttgaatgcatttggaatttaaaacactttatcacagacaccattgacaaagtgcgcggcgctgtcacatcaactgcagcacggggggcatcaaagggttaagggtgtgtatgtgtgcgtgtggcatggccatcctgcaatggtgtgatattttgacttgattcccatttttttcaaactgcgagatagagcagcctgacgaaaaatcaaacagccaacttgcaaaaacgacacagaggaaatactctttgccaaacttaacaattatgcgggtaaaattgagaattttacgtgcaactaacaaagttcaaaaatttcaacaaggttgcaagcctttaaattaaaccacagctgataattagatgaaatacaactaatatgaaatgatattcattaaagttatagcagctcttataaattttaaaatctatatgtatattcacggcgctttgatttacttttctcacagtgtacttatcgaaaggtggcagcgtgggcgattggcaggtagccaaaattgccacgccacttgacctgctccgcatctacgcaccaacctggcaaccaaccagacagacagtcagccagtcagccagccagtcagttcctgtccgctcctggcacctcaccacacgacaatcacaaactccaagccgccctcctatccacctagaacccccaattcatccgccgcccaatccgcccacggcgtgacaatgatgaatgaccattgatccgaggcgcttgcgacgtacaataaggtaactcgatttggttggttgttgtggcagggactggaaccgaaccaaactgaaccaaaccgaatggagcaggagagtcccggggcgacgacgcacctcgctccggtgcggccagtgcccagagatgggccagagatgggtttatggctcacctagtgccatcgcagtccaccctcgccactctgcagcattcctgtccaggattctctggctctggctctggctctgactggcctttctaatggctgcgaaagtggctggtggcgtagattgaacgccaaagtttttgatacatgcgaatgtcggagggtgcggtgtgtgtgtgtgtgtgtgtgtgtgtgtgtgtgtgtgtacggcataaatcagagtaatactaatcaatctttaaaccaaacatgacgttcatcatttttccacaacggtgcggtcgagtgtaagacaaaagaacaacattgagtgcaagcgataaagttaattaaaaatgtgtgtaaaatatctccggagagtgcaaaaggcactggatttcgatgtgtgcctgtggatgtggaaaagcgcaagatgaaaatgaattgaaaacaaatgaataaagttacaccaaaacttgattgaaactttctcaaagtcattcgctttctatcgaataatgcggaccggccgaaaaagttcaccacagcacggttgtcttcgataatgcataaattaagttacttttgggcattgattacggtgcagaccgctgttaatctaagcttctgtctgccacaaaagaaggtaaggtgtacctggagataccacaaacgctgatagtttggatagtatagacaaaaagctacaacctactggtaaaaatttctgaaaataaaagtttaacataaaatttaaaccataaaaaacatacaagttgcactcgtaaattttctacataatgaataaatccgcatttaattttagatggaaaagtgctaacatccaaaacgttttcccctatcagttagcacttggaaagtttttaaatggtgcaagaaaagtacttaccgccaccgagtttttcatatcagcaatggccgaagcgaattccgagaaatgcaattcggggcaataaattatgggtgccaataaatcgccagatttgcgtccagcctgcaacgactttgcctcccatgtctccgagtttgtcaatatggcaccatgatatttgcctgttgcaacgccctggaacgagaataaggtggcatatatatgcatggtaaaaaatagtaaatgaaatattcaaggacctgctgttcgggggttatatgcttaagaatgggtttcgcacccaccggggaacgtttgatagaaaacaagcaacaatcaacaaaatgccagcaataaaactgtacaccaactaacaatgttagggcaaagacaaagggggttagcgggtataaagggataagggggcaagggctgccgagcagagggtgcacgaaaattgcgagcttccgacgcggctggcaataaaaaggtgcaaggttatttagcacgagcaacacccaaacaagaggcaagtactctgtggcgcgtgttgcacggctgctggacaaatgaaggcagcgccaggagcggcaacaaagcactggcagcactgccaggagcaacagcagcagcaatacactgcgaaaaaaataaaagaactgcctacatttgaagcatttgaatatagctctacctttatgttccctatatctctcatatatcgatataacttttcaaaactgcagtttttatatatctagcatttcattccacttatatgaaagcctaagagtttctcccagtgcatccagtagccgtcacagagcagaaaacaactgcaaaaggtgtaacaaggcagcaggaacataaaatgtaaaagcgaaaaagtgttgcctgcctgctttttgttcttgcaacaacagcggcagtggcagtggcagttgccccaatgctggcaattaatattattgcatcccgtctaggtgtgtgtctgggtgtaatgaaattaagcacaacaagcgaaccaaaaacgaaccaaattccgaacaaaaatggcaaaacgtggcaatgtttagagacgagcggcggagcggctcgatggcttgtgccacttttaggctgggtaaccaaaggcatttcgctgcgaacaatgcagcttttgggacgggcggatggttgaatgaaaataataataaaaaaaagagcccagatgccacgccccctctgaccagtttcgatttatttcccatcgaaccacaaataacgtaaattggcatcatattttaagcaaattgcagtcaagatttatggtaattgtgcgccatcgcagcagctactcacttgcttccccccattcgccgccccctttccgctgcaatggttagcgaaaccccagcccaccgcccactgccacgccccacaccaccacatcgatgcaacccgaaagcgaccacaaacggcgaatccttcgctgttgttggtctgccaatgctggcgctgctattcctccaagttttccagcgaaaaccaaatttgcaatttatttttccaattaacctcgtgacttttataaagcgtggcataaattctcgcataacaaggcagcggagccagtacatccaaggccaccacccagccatttccccagttacctgccgcaaagatccctcgaaaccgaaattaccttggacaccggcaacatcatttgctgcctgcattagtggcaaaaatgtgaattcaatcccagtgaattgttgcctttaatgcgattaaaagtgacagaaaggccaacttgccaacttggcaaataattgtagcctagcgggtacaaatcagtccatgaagctgatagtttcagtaaatatcactctctacattattcaatgaaatctattacattgtgctgtaaatgtggtaattgaatgagttcattgttgtagtctgactttcgatgaatagggaaaccaaatataattcaaacccaattctatatatgcttgacctaaatcctaagtgcgatctaattgtaaacaataatcaaacattcccacgctagaacaaatttaattgatataataaacaaaaatcacgtgttgggcacatttttatcaaaacagggcgctatgctagctttatagaatgccttacctgtgctccagtcaatgtggccatgtcgagaataatgttggccttcagatccttgttggcgtagcaaacgccatcggcgagcaccaagcgaccctcggcatccgtgttattgatctccactgtgcggcccgagtaaagggtgtgaatgtcatcggggctgcaaagtaaacgcattagtatttaactgatccattgaatgctaaactaagggcaaaacccaccgagtggcatttggtccgacagagttctccgccaagcagaagacggcatgcaagttatccctaaatccacactggacagccgcgtaaaaggttccgagaatcgccgccgctccgccgcaatcgcgcttcatgccgggcatgccggtcttggccttgatgctgaggccaccggtgtcgtagacgatgcccttgccgaccagagcgatagtctcctgggcgccctttggctcatgggagagcacaacgagggcaggcggcacagccgcagctttgcccacgccgtaaatgccgccaaatccttgctccagcagctcctcgccacggattacttttggcgtaatgcacagctccctgcccacatcctcaacttcctggatgaagtggtccacgttcatttcgttgcagggcatatctacaatgcgagcagtcattcgaattgcccgtgtggtctcattcaggcaatttagctcgtcgtctgtcaaaggctcgctctcaatgcagccatccttgttgattagcacaaactcaacattgactacgttgcgtcctgaatttgcgtttccatctccacatccaagatttagctttggctgacttgaggccagcagattgcccgttttgcgggaatagagtggaaaagcgcgaaccaccgcacaggcgctggcgaatagattctctcgttcgcagacgagcaccacgctctcctcggaaacgttcagcacatggttctttaccagacgagtgatggcatgagcccgggatgccgtattgtgtcgggatgccttcaatggcagggcagccacggtggccacatcgagatagagggataccttatcggtgggcgcgggatgcagacaagcgacggcattcaggaaggtctcctcggtgacgcgcggactgagtttgctctccagatgactgaacttcagtaggtttagatggcgcagctggccgatgatcaggaccggatgtgtctgcggatcactgcagcctagcgactcgttaaactttacgtccgtggccatctgtaagagaatgtgtgtgcgaatgagtaaagaatggaatggctagccaaatcccagtgataagccgccggtattatcttatcggtgctaatctggtgtttagcgctccaagtgccccacttgcttatcagtcgacgactttgcaccacaggggcggtcaatggatgcagccatccataaatcacgagagccaaaaccggcgagataagcagtggcatttgggttatgggtagggccatctggacaaacacaggggcgttactcatcggttgcaagcggatgcaacgctgtaggggaagtttaagaatagctgacccatattagaatggctcaattaaagtagctccattgtgaaaaatactgcagtataattttataactaaaattctaataaaaaacaatcaatcaataattatgtttacaactaaaaagcattgggttcataaaatgaagcttcaaaagaaaaaaattacctctaaaatattttaactataataatcacctaatatacataaatataaattgtattgcatttataatgaacaaattaagataaattgtagtagcaatatgaattctaataatttacataacattttctgagttttagcgaatattagaaaatcttataaaatcaaataacgtttttttttacaaattattaattttaatatattttggtacaataacttaactaagtagttaacattttcaacttaaagccatcaattttccagctttacagtcgcaaggcaataaaaacataaactaccgaaaagatatcgttcagcacatatctttacgatgctccataaactcgcatgggttttataagcacgatatcattgtgcataaagcgatttaagtttcttaaaatcgcaaatgccacatgaccttgaattcggtgcaacaagaacaacaagtgggtcgttgaccgactcgcagcattcgaaaccgaaaagtggataaacatctaatttacccattttcaattggatttgactggacactcgatatgtagaaatattatgcaaattctatattctctatttttagactctttgttcgcgatttcttcgtttgcaaagcgttttttgcacattttctgcctttttattcgctcacctttttgaagcgggcgctgctgtaggtgcgagcgagatggttgcgtattgcctggacgcagagcagcaaacgcatgaagtgcctgcttcagaaattgcacaaaaatttgccaaaagtgccgacgttttatttttattttattttgctgccaatttgacttgcaattttttgcttgccggctaatagagatgtgacttgcacgacgataagtcgatgtcagctatcgataagtgcagaaccacttttttctttcagcctggccaccctgctggtgtcgtggaagtgtcatccctaatgagaagtaccaccactaactggaaagcaaaacaagcgtctggaaaacggcgcttagtttttaaagattttaattgattgcagtaaattgagtttaaaatggcaattattatgactgaatcgagttacgaaaggcgcgtaaaggctttgtacgaaaaacaaattcacatggaagccctcgaggcgaaattcatcaaaaaggtctttaaattcaacagcaatttgtgtgagttggaatttatctccatatatctccatttcaattgatatatttcactaaatattttagtggatgtcaaggaagcagcttcgcgccatcagcggaaagtgggaaagttgcaaaaagtgctcatggagcggcgggaggagttggacaagcgagtttccttcatagaggaacttgatcgagaactggaggccaccaaacttcacaatttggccatgaaagattggtttaaacagcagaaaatgctggccaaacagcgcaaaaacgaaatcatggaaaggtcagggattaggtcaaagataatcatattaagattttcttagcacgaatggctagctaatattttccgggctccaatgggttcgatcttgtccttattatacataaaaatgactattcatattgatttttagtccatccaaaactactattggtacaaatatatgtatatgacaataatgtattgtcaacatttatggtctttacatgcgtacaagttgcagtgagagactaatcaaatactttatttactttaactaaatctattaggagcatcatcaaagtctataaactgcaaataatagatatagttgaggtcgtgttccaaataacttatttagcttacatacataatttatttgcatagcctcacatgcgctcttatttttcaaaca

SEQ ID NO: 41414 - DNA, 1950 bp, DROSOPHILA
tcacatctctattagccggcaagcaaaaaattgcaagtcaaattggcagcaaaataaaataaaaataaaacgtcggcacttttggcaaatttttgtgcaatttctgaagcaggcacttcatgcgtttgctgctctgcgtccaggcaatacgcaaccatctcgctcgcacctacagcagcgcccgcttcaaaaagatggccacggacgtaaagtttaacgagtcgctaggctgcagtgatccgcagacacatccggtcctgatcatcggccagctgcgccatctaaacctactgaagttcagtcatctggagagcaaactcagtccgcgcgtcaccgaggagaccttcctgaatgccgtcgcttgtctgcatcccgcgcccaccgataaggtatccctctatctcgatgtggccaccgtggctgccctgccattgaaggcatcccgacacaatacggcatcccgggctcatgccatcactcgtctggtaaagaaccatgtgctgaacgtttccgaggagagcgtggtgctcgtctgcgaacgagagaatctattcgccagcgcctgtgcggtggttcgcgcttttccactctattcccgcaaaacgggcaatctgctggcctcaagtcagccaaagctaaatcttggatgtggagatggaaacgcaaattcaggacgcaacgtagtcaatgttgagtttgtgctaatcaacaaggatggctgcattgagagcgagcctttgacagacgacgagctaaattgcctgaatgagaccacacgggcaattcgaatgactgctcgcattgtagatatgccctgcaacgaaatgaacgtggaccacttcatccaggaagttgaggatgtgggcagggagctgtgcattacgccaaaagtaatccgtggcgaggagctgctggagcaaggatttggcggcatttacggcgtgggcaaagctgcggctgtgccgcctgccctcgttgtgctctcccatgagccaaagggcgcccaggagactatcgctctggtcggcaagggcatcgtctacgacaccggtggcctcagcatcaaggccaagaccggcatgcccggcatgaagcgcgattgcggcggagcggcggcgattctcggaaccttttacgcggctgtccagtgtggatttagggataacttgcatgccgtcttctgcttggcggagaactctgtcggaccaaatgccactcgccccgatgacattcacaccctttactcgggccgcacagtggagatcaataacacggatgccgagggtcgcttggtgctcgccgatggcgtttgctacgccaacaaggatctgaaggccaacattattctcgacatggccacattgactggagcacagggcgttgcaacaggcaaatatcatggtgccatattgacaaactcggagacatgggaggcaaagtcgttgcaggctggacgcaaatctggcgatttattggcacccataatttattgccccgaattgcatttctcggaattcgcttcggccattgctgatatgaaaaactcggtggcggatcgtcagaacgcccaatcctcctgcgcaggccttttcattgccgcccatcttggcttcgattatcccggcatctggatgcacgtcgatatggccacgcccgttcattgtggggagcgtgccactggatacggcgtttccctgttgttgaccctcttcggcgggcacactgactccaagctgcttcaatccatcgcctccacagacgaggagccgccctcgaagcgctggtgccgcgattaactcagcctgccttttactgtgccacgtgcctgactggattaacatttccatcattttctttgcccaattgcaatccggcatcagaagtcaatttgtgtagccgacaggcattaaaaaatcaatattatttagaaatacaagaagtatgaaattt

SEQ ID NO: 41415 - protein, 558 aa, DROSOPHILA
MRLLLCVQAIRNHLARTYSSARFKKMATDVKFNESLGCSDPQTHPVLIIGQLRHLNLLKFSHLESKLSPRVTEETFLNAVACLHPAPTDKVSLYLDVATVAALPLKASRHNTASRAHAITRLVKNHVLNVSEESVVLVCERENLFASACAVVRAFPLYSRKTGNLLASSQPKLNLGCGDGNANSGRNVVNVEFVLINKDGCIESEPLTDDELNCLNETTRAIRMTARIVDMPCNEMNVDHFIQEVEDVGRELCITPKVIRGEELLEQGFGGIYGVGKAAAVPPALVVLSHEPKGAQETIALVGKGIVYDTGGLSIKAKTGMPGMKRDCGGAAAILGTFYAAVQCGFRDNLHAVFCLAENSVGPNATRPDDIHTLYSGRTVEINNTDAEGRLVLADGVCYANKDLKANIILDMATLTGAQGVATGKYHGAILTNSETWEAKSLQAGRKSGDLLAPIIYCPELHFSEFASAIADMKNSVADRQNAQSSCAGLFIAAHLGFDYPGIWMHVDMATPVHCGERATGYGVSLLLTLFGGHTDSKLLQSIASTDEEPPSKRWCRD

SEQ ID NO: 41416 - DNA, 4821 bp, DROSOPHILA
ttaaatactttcaacgttcgtaaattcgaggctctataaatctcgaactgtttggaaaataagttaaaaattcatatcagtgcacttgtgtatttttaggagttctaatggcgatcaacaataattaacctagtaatattaataaacaaaaagaactcgatcgcaacgtaaactcttgtgcaattaattagatagttaagtgtcacgcatcggatggaatccaaatttaaactttattagggagaaattaaaagacaattaatacaggtaagctaattatgatgatgagaaaaggtccctaggtaaacaattcgaatatttaaatatgaaatgaagaaaaagctgtgctctaaattaaactattgcacactcctccccaaaaactaaacactttaaaaaagcgaaataagcgaacaaatatattttcttaaaaaagaaaccaaaagatttataaggatatgaaatatataatgaattttatgaatatttgcaattttcaatgttagaaaagcctgttttaaaaaatatatcattttccaatccaatctttaattaattcatcatttgaaatcgaatttggcagtactgttaatatgcaaatatacgttcttcaaggaatatattttggataatattaatttaagggaaatccccaattttgcaaatactcaatactgaaaactgatttgaattactggtaaatatttaaattggtttgtcataaaaccgggacaccattttgagccccctgtacacacacattagaaggggtaaatggagttccattgtgcatatttttggtaagctattcgcagtgcgaagagctccaatcaaatgactcatgcagggagcagcagacagagtccccaagctaacaaggcatatctattgaataccatttccgttggcatttcagagctcgaggagcagctgcagcactaccacctgataattaccacctgcacccccattggagtcccttgactccgcgcccggcatcatgacgagcatctcggccctgctccatcggagccacagccacagcaatggttacacgagcagcgggagtagcaatcacagccatagcagcagtctctcaccgcagttgcccggcatcaatttgggtttgggcatggtcggtggcttgggcatgggtatgagtgtgggagtaggctctggatcgggaaacaccaccccaccaccgatgccgccagctgacctcgccgttccgccagcggcccccactccggtggcacccaaaatgcaccagcacacgcaccaccatggcaactcccaccataatgccccgaccagccactcgaattcgaatactggaagccatcacaacagccacgaccacattaagcgaccaatgaacgctttcatggtctggtcgcgggggcagcgtcgcaaaatggcccaggacaatccaaaaatgcacaattctgaaatatcaaaacgcctgggcgccgagtggaaattactcaccgaaggacagaagcgtccattcatcgacgaggcaaaacgattgcggtaagtattgttcactggggtctggttaaaaagcactgagaaaatatgtatgtactaaatttgtaaacagaaataagagtattttcttacctggaaaagtccttacctttcaattcaaaagttaattttccaagtctattattaatagggtttattagggcgaagttatatttaaaaaaaataaaaagatatggatcccattgatgttaaaaatcacagattatcatattgcagtaatcctatattaatttaaactaggaaaaacatagttcttgtattttttgtagttacctccgctttctattcttggatataagaattactttgtttattcaattttattcagtccacacgatatacattttttttctgtgccggcttatgcaggagcagagtggtgtaggttggatgggaaattctggcttggtttcggttaccattttcccagttggtagctcattctcactagatgccgtctggccacaaaatttgatcgattagctaagacaaaggctacctattgtgaggagctcctgctgaattgcggagctctggagtcggggattgtgtccgctctgcttagtcagaatttcattggcactgccatatcttgggtaaacatttcaattgaagttgtcacacaaaagcgaggcaacacgtcgcatgaaatgctccattcattttgcattttgcttctttttgtgtgcttaacccattcagtgtaccctttcgaaagggtttgagtaatttcagtttgagcttagttttaataaacgtaattatcgggattaactgaaaataccgctagaatggagttctttgtacaagaaatatactcaaaagcgagcattttacaaataagtacaaaagtgatatctcacattattttattttttataaaactagcttttaaataagttgtattggtataaatggaatcaaaatttgcagtgcacttttaaaccacaggaattcccagaaatgccgtatctcacaagttcgttttttctatgccttcctagatagtgcggtcttttatgatgacgaacctctgtgtttgcactgtcataatccttttattgattggattggcctgccaaaatggaaatgttaaattttacttacattttatgacatttataaatgatcagggctcgtcagaaggggcttaaactaatggccattcggggttttcgagcgagcatatcgaatgaaaagaaccaaaaattctgatcaaatatttgccaatgcgcgatgataaggaaaacaatattttttttcgggacccgcgataaggaggccataactgaccaaagaaaggaaaacaaaataaagaaaagcgaaagtaaaacaagaggaggcgacccaaacacaccttttatcaggttttatcgttatgtcaaacaaatgtcaacaattgcgcattgttgcagctgggaaatcggaaagagaatcgaagttggaatcggagtgctggttcttcgctaaatacacaatataaacttgtgcattttgtatctgcctggcgtggggtttatggaagggttccgcttctcttggggtttacgaccagagatggctgactttatgatatcatcaaagcttaaatcgttcgatcttttgatcagtgtttcaacatttatttaatttacagggctctgcacatgaaagaacatcccgactacaagtatcgaccacgtcgcaagcccaagacgctcaacaagtcaccggtgccaggtggtggtggtggcggcggtggaggtggtgccaacggtggtgtcaacgctggtggtgcgggtaactccggtcccagtggcccaggatcagttggctcccccaaggatatgcagccccagttgtcgcccttgggtcagtcgctgccacatctccacggacatccgcaccagtcaccatatcaatcgcatccacaccacccgcatcctcatccacatcatgtccagctggccgccgccaccttgagcgccaagtacggttttggttcgccactggagttatcgctgccccgcctgccgaatgcctttcccggcctcgcccactatccactggatcccacgttggccctggacctacaggcgcgcctccaggcgatgtacgccggctccatctaccacccgtggcgatatctgccgctgataagtccggaaactccaccctccccgcccagcagcagcggtaccggcatctcatcctacggatgcgtcaagtcagagaagtcctcaccaaatgcggtagtggccagcgcggccagtccgccaaacatcatttgaccgactccattgcgcttcggcgccggcacctcctcatccgcggaacacgtggtctaggatgagcaccacagagggaatttggatggtaaactttaccattcctctccaaaagttaaaagtcctaatgttagagcctagtgttagacgaatattaatgcacgtctttagttgctactataattatgtttttggttctgatttagtgctgcttcactattttagatgattaattttaaaactacattcaaaatctcaatttactgacattttttgacaaataatgaagttaagtccggcctcgaaaagcaatagacattttaaatcaaagaaattttaaaaaatcttagctaagaaataacacttagtagtctcttataatttatatatatatattttatatatattttttgacattttattaaaattcacaacatcatttgaattcgtacatattacttaaactgcacttaatatttttattgatatgttgttatatgaataactcaattctttcgataaatctttgaattaatcagctttgaatcagcttaaaacacattttaaatggttttattcatacctaatttaaggatttcacaatctttgttatcaatttctggaacccaaacaaatggcttattagatctaaagtacattagatttgttaaggcatcgagaacatgtccacttttatgtaatatatgattgtaaaactatactttaatgtgataaatgaaagagcagaaatcgaattaaaaatagtgtgaaattccacgatttttaaacagtgtacttgaataaagcatggcattgggatttatggcaaaattgtaacaatagttttaggattgaagaaccctatagagacctggtttgcatgtgagtgaaaatcatagcttgcaatctgtaaggagtcaccgccaaacgccacaggcttctgtgaatataacgacaatgtttgctgatgcgttgattattagtttaaattgccgacacgccg

SEQ ID NO: 41417 - DNA, 1167 bp, DROSOPHILA
atgacgagcatctcggccctgctccatcggagccacagccacagcaatggttacacgagcagcgggagtagcaatcacagccatagcagcagtctctcaccgcagttgcccggcatcaatttgggtttgggcatggtcggtggcttgggcatgggtatgagtgtgggagtaggctctggatcgggaaacaccaccccaccaccgatgccgccagctgacctcgccgttccgccagcggcccccactccggtggcacccaaaatgcaccagcacacgcaccaccatggcaactcccaccataatgccccgaccagccactcgaattcgaatactggaagccatcacaacagccacgaccacattaagcgaccaatgaacgctttcatggtctggtcgcgggggcagcgtcgcaaaatggcccaggacaatccaaaaatgcacaattctgaaatatcaaaacgcctgggcgccgagtggaaattactcaccgaaggacagaagcgtccattcatcgacgaggcaaaacgattgcgggctctgcacatgaaagaacatcccgactacaagtatcgaccacgtcgcaagcccaagacgctcaacaagtcaccggtgccaggtggtggtggtggcggcggtggaggtggtgccaacggtggtgtcaacgctggtggtgcgggtaactccggtcccagtggcccaggatcagttggctcccccaaggatatgcagccccagttgtcgcccttgggtcagtcgctgccacatctccacggacatccgcaccagtcaccatatcaatcgcatccacaccacccgcatcctcatccacatcatgtccagctggccgccgccaccttgagcgccaagtacggttttggttcgccactggagttatcgctgccccgcctgccgaatgcctttcccggcctcgcccactatccactggatcccacgttggccctggacctacaggcgcgcctccaggcgatgtacgccggctccatctaccacccgtggcgatatctgccgctgataagtccggaaactccaccctccccgcccagcagcagcggtaccggcatctcatcctacggatgcgtcaagtcagagaagtcctcaccaaatgcggtagtggccagcgcggccagtccgccaaacatcatttga

SEQ ID NO: 41418 - protein, 388 aa, DROSOPHILA
MTSISALLHRSHSHSNGYTSSGSSNHSHSSSLSPQLPGINLGLGMVGGLGMGMSVGVGSGSGNTTPPPMPPADLAVPPAAPTPVAPKMHQHTHHHGNSHHNAPTSHSNSNTGSHHNSHDHIKRPMNAFMVWSRGQRRKMAQDNPKMHNSEISKRLGAEWKLLTEGQKRPFIDEAKRLRALHMKEHPDYKYRPRRKPKTLNKSPVPGGGGGGGGGGANGGVNAGGAGNSGPSGPGSVGSPKDMQPQLSPLGQSLPHLHGHPHQSPYQSHPHHPHPHPHHVQLAAATLSAKYGFGSPLELSLPRLPNAFPGLAHYPLDPTLALDLQARLQAMYAGSIYHPWRYLPLISPETPPSPPSSSGTGISSYGCVKSEKSSPNAVVASAASPPNII

SEQ ID NO: 41419 - DNA, 3588 bp, DROSOPHILA
ttgggtctaatttaatttattacacatatagtaattaactttatttcaaaatcaaatgttattatgtttatcgcctgcgatctgctgactcaggtgcacacgacattatgctattaatagtccacgatgaccgattcttactgacatacatacttattgagattactgtttaaaattatacattattgtgaaattatttacgattaaactaactttatgaaataatctgccgatcgtcggttttaattgtacctgatagtcgtagagtaaatgagtgtacagagtgttcgttgaaaggaaagatactattgtataagaatatagaagattgatgtgaaaattacttggtgtataggtatgctacaacaagtaaaccacatataaaaaatctagtgtccttgaactcccttcaaatgagtactgagtatcttaaagtcgaggaactacactagcttacttgtttttttaaagtcaattgggctttaccacataagtccaacttttctgttccgatagtaacaaatatgtctaggaatcgccacaattagtcaatattattaaaaacaaagtgtgtgggttttgccatataatatgtaggtaattttaagctaatttagattactctaatctcatttcgtttaattgatttgtttgaaaaaaaaaatagaaaggaccatatttggagaacttcttgatatggtactacttgaattatataattcggtaaaaaactcattcaaatttaatcaagtatatacatttggttaaacaattataacaattataaagtcgttagctttaaaatgcgaactctgttataagtttagagcacgatgtaattctttattgctcttttatttacacattaactttttaatattccaattatagaaacgcagtctaaaaaatacatttgagttaataaaaagaacccaaatttctatccgtctgagttctgggaaagttcttatccccacaaaaactttgttgacttgtcaaaatggccatcgatcatgcaaaaatggttcgttggcttcgcttgcgatacatcacaaaatgggttcctgagctgaagggtcgtcgatcaacttggacagcccagcggatcgaagataactcctggctggactgcaaataaaagcccaggaagtccatcaaccagaaacagtattcaactaggagccaccaaaagaagaagcaaataatgggtgggtatcgcatataaaagttcgaaacaggaaaaattggaacatcatatgaatatattcaacgcttccaggtggacaaaaagcaaccatcctcgctgccgtggcgctggtgatcgcctgtgccgctccagcaatagccgatgtgaatgtcaccgccttgtgcctgctggtcagcaatgggaactacgtggccagccagtcggactgctcgacctactaccagtgccagggatcctcgttcacggccatgtcctgtccccagggctactacttcgacaagaatgcccagcagtgcacgggcactgtgccgagcacctgcaccagcaactccgatccctgtctgggcaaggcggtgggatccttcgcggcatccagttcgtcctgcggcggctactactactgcggagcctccggcgctgtgaggggcaattgtcctgccggcgagaacttcaatcccaccacaatggcctgtgtgtacaagaacaactatccatgcagcgagtccgccggtgatggctccactgtgtcggtcgccctcaacctatgcaatcttgtcaagaatggcttttactttggaagcccttccgactgcagtggctggaacttctgccaggacaacgttctgcactcgggatcctgcgaagatggtctagtattcaatgtgcaggccagcaactgcggctacaagatggcctcatcctgcgcccaggtcaccaatgatccatccctgaccggagtgtctgctccgaccacatgctcctcgtcgggagcaacgatcgcagccaccgcgtgcaaccagtactacctgtgctccgccggcaactatcagctgatgacctgcccctcgggatactactatgataccatctcgaaggcgtgtgtgaccaggatggaagcgaggaacgactgcgacagatgtgtgggcaccactgcgacctttgtaaacgcctactcggcaaccaattgctctgattacctatactgcgtgaacggcgttcagaaggccgtggagagctgccccaccaactactacttcaacgagaacctcggatcctgcgtaaacgggttggagcccaagttcctctgctgcaatcccacgcaaagcgatggaacttcgacgtcttcctctggttcgacttcctcgggctcgacttcctccggatcgacttcctctgggtcaacttcctccggctcgacttcctctggctcgacttcctcgggctcgacttcctctggctcgacttcctcgggctcgacttcctccggctcgacttcctctggaacttcatccacaacctctactggaacaagttcagacaaaaaataatttaaatagcatttatgccaaaaataataaatacaaatcaagtttggcaactcaattaaaagtatccacccaagttattcgcacagtaatagggtatatgaagtaaagtgttctaaaaaggatatatattcttaattcggataggaaatcggcaaataaaagagctaaaatgcccaaaaaactgtcaccaaatgcgacaagaataaaggaaaatttccatcgacgtacagaagatccaaggaaataccatcaacactttattgaccccatatggcagggcaataaagccgaaattaaagattgcctgagcgaaaagtttttcatcgccaaacaagttttactgggcagcgtcaacgccatacaaaagcgataagagtccattcaatttaaggtgtagctgttaaagttacataatatacatacattatacatataacaaatttaaaccatttgctagaaaaagttcttatttaaatgaatagcattaattagggtaaaatattatattatttttaagaaagggtcgttttctattgcacaacattatcccgattaaaagaccttgatttgattaatcttacaacactatcgaatgaaaaccccacttttcagttattgtacaacactaggcttaactacacgatgttttactttccaaggtagacctacaccattgataaggatgtggctgcgtcagttgtttgttttttttttttttttttattattaagttgcggaacagatagaaataatgacagataaagagctacttagtggttaatacaactatactttaattaaaatcggttaaataacaccccgaaaagatgttcagcgtctatctggtggaataaataaaaaatggaacaatgtttcactgtctataattcctgagaatagctgggcttatctacattcaatttacgatctcgatggccaagttcgaatcgtagacctataaaaaccaggcaatgggaaaactccaccatcagtcttcgacaacctttcattggccgatacaagtggtattcgatccccaacagcggcaaaaag

SEQ ID NO: 41420 - DNA, 1400 bp, DROSOPHILA
atggccatcgatcatgcaaaaatgcccaggaagtccatcaaccagaaacagtattcaactaggagccaccaaaagaagaagcaaataatgggtggacaaaaagcaaccatcctcgctgccgtggcgctggtgatcgcctgtgccgctccagcaatagccgatgtgaatgtcaccgccttgtgcctgctggtcagcaatgggaactacgtggccagccagtcggactgctcgacctactaccagtgccagggatcctcgttcacggccatgtcctgtccccagggctactacttcgacaagaatgcccagcagtgcacgggcactgtgccgagcacctgcaccagcaactccgatccctgtctgggcaaggcggtgggatccttcgcggcatccagttcgtcctgcggcggctactactactgcggagcctccggcgctgtgaggggcaattgtcctgccggcgagaacttcaatcccaccacaatggcctgtgtgtacaagaacaactatccatgcagcgagtccgccggtgatggctccactgtgtcggtcgccctcaacctatgcaatcttgtcaagaatggcttttactttggaagcccttccgactgcagtggctggaacttctgccaggacaacgttctgcactcgggatcctgcgaagatggtctagtattcaatgtgcaggccagcaactgcggctacaagatggcctcatcctgcgcccaggtcaccaatgatccatccctgaccggagtgtctgctccgaccacatgctcctcgtcgggagcaacgatcgcagccaccgcgtgcaaccagtactacctgtgctccgccggcaactatcagctgatgacctgcccctcgggatactactatgataccatctcgaaggcgtgtgtgaccaggatggaagcgaggaacgactgcgacagatgtgtgggcaccactgcgacctttgtaaacgcctactcggcaaccaattgctctgattacctatactgcgtgaacggcgttcagaaggccgtggagagctgccccaccaactactacttcaacgagaacctcggatcctgcgtaaacgggttggagcccaagttcctctgctgcaatcccacgcaaagcgatggaacttcgacgtcttcctctggttcgacttcctcgggctcgacttcctccggatcgacttcctctgggtcaacttcctccggctcgacttcctctggctcgacttcctcgggctcgacttcctctggctcgacttcctcgggctcgacttcctccggctcgacttcctctggaacttcatccacaacctctactggaacaagttcagacaaaaaataatttaaatagcatttatgccaaaaataataaatacaaatcaagtttggcaactc

SEQ ID NO: 41421 - protein, 448 aa, DROSOPHILA
MAIDHAKMPRKSINQKQYSTRSHQKKKQIMGGQKATILAAVALVIACAAPAIADVNVTALCLLVSNGNYVASQSDCSTYYQCQGSSFTAMSCPQGYYFDKNAQQCTGTVPSTCTSNSDPCLGKAVGSFAASSSSCGGYYYCGASGAVRGNCPAGENFNPTTMACVYKNNYPCSESAGDGSTVSVALNLCNLVKNGFYFGSPSDCSGWNFCQDNVLHSGSCEDGLVFNVQASNCGYKMASSCAQVTNDPSLTGVSAPTTCSSSGATIAATACNQYYLCSAGNYQLMTCPSGYYYDTISKACVTRMEARNDCDRCVGTTATFVNAYSATNCSDYLYCVNGVQKAVESCPTNYYFNENLGSCVNGLEPKFLCCNPTQSDGTSTSSSGSTSSGSTSSGSTSSGSTSSGSTSSGSTSSGSTSSGSTSSGSTSSGSTSSGTSSTTSTGTSSDKK

SEQ ID NO: 41422 - DNA, 7565 bp, DROSOPHILA
atgtgataaatgttcctgagagccgctggaatgccttcaagtccgcccagcttatggacaacattattgtatatggaatgctaccccatgagcaccagatgtgcgtaatgaacgtggtactgcagcgaatgcccgactcggaggtgccgctgaagtctaaagaacaattgataatccagtgcggctatcgtcgctttgttgtgaatcccatttacagtcagcacaccaatggggataagcataaggtaatatttggactaatttgtaattgactatttattaatggattatgtttatccagttcgaacgctacttccgtccgtacgaaacagtttgcgccacgttttacgcaccgattcagttccctccggcacccgtgctggccttcaaggtgaatcccgactccaccctggcgctggttgcccgtggacgcctgctgtcctgcaatccagatcgtattgttctcaagcgcgttgttctcagcggtcatcccatgcgtatcaatcgcaagtcggcttctattcgctacatgttcttctacaaggaggatgtggagtacttcaagcctgtgaaactaagaaccaagtgcggacggctgggacacattaaggagtcactgggcacgcacggccacatgaagtgctactttgatgggcagttgcgatcctacgacactgctttcatgtacctgtacaagagagtcttccccaaatggacctacgaagagtgtctggtgcgaacggcggagcacgagcgacaacatgcgtcggcaaacaggaggagctcgcagcaagtggccatggaagagtagaggtgtgtgcaaatggatggataaataagtgatcgatggacagtgcgaataacttctgaaatgagtttatattattgttgttacatttaaacctctaaaagtatgaaacctacgaagtgtccattcgggaaatgtcacccgaaaagtacataaaatatgtacacaaaaatcccgcatcgataattttttatatgtgactgcgttgtataataggaataatagaattatattcacaaacaattgtcttaacttaatggtagaggcaatacaatatacatacatataacatggatacgtttaaaagcttgtcgcattgcacaaggataaagaatcggtcaggttctcatagaatatggctaatacagttttgtggggggacaggacatagggcagggatgggactatgattattcagtaattggtggacagacacttgcgacgcttcttttgcaattgctcgatctgttcgcttatttggattggtgtttggaaacctcttacaatgctgttgacagtcagaaccgtggcgataaactgggtaatagatatgtgccaggattcggagatgttagtgctgctgctgtccccactgcttgttgttgtggtcctggactttccgctcgcctgacgaagctcctcttctagagccacaaatagacgggtagtgccaatgggttctggtgcaggagtggtgggattgccattgctatccggttgctgaaagaaaaatttagttttgttttgattgttgggaatctttgaaaagacaaagcaagtcatacctcatcgccacccatatttagctgggtaaagctctccaggctgggctcctttttaatattgctgtttccaagctccaagagattctcatctaaaaaatgaacaatagttttgaatggtactttcacgttttaaaggctatacttacaagccctttgcatctcttcatcctggaccagacccatgatctctatgatactgcgccacaacagctgaaaattctccttacgcatgtggggaatgctgtgttgcgaatttgaagcgccttcgtccggctggtccagcagatagccaagactgcccaagcttcgcaagtccgtggcattcgagtcaacacgttctagacgtgtggccgcaacaaggtcgctgatctgtgagaaattcgatatagtctcgacattgagaagcatgtgatcagcggccgcagacgaggctgctccggctaccacatcagctcccactcccgcttcgggcggcgtaatgcgtgccgctcccagatctgaaatatccgaaaatgtgtcaatcgattcgtaacggccctgctggcgaagctgtcgctggagttcgtcttcgtcccgcccagcatctgtggatgtggcagtaccctggaatcccggcaggtccacatagaaggttgagctgcgatgcgccaacgaggaggtgttagagttcaccgacagattgggagtgcgtgacaggtccataaatgtgtttcccgagattccggccaggttgtgcagatgctgggtggcactaatcagggcaaagtcatcggcatcaaaattgtgatccgagggcgagggcaacgcttccatcgactcggaggcgtcattactaaataagaaatgcatggttttagttcgttatagtttgggcctcagaaaacactcactcaaagaaatcctccgcctcgaaagcctcctcggcatcatcttttgtgcgtgggcgcgggcgacgtgatcgttcaatctccgctttggacaataggggcggaagatgtaaaacgtagaggagtttcagcttctccatgttcttgttggaacagaccaggcccaatgcattgatgagctgtccgaagtcgagaacaccagttcccttcttatcagtaagctggaaaacgaaaacagagacatatagattcatgccaattcttattccaagatcattaacataccctaaacaatttttcgccaatgtccacgctgacgcacttacgccagggtgtcagttccgtaaaaagtgtgtggaatacctcatagctgacactgtaagcctcgtatctgcctccggaggcgccggcatcttggatcggtctgcttgtcgactgagggaccagctggggagtctcagacaacgggcattgaaccttctgctgctgctgttgcagggatttaagggcgtgcttttcctcccggatgatagtgagcagcatatgcagttcactgcggttgaaatacggattctggacgtaagccttgacaatggtcttctcgttgtcgatatcgaactgtcgcatcgttaaccggcgatgcttgttgcgtaactcctcgatgcgctgctgtgtgatatcctcaccgaactttgtgtatgcctcatggatcagggtctgaactgtttgtgtttggactttacgctccatcttccgtttgtccgtcgtaggaggcacctggtactctggattgtagactccctccaggtagttctgcaaaactagcatggcttcgccatcatcttggcagatcaacagtttgtccctgttccattcaatgatctgcagtgaaatcataaaaatgatcttggcgccctcgtagaagaagcagtccaggatgtgcagcgagctctcgtagctgatcacgctcatgaagatggtaaggaaccaggaaatggaaatcatcttaatcacacccaactgctccagatggccgtgcaaatcaggcaaatgcgtctccactagctcattaagcacaccctgatcgatttgggcgcccaccactttatccttgtagtagtccggtagtaagttctcgcacaggctggccagcatccagaatgcgttctcctcatcacagaagagcaggaacaccgacgacacaatattcatggcctgacagtagcccacttgtggattccgcagcgcataggcctgaaggactctccgcagagcacctatgccatcggtgctttgaaatgccggatgctcgggcagcgaacgcggcaagtcccgatcaatttcatcgtgggcaaagcagttctttatgcaagccgccttctctacgagatcctcgtacagtccgggattcatctccttgtcgtggattgcccccgagaatatcagccagatctcctggcgcagtttgtcaggaataccctccactattagatttatcacgtccgttgtgcggaacattccaatgccccgtccgaagtcccggaaatgcgcctcccagcgcaccatcttttcctcctgcttctgtatgatctctgcgctgaactgtgtcttgaatgtgttcatcagagcggtctgcttgctccacgaaatgtcgtacttagcgcgttcgcgactcaaaggactgcgttaaataatatggttaggatcaatatatacatgtaagtatagcaacatagatttttaatctaacacttacacatgaactcgagccagaaggtctgtgatcttggagatcaacacagctctgtccacgatatgagcaaacatgaaaggcacattctccgatgttataattacaatttggttttcgaaacgttgctggccatcatccttcttttcaacgctctagagtgcaaacaataattaaaacttatcgaaatcgagtacatttatggtctgcgaacctttatggtcttcatgggtataaccacgctgaccaaatcctttacatcgctacgaaaacaaaagaaattcggcgataagtagataaagcccgaattaaatcgttttgagtaaggtgtccagatattggccttaatctttccgtcaattatttccgattgtggcaatcgaaagtaaatacgaaactcctcggacttttggcgagctgtcaaatcccgcagtagaactggtttcttggacgttttggaacccaaccgtgagaaattagaagtatcgtggtcgaccacaggactatctggatcatggattagctgctgtatggccattttgttgagctgctcaatcaataagtgtgcatcgctggcgttgaagagcattgtaaagttgtaggtcatgttattggtggtttttagatagatggtattcgcatttcggctgatgtcttccagctctgcgaagcgtataatacgcttgatctcttgacccagcatgtaggagtaaaagcagacgtggtttagcgaaatgtatagctgaccctgccttggtatcttgttttttacataactggaattcaatattcagtaaatatggacctttaatgtatactgaacatatgcttacgtggccgaataagagataactaatcgctcttcctcgggcattttgaaaatctgtctaaactttgatttcataaccttgaaatcggccgattcgccagtgtcatcttgattgttttgcgtgtacaaagattggatcttgcatatggtaaagttggtcacctcgtcctcgttctccatctcgtccagcactttaaagagattagctttcagccattcccaatccttaacaatctcatcctgggtaatgccaatggcgatttctgtagggaatagattcttgttaatcttttttatatttttatctatagaacacgacttaaaaaccatatcagcacaatatggatatggaattaattattctacaggcacagtaagataccaaaaattagtttaaacattttttactaaactttaggataacacgcatttcagcgccttgcgcatgttgagatgaaaatgcctggttttcaagtaccctactccgtcagttgccttcttttcttaatataatataaattgaataacaaaaggaacgatccagcctccgcagcttttgtaatcagctccgttccatgtttacgtaagcgccgagggaaccgtagatgaaagaaatattggcatactcccataaatgcgagtcaaagcccgatgattcacggtcaccgattgctggacatacgaaatagacccgaggtactggaactgatagagcggatgagtctgagatattggacctaccgtaagacacctccgacgagggcgtctggtggaggatgcgatagggtgccggtttggtgttcatcacgctgtcgtaggtgcccaccaacatggaaccgaatccgcgtgattccccatggccacgtctcttctgcaggacaaagtatctcgagtgcatctcggcaatcctgtgggcgaaaattatggtgttcacctttagagtcggcttatcaaggggggagggccccacttaacgggggctattttctagagggcggtgtctgcacttttctacgcagcaggaaacagttggaaatcaattttcaagctgactttacacagctggcactttttgcgtttcgaaatcagaaccagcgatctgaagagttggagtcttgaacttttggctcaattagttatcaacaaatgcatttcaactagctagctgcaagtacgacgtttgtgcctaatccaaatacgtgatcggcggctccccattccgcctgcacttcgcgataatcgcattccatgagatgtcttccataaacataacattgcatatacacatgccgtccattccaattcacccacacacccatgcagccgtgtttaatttggattttcggcaatccttcgattcggctgcggacttgggctataactcaccaaaatgccgagggaagcagcagctccttgggctgaatccacattttgattgttcttagcccgtgccaggctctaaatacaaaattactctttgtttaattctgcatcgagcgctgattgctgtttttgtggcaagtgtgcccgttggctggaaagcacaaaacgcacaaagaactaagcaatctattgtgaatgggtgcactctgcgtccgatttttgaatcaaatagttaacgtttagttaaacctaagaatatgaatctgtatcttaacttcaattaagcgaaatatgttctctccaatttaaaaacttgttggcttttagaagccgaatagagaaacagaaaatgttcattattaacagtttaatattacgcaaagttaccatataaattacatagttagcctttagctttaaatcgaaactgaaacctctcatttatataacaagttcaaagcccaacgaacgtgtcgtgctacaaaattactagttttattctcaactcctgcaaaatcgtcagtgttttgcaaaaatgttgaaaaaattcgtggaagtgaacgccgagtgcagtccctctaacaatccctatgagattcgtacctttctgggcaacgaaacgtcgccggaatggaaggcggagaactgtccgccccgcgatcgcgtctgtcagaaaaagccacccaactccacgatctcccaagtgctaaccatcgaggatgagctgcgtcgcatccaccacaaggcggaggaatcccgcttcacaaagccctataaaaagaaatgtgacctctacgacgatttaaccatgtgcatcgtgccacaacgaactccagcggagctaaagacccatgccgagatgcgagagcgaattctggccgcgcgcaaggactttggactcgtcgagcacgacgccagggtcgataggccatgtcccaaagatctcgtcgtcctcaacagtcccatggacatgggcgaggaggaacaacaggcggaggagggcgaggaagaggaggagggcgaggtcaagccacaactagccactccagaatgcagttctgatatgataattattccggacaaacgcatggtatgtttagatatagcttataaacttggtata

SEQ ID NO: 41423 - DNA, 4174 bp, DROSOPHILA
caatcagcgctcgatgcagaattaaacaaagagtaattttgtatttagagcctggcacgggctaagaacaatcaaaatgtggattcagcccaaggagctgctgcttccctcggcattttggattgccgagatgcactcgagatactttgtcctgcagaagagacgtggccatggggaatcacgcggattcggttccatgttggtgggcacctacgacagcgtgatgaacaccaaaccggcaccctatcgcatcctccaccagacgccctcgtcggaggtgtcttacgaaatcgccattggcattacccaggatgagattgttaaggattgggaatggctgaaagctaatctctttaaagtgctggacgagatggagaacgaggacgaggtgaccaactttaccatatgcaagatccaatctttgtacacgcaaaacaatcaagatgacactggcgaatcggccgatttcaaggttatgaaatcaaagtttagacagattttcaaaatgcccgaggaagagcgattagttatctcttattcggccacttatgtaaaaaacaagataccaaggcagggtcagctatacatttcgctaaaccacgtctgcttttactcctacatgctgggtcaagagatcaagcgtattatacgcttcgcagagctggaagacatcagccgaaatgcgaataccatctatctaaaaaccaccaataacatgacctacaactttacaatgctcttcaacgccagcgatgcacacttattgattgagcagctcaacaaaatggccatacagcagctaatccatgatccagatagtcctgtggtcgaccacgatacttctaatttctcacggttgggttccaaaacgtccaagaaaccagttctactgcgggatttgacagctcgccaaaagtccgaggagtttcgtatttactttcgattgccacaatcggaaataattgacggaaagattaaggccaatatctggacaccttactcaaaacgatttaattcgggctttatctacttatcgccgaatttcttttgttttcgtagcgatgtaaaggatttggtcagcgtggttatacccatgaagaccataaagagcgttgaaaagaaggatgatggccagcaacgtttcgaaaaccaaattgtaattataacatcggagaatgtgcctttcatgtttgctcatatcgtggacagagctgtgttgatctccaagatcacagaccttctggctcgagttcatgttcctttgagtcgcgaacgcgctaagtacgacatttcgtggagcaagcagaccgctctgatgaacacattcaagacacagttcagcgcagagatcatacagaagcaggaggaaaagatggtgcgctgggaggcgcatttccgggacttcggacggggcattggaatgttccgcacaacggacgtgataaatctaatagtggagggtattcctgacaaactgcgccaggagatctggctgatattctcgggggcaatccacgacaaggagatgaatcccggactgtacgaggatctcgtagagaaggcggcttgcataaagaactgctttgcccacgatgaaattgatcgggacttgccgcgttcgctgcccgagcatccggcatttcaaagcaccgatggcataggtgctctgcggagagtccttcaggcctatgcgctgcggaatccacaagtgggctactgtcaggccatgaatattgtgtcgtcggtgttcctgctcttctgtgatgaggagaacgcattctggatgctggccagcctgtgcgagaacttactaccggactactacaaggataaagtggtgggcgcccaaatcgatcagggtgtgcttaatgagctagtggagacgcatttgcctgatttgcacggccatctggagcagttgggtgtgattaagatgatttccatttcctggttccttaccatcttcatgagcgtgatcagctacgagagctcgctgcacatcctggactgcttcttctacgagggcgccaagatcatttttatgatttcactgcagatcattgaatggaacagggacaaactgttgatctgccaagatgatggcgaagccatgctagttttgcagaactacctggagggagtctacaatccagagtaccaggtgcctcctacgacggacaaacggaagatggagcgtaaagtccaaacacaaacagttcagaccctgatccatgaggcatacacaaagttcggtgaggatatcacacagcagcgcatcgaggagttacgcaacaagcatcgccggttaacgatgcgacagttcgatatcgacaacgagaagaccattgtcaaggcttacgtccagaatccgtatttcaaccgcagtgaactgcatatgctgctcactatcatccgggaggaaaagcacgcccttaaatccctgcaacagcagcagcagaaggttcaatgcccgttgtctgagactccccagctggtccctcagtcgacaagcagaccgatccaagatgccggcgcctccggaggcagatacgaggcttacagtgtcagctatgaggtattccacacactttttacggaactgacaccctggcgtaagtgcgtcagcgtggacattggcgaaaaattgtttaggcttactgataagaagggaactggtgttctcgacttcggacagctcatcaatgcattgggcctggtctgttccaacaagaacatggagaagctgaaactcctctacgttttacatcttccgcccctattgtccaaagcggagattgaacgatcacgtcgcccgcgcccacgcacaaaagatgatgccgaggaggctttcgaggcggaggatttctttgataatgacgcctccgagtcgatggaagcgttgccctcgccctcggatcacaattttgatgccgatgactttgccctgattagtgccacccagcatctgcacaacctggccggaatctcgggaaacacatttatggacctgtcacgcactcccaatctgtcggtgaactctaacacctcctcgttggcgcatcgcagctcaaccttctatgtggacctgccgggattccagggtactgccacatccacagatgctgggcgggacgaagacgaactccagcgacagcttcgccagcagggccgttacgaatcgattgacacattttcggatatttcagatctgggagcggcacgcattacgccgcccgaagcgggagtgggagctgatgtggtagccggagcagcctcgtctgcggccgctgatcacatgcttctcaatgtcgagactatatcgaatttctcacagatcagcgaccttgttgcggccacacgtctagaacgtgttgactcgaatgccacggacttgcgaagcttgggcagtcttggctatctgctggaccagccggacgaaggcgcttcaaattcgcaacacagcattccccacatgcgtaaggagaattttcagctgttgtggcgcagtatcatagagatcatgggtctggtccaggatgaagagatgcaaagggcttatgagaatctcttggagcttggaaacagcaatattaaaaaggagcccagcctggagagctttacccagctaaatatgggtggcgatgagcaaccggatagcaatggcaatcccaccactcctgcaccagaacccattggcactacccgtctatttgtggctctagaagaggagcttcgtcaggcgagcggaaagtccaggaccacaacaacaagcagtggggacagcagcagcactaacatctccgaatcctggcacatatctattacccagtttatcgccacggttctgactgtcaacagcattgtaagaggtttccaaacaccaatccaaataagcgaacagatcgagcaattgcaaaagaagcgtcgcaagtgtctgtccaccaattactgaataatcatagtcccatccctgccctatgtcctgtccccccacaaaactgtattagccatattctatgagaacctgaccgattctttatccttgtgcaatgcgacaagcttttaaacgtatccatgttatatgtatgtatattgtattgcctctaccattaagttaagacaattgtttgtgaatataattctattattcctattatacaacgcagtcacatat

SEQ ID NO: 41424 - protein, 1291 aa, DROSOPHILA
MWIQPKELLLPSAFWIAEMHSRYFVLQKRRGHGESRGFGSMLVGTYDSVMNTKPAPYRILHQTPSSEVSYEIAIGITQDEIVKDWEWLKANLFKVLDEMENEDEVTNFTICKIQSLYTQNNQDDTGESADFKVMKSKFRQIFKMPEEERLVISYSATYVKNKIPRQGQLYISLNHVCFYSYMLGQEIKRIIRFAELEDISRNANTIYLKTTNNMTYNFTMLFNASDAHLLIEQLNKMAIQQLIHDPDSPVVDHDTSNFSRLGSKTSKKPVLLRDLTARQKSEEFRIYFRLPQSEIIDGKIKANIWTPYSKRFNSGFIYLSPNFFCFRSDVKDLVSVVIPMKTIKSVEKKDDGQQRFENQIVIITSENVPFMFAHIVDRAVLISKITDLLARVHVPLSRERAKYDISWSKQTALMNTFKTQFSAEIIQKQEEKMVRWEAHFRDFGRGIGMFRTTDVINLIVEGIPDKLRQEIWLIFSGAIHDKEMNPGLYEDLVEKAACIKNCFAHDEIDRDLPRSLPEHPAFQSTDGIGALRRVLQAYALRNPQVGYCQAMNIVSSVFLLFCDEENAFWMLASLCENLLPDYYKDKVVGAQIDQGVLNELVETHLPDLHGHLEQLGVIKMISISWFLTIFMSVISYESSLHILDCFFYEGAKIIFMISLQIIEWNRDKLLICQDDGEAMLVLQNYLEGVYNPEYQVPPTTDKRKMERKVQTQTVQTLIHEAYTKFGEDITQQRIEELRNKHRRLTMRQFDIDNEKTIVKAYVQNPYFNRSELHMLLTIIREEKHALKSLQQQQQKVQCPLSETPQLVPQSTSRPIQDAGASGGRYEAYSVSYEVFHTLFTELTPWRKCVSVDIGEKLFRLTDKKGTGVLDFGQLINALGLVCSNKNMEKLKLLYVLHLPPLLSKAEIERSRRPRPRTKDDAEEAFEAEDFFDNDASESMEALPSPSDHNFDADDFALISATQHLHNLAGISGNTFMDLSRTPNLSVNSNTSSLAHRSSTFYVDLPGFQGTATSTDAGRDEDELQRQLRQQGRYESIDTFSDISDLGAARITPPEAGVGADVVAGAASSAAADHMLLNVETISNFSQISDLVAATRLERVDSNATDLRSLGSLGYLLDQPDEGASNSQHSIPHMRKENFQLLWRSIIEIMGLVQDEEMQRAYENLLELGNSNIKKEPSLESFTQLNMGGDEQPDSNGNPTTPAPEPIGTTRLFVALEEELRQASGKSRTTTTSSGDSSSTNISESWHISITQFIATVLTVNSIVRGFQTPIQISEQIEQLQKKRRKCLSTNY

SEQ ID NO: 41425 - DNA, 3470 bp, DROSOPHILA
aaatagcatttatgccaaaaataataaatacaaatcaagtttggcaactcaattaaaagtatccacccaagttattcgcacagtaatagggtatatgaagtaaagtgttctaaaaaggatatatattcttaattcggataggaaatcggcaaataaaagagctaaaatgcccaaaaaactgtcaccaaatgcgacaagaataaaggaaaatttccatcgacgtacagaagatccaaggaaataccatcaacactttattgaccccatatggcagggcaataaagccgaaattaaagattgcctgagcgaaaagtttttcatcgccaaacaagttttactgggcagcgtcaacgccatacaaaagcgataagagtccattcaatttaaggtgtagctgttaaagttacataatatacatacattatacatataacaaatttaaaccatttgctagaaaaagttcttatttaaatgaatagcattaattagggtaaaatattatattatttttaagaaagggtcgttttctattgcacaacattatcccgattaaaagaccttgatttgattaatcttacaacactatcgaatgaaaaccccacttttcagttattgtacaacactaggcttaactacacgatgttttactttccaaggtagacctacaccattgataaggatgtggctgcgtcagttgtttgttttttttttttttttttattattaagttgcggaacagatagaaataatgacagataaagagctacttagtggttaatacaactatactttaattaaaatcggttaaataacaccccgaaaagatgttcagcgtctatctggtggaataaataaaaaatggaacaatgtttcactgtctataattcctgagaatagctgggcttatctacattcaatttacgatctcgatggccaagttcgaatcgtagacctataaaaaccaggcaatgggaaaactccaccatcagtcttcgacaacctttcattggccgatacaagtggtattcgatccccaacagcggcaaaaagtattaccaactaacgatgacaggcaagtgtttcgcatgggatatgatctgtggtctatggtcgaataaacaccaggagtttcgctaattgatttgcgtgatttctggcttgcaggcaaacttctactggccacgatcctgtgcctaatgggcggccaagccttgggcgatgcgattctggaaggaaactacaacgttacggccgtctgcacggcggttaaggtcggaacgcagctgggcagcatcgaatcctgccagacgtactacgtctgccagtccaccggacccgtgcagtcctcgtgccaatcaggctactcgtacgactacaagagatcctcctgctatccaagcagcgaggtggactgctattggggcgttgagaatccctgtgctggcaagaataacacctgggtgccaaacactgccgtttgtggtggatggttctactgccttgagggcaagtcggcgggctccggaaactgcccggtgaaccagaaattcgataccaccacactcgcctgcgtttatggaacctgctccaacactcaaggtactaatgaaaccgtgctagaatcactatgcgatgtcgtgccacctggccaatatttcggcgatactgagagctgctccacctggcactactgcgagtccacctccaccggactcgttttgcagtcgggtaaatgctctgcaaacaatcaaactgtgagttaccaattgcaaacctactaaatccctgcctagatcccaaaagacatgacaagtccgttaaccaaatctttacaatttcttacatccttgatatgaaatccaatcatatggaaagttaacgaactttcataggcacctcgatcatactggacaattacctgcatcctttagtgaatgtgatttacttctttccgcaggcatacaacgtgctcgccaatcaatgtacctacgaaagtgcctccgtctgcagccgtgtgaccaacattccgctgagcgatgccgcagtttcctgctccacgaacggtgccaagtcagccgatcccaaggtgtgtggcacctattatgtgtgcacgaacggcaaaaatgtggccacctactgccccactggcgactactacgacgacagtttagggtactgtgtgtcccgccaggtcgccactccggtggcgggatgcaatcgatgccagtatgctacgtcgacgtttgtaaacgccgtcgattcgaataactgctccacctactactattgcaacagccagggcgaggccactttgaacacctgcccggccgatacattcttcgatgagtcacgtcagggatgcaagtccgacgacgacctgtccacatatgtgccattgaacggagcctgcaaaggagccaccgccgaaggatcagaagaaaccgataatagtacgaccgatgccgaataagcccaattatcgtgaagggctttcaggttggaactcaacggaacaggagtaactgacaacgcgaccctatgtatttaccacttagtattcagtatctaataaatgcaataaaagctatgttcgcaagcaaatcgtggtgattttccttacccaacaagatgtgagaaattcaaaaggagataccttttgcagcatctgaatattctattcttcatgataagttcgaggtttttctgggctcaaaccaatgcttcctaggaaatcatctaaaattattgaaataacagctgatctggctgtagaaagtgtattacttcatgtacatcgttcgaaactggttgattaggatatatttagatgactggtatttttagaagtgagcatatcgcgcgcatcacttcactgaatgatatctaaaaactcaaacattgcgatctgcgcagaatgcaaacacaagttttcgattagctcttacaaatgggtgtggcccatttgaacgaccttataaaagggtcggtcgtgaatcggccgaaccattaacataggtagtttggagtcgcaaagaaccgttatcagaagtaaagggcactattaactacaatgcaatgctcctgggcatatgtcctggcattgagcatctgcttccagttgggagccggtcacgctgtggaccaaagttgggaactgcccaaagttcgacatactgtgggtcacctcagccatgtgagtattgaaatataaacttaatcatttttttttttttgccatctcaaaaagaattgtactttgaacgaaatccattcgttctaattcgcagtagaaggctcttagacaaaattcctactttcagatctgcttgggacgtcaagagggcgatttggtgccacatccgttggattgtaatggatatttctcctgctcgcgtgtgcccactctactctactgcgaccagggccttcagttcgacgagaaccgtgcgatatgcgatctgccggagaat

SEQ ID NO: 41426 - DNA, 1175 bp, DROSOPHILA
ctttcattggccgatacaagtggtattcgatccccaacagcggcaaaaagtattaccaactaacgatgacaggcaaacttctactggccacgatcctgtgcctaatgggcggccaagccttgggcgatgcgattctggaaggaaactacaacgttacggccgtctgcacggcggttaaggtcggaacgcagctgggcagcatcgaatcctgccagacgtactacgtctgccagtccaccggacccgtgcagtcctcgtgccaatcaggctactcgtacgactacaagagatcctcctgctatccaagcagcgaggtggactgctattggggcgttgagaatccctgtgctggcaagaataacacctgggtgccaaacactgccgtttgtggtggatggttctactgccttgagggcaagtcggcgggctccggaaactgcccggtgaaccagaaattcgataccaccacactcgcctgcgtttatggaacctgctccaacactcaaggtactaatgaaaccgtgctagaatcactatgcgatgtcgtgccacctggccaatatttcggcgatactgagagctgctccacctggcactactgcgagtccacctccaccggactcgttttgcagtcgggtaaatgctctgcaaacaatcaaactgcatacaacgtgctcgccaatcaatgtacctacgaaagtgcctccgtctgcagccgtgtgaccaacattccgctgagcgatgccgcagtttcctgctccacgaacggtgccaagtcagccgatcccaaggtgtgtggcacctattatgtgtgcacgaacggcaaaaatgtggccacctactgccccactggcgactactacgacgacagtttagggtactgtgtgtcccgccaggtcgccactccggtggcgggatgcaatcgatgccagtatgctacgtcgacgtttgtaaacgccgtcgattcgaataactgctccacctactactattgcaacagccagggcgaggccactttgaacacctgcccggccgatacattcttcgatgagtcacgtcagggatgcaagtccgacgacgacctgtccacatatgtgccattgaacggagcctgcaaaggagccaccgccgaaggatcagaagaaaccgataatagtacgaccgatgccgaataa

SEQ ID NO: 41427 - protein, 369 aa, DROSOPHILA
MTGKLLLATILCLMGGQALGDAILEGNYNVTAVCTAVKVGTQLGSIESCQTYYVCQSTGPVQSSCQSGYSYDYKRSSCYPSSEVDCYWGVENPCAGKNNTWVPNTAVCGGWFYCLEGKSAGSGNCPVNQKFDTTTLACVYGTCSNTQGTNETVLESLCDVVPPGQYFGDTESCSTWHYCESTSTGLVLQSGKCSANNQTAYNVLANQCTYESASVCSRVTNIPLSDAAVSCSTNGAKSADPKVCGTYYVCTNGKNVATYCPTGDYYDDSLGYCVSRQVATPVAGCNRCQYATSTFVNAVDSNNCSTYYYCNSQGEATLNTCPADTFFDESRQGCKSDDDLSTYVPLNGACKGATAEGSEETDNSTTDAE

SEQ ID NO: 41428 - DNA, 3149 bp, DROSOPHILA
ctgagcgatgccgcagtttcctgctccacgaacggtgccaagtcagccgatcccaaggtgtgtggcacctattatgtgtgcacgaacggcaaaaatgtggccacctactgccccactggcgactactacgacgacagtttagggtactgtgtgtcccgccaggtcgccactccggtggcgggatgcaatcgatgccagtatgctacgtcgacgtttgtaaacgccgtcgattcgaataactgctccacctactactattgcaacagccagggcgaggccactttgaacacctgcccggccgatacattcttcgatgagtcacgtcagggatgcaagtccgacgacgacctgtccacatatgtgccattgaacggagcctgcaaaggagccaccgccgaaggatcagaagaaaccgataatagtacgaccgatgccgaataagcccaattatcgtgaagggctttcaggttggaactcaacggaacaggagtaactgacaacgcgaccctatgtatttaccacttagtattcagtatctaataaatgcaataaaagctatgttcgcaagcaaatcgtggtgattttccttacccaacaagatgtgagaaattcaaaaggagataccttttgcagcatctgaatattctattcttcatgataagttcgaggtttttctgggctcaaaccaatgcttcctaggaaatcatctaaaattattgaaataacagctgatctggctgtagaaagtgtattacttcatgtacatcgttcgaaactggttgattaggatatatttagatgactggtatttttagaagtgagcatatcgcgcgcatcacttcactgaatgatatctaaaaactcaaacattgcgatctgcgcagaatgcaaacacaagttttcgattagctcttacaaatgggtgtggcccatttgaacgaccttataaaagggtcggtcgtgaatcggccgaaccattaacataggtagtttggagtcgcaaagaaccgttatcagaagtaaagggcactattaactacaatgcaatgctcctgggcatatgtcctggcattgagcatctgcttccagttgggagccggtcacgctgtggaccaaagttgggaactgcccaaagttcgacatactgtgggtcacctcagccatgtgagtattgaaatataaacttaatcatttttttttttttgccatctcaaaaagaattgtactttgaacgaaatccattcgttctaattcgcagtagaaggctcttagacaaaattcctactttcagatctgcttgggacgtcaagagggcgatttggtgccacatccgttggattgtaatggatatttctcctgctcgcgtgtgcccactctactctactgcgaccagggccttcagttcgacgagaaccgtgcgatatgcgatctgccggagaataccaactgtcgtcccgtagccactggcactgtggaatccgcaaatggcctggcggataactccgagctcaactggtggccacacaagccgaagcccgtctttgtggccgtcgatgtgaccagtggtcagccggttaatcccatggagaagtacgatccggagcatatcgagtgccgtcactatggagcctacttcctgccgcaccccagaaattgtggactgtacttcatctgcgcctacggccatctacatcgtcatcagtgtgggcgtggcactgcttggaatttcgagaaatccgagtgccagttgagtgatcaggcaatttgctatggggaatcgcagatttccgagccgcatacggatgtggaaaccacaatgaaagttcccacagccaacagtgaaggtgcagtaaccgtttgctatatcgtcggatcgagtgagtacaccaccctgcagcaattccttacgagtccagagatcaccgagttgcctcctgtgacaccaccatctccacctcgagccgaagccaacgccttgacctgcccatccaccaagcagagctacatgtcccatccggaggattgcagcaagtactatatctgcatcggaggaatgccagtgctcacatcctgccccaaaggactcttctgggatcagaagtccggattttgcgagatggaaaagaatgtcaagtgcttccaaaagtgattaataaacaaggggctcttttattttgcaatacagcaagcacactgaattgtataaaaatttgttgacatattactaacattttcaatcaggcaatacttgtatccattaaagaactgtggccatcgttagtctttgccatagaaccgatctcctcttagtagtttctgggctctccttctcaatgatattagttttccagggatagtttataactccgcttgcaattcgatcccaaattgtgacgatatttgactctatcgatttctcatctgccgggcttacatcacctaagatcctttccaatttgcagattagcagcaatgaaaagatcaagtaaaatgaaaatccatttcctctggatgctcgcattttgatacagcgatgatctctaactgatctttgattttatcttctactcgtagtcgcatgtcgaaattcattatcttatcaatagaaacgtttaaagacttttgaaaatgactttacaacagatacagaagacggtggataagatagcaagcgttatttggtttttgcctaaaagttagctatatatttcgcaagattcggtaaaagctcgatttgtgtaatttaacagtaaagaaatatattttaagacttccattaccgaattatgctgctccgcctaatttataagacttcaatccgaatccgcacaaaaactgtatttataagatacaaagtgttaacacatagtaaaaattggtaaataataaattctcattaaaaattcaactttcggagcttttatataactgttggtatttgccaaacgtggacttatccaaagctatgaaacttataacatcaataacttctattaatctatttaaaaattatgattcaaccttctaacccttttgaaataagatcatataataattcaaaatataaggtaggtcaaggcaatagattgccgtatcgtttttcgggctgaactttatttaaaaactcatagatgatgtcatccaatcgg

SEQ ID NO: 41429 - DNA, 1022 bp, DROSOPHILA
caaagaaccgttatcagaagtaaagggcactattaactacaatgcaatgctcctgggcatatgtcctggcattgagcatctgcttccagttgggagccggtcacgctgtggaccaaagttgggaactgcccaaagttcgacatactgtgggtcacctcagccatatctgcttgggacgtcaagagggcgatttggtgccacatccgttggattgtaatggatatttctcctgctcgcgtgtgcccactctactctactgcgaccagggccttcagttcgacgagaaccgtgcgatatgcgatctgccggagaataccaactgtcgtcccgtagccactggcactgtggaatccgcaaatggcctggcggataactccgagctcaactggtggccacacaagccgaagcccgtctttgtggccgtcgatgtgaccagtggtcagccggttaatcccatggagaagtacgatccggagcatatcgagtgccgtcactatggagcctacttcctgccgcaccccagaaattgtggactgtacttcatctgcgcctacggccatctacatcgtcatcagtgtgggcgtggcactgcttggaatttcgagaaatccgagtgccagttgagtgatcaggcaatttgctatggggaatcgcagatttccgagccgcatacggatgtggaaaccacaatgaaagttcccacagccaacagtgaaggtgcagtaaccgtttgctatatcgtcggatcgagtgagtacaccaccctgcagcaattccttacgagtccagagatcaccgagttgcctcctgtgacaccaccatctccacctcgagccgaagccaacgccttgacctgcccatccaccaagcagagctacatgtcccatccggaggattgcagcaagtactatatctgcatcggaggaatgccagtgctcacatcctgccccaaaggactcttctgggatcagaagtccggattttgcgagatggaaaagaatgtcaagtgcttccaaaagtga

SEQ ID NO: 41430 - protein, 326 aa, DROSOPHILA
MQCSWAYVLALSICFQLGAGHAVDQSWELPKVRHTVGHLSHICLGRQEGDLVPHPLDCNGYFSCSRVPTLLYCDQGLQFDENRAICDLPENTNCRPVATGTVESANGLADNSELNWWPHKPKPVFVAVDVTSGQPVNPMEKYDPEHIECRHYGAYFLPHPRNCGLYFICAYGHLHRHQCGRGTAWNFEKSECQLSDQAICYGESQISEPHTDVETTMKVPTANSEGAVTVCYIVGSSEYTTLQQFLTSPEITELPPVTPPSPPRAEANALTCPSTKQSYMSHPEDCSKYYICIGGMPVLTSCPKGLFWDQKSGFCEMEKNVKCFQK

SEQ ID NO: 41431 - DNA, 9205 bp, DROSOPHILA
cacgctcagtgcccggccagctggggggcacttgactgatgtaatctcggtgcattaggcgagggaggaagtcctcgaggacacgtctagggctctctcgcccgctgactcaatctttttgttctcgatgcatcttttcgttggtggttctccatcgacaaagccaagatgcctggttgcctggttgcctagccaagttgcccagttttacccagttggccaccccgccgcaagcaatttatttttgcccggcaaatgccggaacacttttcattgtcctgcaacgccctgcaccgaagcattcaaaacattattctcggcattaagcgcgaatattcagtaattcgatgtggctccaacgttctgggatccattggatgcactgtcttgatggcattgagtcggttgcgcccacgaaggtcttcgcgtgcaacacaatacatttccgcaaggatcttaaaatatacaaatgcgtatccgcagtacgtccagcatggctttttatagcttatggactggataaaaaacaaaaagcttagctcatcgacatccagattacttttagatttatgctctggctataaatcagtcatcttggtttctctgcattgcatttataagaagatttaatccggtttaaaaactgtcctacacttttcatactatttttaataaagcattttttaagggcacgcccttcctttatttattttttttgtagctatatattgatttcaaccataaaagaccacacatttaaattgcactcttcattcaaataaaaccgaaccggaattggcgtcagcatatgaaaaacaatatgtgaaaagcccttaataacgcgaataaaatttaattatgaatatctgtctcacgcttcaatgattgcacccagactcacagatttcgatcccattttccgttccagctgaaatcgaagagtctcacgcacttggatggcctcgactcgggtgtggtggcctgccagcaaggtcctccgggaatggccaccagcaccgccagcaccacagccaccacagccggcggcaccggcgcgaccaccggattgttcgccaccactggagccccaggatcgctgggccggcaggccaatgtggtaagtgcaagtggtcagggaaccgatggcgaggtggagggcacatgctagtctatcggcccactgctaggacttggcggccacttagtcagcacatccatcttgcctggacagcgttcactgcgagaaaaactatgatttcaaatcaagaattcaaattgtcgaaagtagatcaattaaaaataataataagataagtactctctacattggatattaggtttatgggaaagttttgtgtagatatgtcaaataggaacttggatttgaaatttcataaattaagcaaatttaaatataaaaaaatgtttctgagaattgaaaatattgaaaaatatatacatatagtgtatattgtaaaattgtaaaacgggaaatattaaattaattcttgttaactgaatgaggatcttctaattccaataatatcataatacatttaaaatcttgattttagattacagttattcctcgtgtagtgtgtaggttgtacagtgtagtttgttttcactgtatgttcactattcctgggttttagtccctcgagtgaaagtcctttcgcaaattgataacaaattactttgcttgctgctttggtctgtcatggatttgtgtttattttgatttcttttaactatttctcttctttgtgttgctgtcattgatttaagcacagtcagttgttttttactttgcactaacttgttgtacttgttagttactggatttttgttgtctacttaaaccgtacgtgactttctgcgctgttcgccctttttctttgaattttacgtttaatttatgtttcaaagttggaatgaactctaggcgttgatattaaaagatttaaaaactgttacaagcgtagctcatgtaagatctgacttacgaatttattttgtagcgcaaataactctctaatatgatacaattttctgcattataaggatattattaatgttactattgcactgttggtaatagcttttgtagcttagtatttcctaacaattggccaaacttggtagatttgcactgtagtagtacatatggagtacattgagaattaacgaccaaacaaaatatgctcacaatatctgccttctcctctctgttcttctctctctttctctatctctctctccctctctcccccgctgtttctatataatacctaaatgggctaaataaactttggtttttatttgtttgctgaccgctaaaacatcccgctgatacccaaaaacaaaatctcagactgagaagggtgaacgaacgggcgtttgcctgtcaccctcggcacctcagccctcctcgcacgcttcaccgcaccacccacccacaatttacacgcaggcaccgcaggtcgtgcggcggatgccttcgctgatgctctcacccactctcgatgaaaccacgacgacggccagttcgtcctgctttggtaccggtcaccccagtgccggatcctttcaccagcaccagcaccatcaccatcatcatcaaccgactggtagcgtcagcaccgccagctgcaccgccacctccaccacgtctactcatgctgtaccctcctccaaacactttcagtctgttggcgaggcggcggccacatcatcgtcctcgacgctgagtccgcacagtgctacatccgcgaccttaggcggcggcggaggtggtggcggtgcaggcggtggtggtctaacctccccggttggctgctccacgtcctccggttcgacggtgaaaaagaaatcctcgttcatgaagcgcaagaagccactgctgacgcgcagcgaggtgagtgggtatcaaatgaatcaactgaagcccttgattcacctggtcaaaagacaaacagatctcgaatggctgcacaattagaaggtcctgtcacctcagcgagaaataagcctgcagttaaggatggtgaattataattggcgatggtgacaactgttggatggggcgggggaatgtacatttttaatttctttatttgcctttgtcgccgtaatcagcaaaagttgttctagagcttttccaactatcctttcctttttcctttttccattttttttttccttttttggttttccactggcctccaacgcttttctgtcacttgacgagcaagaattccgcctcgtttccgaccaacacaaacacgaagaatattccttgatgtttggttttttatttgcagtagtttttgtgggcagatgggatgcagaatcacctacatcccattcccacgcggcctccagatgcaatcttcacacttcggaggggccatcaaagagagtgctacgtggcttcgtcgctggtaatttttgccagtgcatctctttttggtcttttcgaaggctagattgaagggtccttcattttgggttcggtccatgaattaacagattgggttctgcttcaataagatagctcttattcaaccacttaacgctcgaccattcatttgtttaggtatccagttccgagttcttttccgtgtcattctgcttggactcgtcgcagcaaccagatgaggagttcattccggcaaccaaaggcgtgacactactgtgagtccctagataatgcgcttcaggatatatgtagaacaatgatttaaaatccatccatccacacttttagtaatgcactcagccacgccttgcgtaggcggaacctcagctttacacaaatcaccattacggacaataatcccacgcccagttttttagatgcaggtatgacgtttgcgctgagctccctcggatccattaccattttgagcttgttttgttccgtttttcccgtaaggtccttcgctcctgcccgtttccgtggacgagcagaccgatgtggagagcctggctggacaccatctttgcatcacagaacgaggcagcaaccgcaagcccctgcaaaaggcagcttcctttgtaagtttagaaacgggatggacgtcatgctttgtgggaacaccgtcgtaacttaactgacctgggatcaaataaagttaaagctaatgaaaagggtcctgccatttaataatcttaatatccgctgggctaaaaatgtcgctttgagcttatgaatttgaatgcatttcaattttccctaaaagaatgtgacaacaaatactactaaagtagataaacacataacatgtataatacggttaaatctcgtcaaccacagggttcccgacaaccaccgccccgactcctgccctccgtctccaccgaggagacgagcgagtcgggagtggcgcctggaaagcagatcaagcagcggtggtcctccatattcggaatcaagaatccccagcagagccagctgtgcgagctgctgaacagctatgccaagaacggagtgccccagcggccggacagcatgagctttgatcatccggacctggtcaactctttggcctatctgcagtatatgcacaaatcgtggcgggactttgttaatagcgattcgatgagcgagtcggaggtgaagatccaaacggccatatgggagctggttaccaccgaggtgtactacattcacgccctgcaaacagtgactgatgtgagtggacagactttgaattccatccctgaagtagctctgatctttgaatgcatttgcagttgttcctagcctgtttggaggccgtgcaggaggagggtctgctgatcgacgtggaccaggctcgactgttctccaatgtgagggctgtgtgcgaggcgaacatcaagttctggacactgtggctctatcccatggtggcacacagtgccatcacccacgagccactgagatgcgctttttttcaggaggggttcctttccttcgcctccatttttgcgccatataaggtgagtcttgaaaacgaatattcttgcacatattactgatgtctctgggaaatcctttgcagatatactgtgcggagcagagcacctgccagttctactgcaaggagctaaaccataacaatgccttattcacctcctacttggcgtggtgcgagtcgcagaagatgtgcaaccgcctgcgactcgcggacattgtggtgcgacccatgcagcgactgaccaagtacagcctcctcctggccgctatcaagaagcacatgagcgacgtagaggagatcgaggccatcgacgtcatgatgcacagcgtcgagaactttgtgggcagtgtgaacaaccacttgacgatgcggcaggagaacgagcgactcaagggcgtgatggtgcggatcgagtcctacgatgtggtggtgagtcaaaggatttctcttcatttacctttaccatatttgcttcacaatccttgcaggacaccaacaacgaggtgctggacaagatgatcaagcagaacagccaaatgtttgacctctgtgctccgatgcgcggatgcccggcctaccatgtgcgccacctgttcatggagggcgatcacaagttcaaggacaacctcggcaagtccgatgtgcactgcttcctgctcacggatctcctcctggtgtgcaagacgatcgccaagcggggactgggcgctctaaaggtcatccggcagccgtacctgaccgaccagctaattgttcagctggcgccgaacaatacactgaactgtgtgtacctcaatgagttccaggtggccaccacggcgtttacgctgcagtgcaccgaggccaagaactggtacgacgccctgtggcgggccaagacgatctaccaaagactgaagcgcggaggcggtggcggcggcagcggaagtggaactgtgggcggcggcgatagcttccgtttcggtggaagtgccaccagcggcggcaccgccgactccctgggcgtacgcaagtcgccgatgaactcctccatctgtagccacgtctctagtgcgaacaacagccacagcggcagcgtcgagtggaacgactcccgcaacatatccgtcgactttgaaaagacaaactcggtgtccagcgacgagggctccagcataatgacaggtgagcgagtaatcaggcttctgatacccaggttcatggttattgggatatatatttttaagaaatttaaaaggtctagaaatagaacgattactaactaatcatatattttcgtaacttttcacaattgcaggcaaccacggagtgaacctaaagggcaagcagcaattgatcagtggtctgcataagaccaagatgggcattatcggccagatgggctccaaatcggcgaacacgctctccgtgcagccaatgaaccatctgggccagagcctgcccaacctgaacatgcatcacagccacacgtaagttgcgtagagggtgcacgaccaacaccaccaccaccaccgccactgatcatgaccagcttttaacaaaatcaagctagcacacaccaataaaccactcacatagctcaccagatccctagatcaccagatcaccagatcaccagaccaccagatcaccaattcagatccctgcccagtcatgtgtaagcgttcgcagggatcggtttcactctgtttatgttgtaccatactctacatttagtcatcatatttatacactgtttttagctagtacctactgtagtcatattttatatattaaaaccaaaagcaagaaaataaacatttttattgtgaactgtacgacttggattcatgactaatcaccaccagccactccaaatatcatttgttctaataatataacttgtatttaatatgtcaagatataaatacccttttaatgattctcttgggtgtgacctaaaagtagaagtcaaaacatcagaaacttttaatttattgtgaatttaacaccattattatttgagtcttattccggtttgcgaaccaaatccacttcagtccgactcctgaaataagaggcatgaagtacaatgcctagttttttaatgttcactccaccaagttaaaagaaagggtattacatacttcggcttctgcagctatgattgttttcttttgtttcttgtgactgctgcattgcgttttagttaggggcaacacgcctattatccttttaacgtcaccgcccactgcccaccgcttgagtttccgcttccctagttccgacaccggatccgaatccggcagcctgtgctctttacagtataacctttgtcctacttgtagtaacaatactctgctcgtgcccggctccacgacgagccactcgggcaacatgttgttgtcgcccagccaccgcggcatttcctacccgccgccgagcccaacgaggtgagtgtctctccgtagagattagagtcccccaagtgccacgtctgtgtgtataacctgtgtctttgtccttcgtctttccccttccaaaatccaaaccaaacgaaaaatacaaaatataacgtgcgacgtcgtgtttatccacttgtgcatcgtcctcaaatcgatcgatcccgatctcataacccacatcctgcgcctcatcgcaatcgctctgccctgtgaccaccgccatgtgaccgccatcgactaaccaatccaccgttgctaatgcgtgtccttcgtcctgttgtctccgtggctcccgcagagttcccctgcgtcgtggcatggccttctccacgtcgacgaagaacccgccgctgcgcaagacccgcaatataacctcccagaacagtattaactggcaccagatcccggccacacccacgccgcccagccctagatcgcagtaccagtcgccaggagtggtgtgcatgcagaaatcgctgcccctgctgctgcccacaaacacggatgagggtcaagggcccacccagccaccgccgccgctgcagaagcagctctcccaccaggcgcctctgcccaccaccattcacaaccagtcgagcaccgaaacggacgtctgataaggacgacttggcgggagcacgacgccgcgagacgtacttagccatagatccgtcacaaactaccaggataaactacacgtacatacaagatacatttagaaagtcgcctttgatttccggctcgcactagcacaaatatttacttattttatccatatagagactagtgatggttagttttccaattagtttaatcattaccagagcacataaaagtaaagaaagaaattgaataaacaggaaacgataatgagtgaaaatccacggcgactttctagatattcaattaggatttcatgagcttgtaggacagcgtgagcttgatacgtgaaaactgcacttttgggtccaaagctgatattgaacttttatacattccataactgactaagtccccaatcttggcgagattacatttcaaaacataacgctccgcacagtcaccattttaatcttcccataacgatatgaagacaaataaagttaaacgaaactaaagttagatgtacttgtacttgttaccatagaatacgcatagtgcgaatgccatatatagcgaaacatacctagatcgatcacaagctttatgaatacttacttactactgtactattgatgtaagtcgttactttccttgagtagttaaatcaaatgttacggtcaaaataaaaaagaataaacagaaaatttaaacatgtcttactggctgcccattgttgtctgcatgtattatagaccacgcttttctaatttaaaatgttacaaaaaaatatattttttcatacacgagtttatgttgtaatctgtactcatcttactgctggttcagacctaattaaaatataaataattttatgtactgcaaatggtattccttagtttccatttccttggatagaaaactagagtagtttgaaattattgtaacgaaaaagtttgtataccaatatagagtattagccgatcttcggtcaaaggatgtatagattatattgtttactttagtagcaagattaagtatcctgtagtcttcttccacaaaatgcaagtggtgaaatctgaagaacacactttaacacgatttatttaagtaagacagaatggattactaaatctagattattatccgtcggttaagctgcatggatatgggtgatactgctttatttgagtttgc

SEQ ID NO: 41432 - DNA, 3444 bp, DROSOPHILA
ggaatggccaccagcaccgccagcaccacagccaccacagccggcggcaccggcgcgaccaccggattgttcgccaccactggagccccaggatcgctgggccggcaggccaatgtgactgagaagggtgaacgaacgggcgtttgcctgtcaccctcggcacctcagccctcctcgcacgcttcaccgcaccacccacccacaatttacacgcaggcaccgcaggtcgtgcggcggatgccttcgctgatgctctcacccactctcgatgaaaccacgacgacggccagttcgtcctgctttggtaccggtcaccccagtgccggatcctttcaccagcaccagcaccatcaccatcatcatcaaccgactggtagcgtcagcaccgccagctgcaccgccacctccaccacgtctactcatgctgtaccctcctccaaacactttcagtctgttggcgaggcggcggccacatcatcgtcctcgacgctgagtccgcacagtgctacatccgcgaccttaggcggcggcggaggtggtggcggtgcaggcggtggtggtctaacctccccggttggctgctccacgtcctccggttcgacggtgaaaaagaaatcctcgttcatgaagcgcaagaagccactgctgacgcgcagcgaggtatccagttccgagttcttttccgtgtcattctgcttggactcgtcgcagcaaccagatgaggagttcattccggcaaccaaaggcgtgacactacttaatgcactcagccacgccttgcgtaggcggaacctcagctttacacaaatcaccattacggacaataatcccacgcccagttttttagatgcaggtccttcgctcctgcccgtttccgtggacgagcagaccgatgtggagagcctggctggacaccatctttgcatcacagaacgaggcagcaaccgcaagcccctgcaaaaggcagcttcctttggttcccgacaaccaccgccccgactcctgccctccgtctccaccgaggagacgagcgagtcgggagtggcgcctggaaagcagatcaagcagcggtggtcctccatattcggaatcaagaatccccagcagagccagctgtgcgagctgctgaacagctatgccaagaacggagtgccccagcggccggacagcatgagctttgatcatccggacctggtcaactctttggcctatctgcagtatatgcacaaatcgtggcgggactttgttaatagcgattcgatgagcgagtcggaggtgaagatccaaacggccatatgggagctggttaccaccgaggtgtactacattcacgccctgcaaacagtgactgatttgttcctagcctgtttggaggccgtgcaggaggagggtctgctgatcgacgtggaccaggctcgactgttctccaatgtgagggctgtgtgcgaggcgaacatcaagttctggacactgtggctctatcccatggtggcacacagtgccatcacccacgagccactgagatgcgctttttttcaggaggggttcctttccttcgcctccatttttgcgccatataagatatactgtgcggagcagagcacctgccagttctactgcaaggagctaaaccataacaatgccttattcacctcctacttggcgtggtgcgagtcgcagaagatgtgcaaccgcctgcgactcgcggacattgtggtgcgacccatgcagcgactgaccaagtacagcctcctcctggccgctatcaagaagcacatgagcgacgtagaggagatcgaggccatcgacgtcatgatgcacagcgtcgagaactttgtgggcagtgtgaacaaccacttgacgatgcggcaggagaacgagcgactcaagggcgtgatggtgcggatcgagtcctacgatgtggtggacaccaacaacgaggtgctggacaagatgatcaagcagaacagccaaatgtttgacctctgtgctccgatgcgcggatgcccggcctaccatgtgcgccacctgttcatggagggcgatcacaagttcaaggacaacctcggcaagtccgatgtgcactgcttcctgctcacggatctcctcctggtgtgcaagacgatcgccaagcggggactgggcgctctaaaggtcatccggcagccgtacctgaccgaccagctaattgttcagctggcgccgaacaatacactgaactgtgtgtacctcaatgagttccaggtggccaccacggcgtttacgctgcagtgcaccgaggccaagaactggtacgacgccctgtggcgggccaagacgatctaccaaagactgaagcgcggaggcggtggcggcggcagcggaagtggaactgtgggcggcggcgatagcttccgtttcggtggaagtgccaccagcggcggcaccgccgactccctgggcgtacgcaagtcgccgatgaactcctccatctgtagccacgtctctagtgcgaacaacagccacagcggcagcgtcgagtggaacgactcccgcaacatatccgtcgactttgaaaagacaaactcggtgtccagcgacgagggctccagcataatgacaggcaaccacggagtgaacctaaagggcaagcagcaattgatcagtggtctgcataagaccaagatgggcattatcggccagatgggctccaaatcggcgaacacgctctccgtgcagccaatgaaccatctgggccagagcctgcccaacctgaacatgcatcacagccacacttccgacaccggatccgaatccggcagcctgtgctctttacagtataacctttgtcctacttgtagtaacaatactctgctcgtgcccggctccacgacgagccactcgggcaacatgttgttgtcgcccagccaccgcggcatttcctacccgccgccgagcccaacgagagttcccctgcgtcgtggcatggccttctccacgtcgacgaagaacccgccgctgcgcaagacccgcaatataacctcccagaacagtattaactggcaccagatcccggccacacccacgccgcccagccctagatcgcagtaccagtcgccaggagtggtgtgcatgcagaaatcgctgcccctgctgctgcccacaaacacggatgagggtcaagggcccacccagccaccgccgccgctgcagaagcagctctcccaccaggcgcctctgcccaccaccattcacaaccagtcgagcaccgaaacggacgtctgataaggacgacttggcgggagcacgacgccgcgagacgtacttagccatagatccgtcacaaactaccaggataaactacacgtacatacaagatacatttagaaagtcgcctttgatttccggctcgcactagcacaaatatttacttattttatccatatagagactagtgatggttag

SEQ ID NO: 41433 - protein, 1086 aa, DROSOPHILA
MATSTASTTATTAGGTGATTGLFATTGAPGSLGRQANVTEKGERTGVCLSPSAPQPSSHASPHHPPTIYTQAPQVVRRMPSLMLSPTLDETTTTASSSCFGTGHPSAGSFHQHQHHHHHHQPTGSVSTASCTATSTTSTHAVPSSKHFQSVGEAAATSSSSTLSPHSATSATLGGGGGGGGAGGGGLTSPVGCSTSSGSTVKKKSSFMKRKKPLLTRSEVSSSEFFSVSFCLDSSQQPDEEFIPATKGVTLLNALSHALRRRNLSFTQITITDNNPTPSFLDAGPSLLPVSVDEQTDVESLAGHHLCITERGSNRKPLQKAASFGSRQPPPRLLPSVSTEETSESGVAPGKQIKQRWSSIFGIKNPQQSQLCELLNSYAKNGVPQRPDSMSFDHPDLVNSLAYLQYMHKSWRDFVNSDSMSESEVKIQTAIWELVTTEVYYIHALQTVTDLFLACLEAVQEEGLLIDVDQARLFSNVRAVCEANIKFWTLWLYPMVAHSAITHEPLRCAFFQEGFLSFASIFAPYKIYCAEQSTCQFYCKELNHNNALFTSYLAWCESQKMCNRLRLADIVVRPMQRLTKYSLLLAAIKKHMSDVEEIEAIDVMMHSVENFVGSVNNHLTMRQENERLKGVMVRIESYDVVDTNNEVLDKMIKQNSQMFDLCAPMRGCPAYHVRHLFMEGDHKFKDNLGKSDVHCFLLTDLLLVCKTIAKRGLGALKVIRQPYLTDQLIVQLAPNNTLNCVYLNEFQVATTAFTLQCTEAKNWYDALWRAKTIYQRLKRGGGGGGSGSGTVGGGDSFRFGGSATSGGTADSLGVRKSPMNSSICSHVSSANNSHSGSVEWNDSRNISVDFEKTNSVSSDEGSSIMTGNHGVNLKGKQQLISGLHKTKMGIIGQMGSKSANTLSVQPMNHLGQSLPNLNMHHSHTSDTGSESGSLCSLQYNLCPTCSNNTLLVPGSTTSHSGNMLLSPSHRGISYPPPSPTRVPLRRGMAFSTSTKNPPLRKTRNITSQNSINWHQIPATPTPPSPRSQYQSPGVVCMQKSLPLLLPTNTDEGQGPTQPPPPLQKQLSHQAPLPTTIHNQSSTETDV

SEQ ID NO: 41434 - DNA, 4297 bp, DROSOPHILA
tatctattaaagtatttatcaaatggaattcatttagcgaattcaaagaggaattcttaaacattttcttttaaagaatttagcaaagatcagagcataaaaaaaactcgaataataaagtataatatatatacagattcataaaaaattggaaagtgatggaatgttttcaatatatataagttaatcgtggcagtttttcaattgtgtgctcaattctgccaattaaattatgatttttgggaaggcttagtgggaaattagtaattcatagtagcacaaagccggtggcacagaaatttgcttaataaataaataaggaatccgcactacattgtttcgggtttaatccctgcaccatcgcatggcattgggtcacatatcgcaccttctccagcatttgctcgatctcctccgacagcgaatcgaagacgtgctcgcccaggagcggcgatgtgtcaacgcctcctagtcctccacttccacctcctccactgccagctccgattttgctgaatgccaccagcttcaggtcgatctcgttttccaggctccgcgcctgcttcctgagcactgtgcgggaggtcgagaggagagatagcttatatggaaggtaaccattaagtcccactgctcaccatcgtagctggatcctcccatttgtcaaaaatagttttcctttatttgttcgactttcgtgtggcaatcggtgtgaccaggtcaggcggggcccaagtggaatgagttgagagtatcgggaaagattaatagccagatttaatctaggccctacttaatgaacaaatgtttacgagaaaattaaattgtcctaataacttaatgttaatgtaaaaggaaaaagtacaatgttcttttccagcccttgtgtgaacaggtccataccggcagtcatcaaactttggtcacactgccgtgcacagcgttttgttgccggcgatttgtaaaaaagtttgttattgattacattattttagacatcatgacgcaggcaacaggtgatgcacgcatgccagacgaggaaagcgacctgctgcagatcaagccactgtaaggaatcttgatttaaaccagatagaagctcaagggtaacgcttatatttcagtggtgctggccaggaagtgggacgctcctgcatcatgttggaatttaagggcaagaagataatgctggactgcggaatccatccgggattgtccggcatggatgccctgccctacgtagatctaatagaggcggatgagattgatctgctgtttatatcacagtaagtactgcggcgattaaatgggcattgaacttttaatggtgaatgcttatatttatcagtttccacttggatcactgcggtgccttgccttggtttctcatgaagaccagctttaaaggccgctgctttatgacccatgccacgaaagccatttaccgatggatgctgtccgattacatcaagatcagtaacatatccaccgaacagatgctatacacggaagccgatctggaggcctccatggagaagatcgagacgatcaatttccacgaggagcgcgatgtgatgggcgtacgcttttgtgcctatattgctggtcatgttttgggtgccgccatgttcatgatcgagattgctggcatcaagatcttgtatactggtgacttttcgcgccaggaggatcgacatttgatggctgccgaagtgccaccgatgaagccggatgttcttatcacagagtccacctacggcactcacattcacgagaaaagagaggatcgagagaatcgatttacctcgctggtgcagaaaattgttcagcaaggcgggagatgcttaattccagtatttgctttgggccgtgcccaagaactgctacttattctggatgaattctggtcgcagaacccggatctgcacgagattcccatctactatgcctcctctttggccaagaagtgcatggctgtctaccagacgtacatcaatgctatgaacgatcgaattcgacgacagatagctgtgaacaatcccttcgttttccgccacatttccaacctgaagggtatcgatcacttcgaggatatcggaccctgcgtaatcatggcgtcgccgggtatgatgcagtcgggattgtcgcgagagctcttcgagagctggtgcacagatcccaagaacggagtgattatagccggttactgcgtggagggcactttggccaaagccgttctctccgagccggaggagatcaccacactgtcgggccagaagctgccgctcaacatgtccgtcgactacatatcgttttcggctcacacggactaccagcagaccagtgaattcatccgcctactaaagccaacgcatgtcgtgctcgtccacggcgagcagaacgagatgtcgcgtctgaagttggccctgcagcgggaatacgaagcagatgcaagcacggatataaaattctacaacccgcgaaacacacatgccgtggatctttatttccgtggcgagaaaaccgccaaggtgatgggaagcctcgcagccaagaactcggaggtgggaagcaaactctcaggtgttctggttaagcgcgactttaagtaccacctcttggctccttctgatctgggcagtaagtaatagttagttagtttctttgtaaaaatgtcgattcatttaaataattcccacagaatacacggatatgagcatgtctgttgtaacccaacgccagtcgattccctggggcagctcgctgagcactctagagctactgctggatcgcattggagccggatgcgttgaggtgctggaggcggagcgaaagctgcgcgtgttcggctgcatcgagctaactgtggagcagaaaatcattgtgatggagtggcaagcgacgcatgtgaatgatgtgtacgccgatgccgttcttgcctgcatcatgcaatcggagttgggcggaacaaatctgaagggtgccacaaagcaaaccaagtcagaggactcgcgctttcgggagtgcctaatcgagacgctacaggacaccttcggcgacaactgcgtgccaaaaatgttcgagggcgatctgctgccagtgacggtgagcggtaaacgtgcggaaataaatctggaaaccctggtgagtgttcgtcgaaggtgctttttaaaatcgaaaaatatcgttaatctacaatctttccaggccatcagctgtgccgaggatgatgtgctgcgacaaatgctcaatacgacggttcagaagttacaccagaccctagtctccgctctttgaaaaccattctattccgcttaataaatctccttgtgttgaaatgttctttttattaattgattcaatgttgaaagtactatagtatgcatgagcgaaatggtgatttttcatttgtttcagccagagtagtttcagcgctgggtactcttcgcaatctgctctttgagcatgacaatactgacccgttgctcggagggcagctgcgcaatctgttcgtcggacagctgcagtacctgcatgatgagggcagccttctcctggtcggaggcatccgagggcaggactccatgggcgcctagtctgctctgcaactgctgagcggccgcctgctgttgttgtgtcggtggcggcgcttgggggattccttgtggcggcgcctgctgctgaggaccaggtcctgcccttaacctgggatccatgggacgctggcgcggatcgctgggatagggggccggtggcgcctgcggaacgccctgctgctgctgtgggggcatctgggcacgagctcggggatccatcagcggcggtggcactggattgggtagagaagctcgcaaatcctggtccatgccacggcccatcatcctgggatccatcggcatgggtccacccggcaccatgcgcaaatcgatatcgttcggatggacattggccgggaagccaggtccgggaacgggcattggtggctggggagcctgttgctgttgctgcgggatctgcacctgctgttgcggaacctgttgctgacccatcatggtgtgattccccggcccctggtgcggattgccgcccaagacggggggcatttggttggccttgaagagcatcccgagcgcctgctgagggtccacgatcctcataaccaccatggcctggagcaaagcgtacgccaactgaggattgagcattagcatctggcgtgcctccgatggattgctcacgatgcagagcttcatctgcttcatcagctcgtacatttgctccggcggcaaggaagcca

SEQ ID NO: 41435 - DNA, 2118 bp, DROSOPHILA
atgacgcaggcaacaggtgatgcacgcatgccagacgaggaaagcgacctgctgcagatcaagccacttggtgctggccaggaagtgggacgctcctgcatcatgttggaatttaagggcaagaagataatgctggactgcggaatccatccgggattgtccggcatggatgccctgccctacgtagatctaatagaggcggatgagattgatctgctgtttatatcacatttccacttggatcactgcggtgccttgccttggtttctcatgaagaccagctttaaaggccgctgctttatgacccatgccacgaaagccatttaccgatggatgctgtccgattacatcaagatcagtaacatatccaccgaacagatgctatacacggaagccgatctggaggcctccatggagaagatcgagacgatcaatttccacgaggagcgcgatgtgatgggcgtacgcttttgtgcctatattgctggtcatgttttgggtgccgccatgttcatgatcgagattgctggcatcaagatcttgtatactggtgacttttcgcgccaggaggatcgacatttgatggctgccgaagtgccaccgatgaagccggatgttcttatcacagagtccacctacggcactcacattcacgagaaaagagaggatcgagagaatcgatttacctcgctggtgcagaaaattgttcagcaaggcgggagatgcttaattccagtatttgctttgggccgtgcccaagaactgctacttattctggatgaattctggtcgcagaacccggatctgcacgagattcccatctactatgcctcctctttggccaagaagtgcatggctgtctaccagacgtacatcaatgctatgaacgatcgaattcgacgacagatagctgtgaacaatcccttcgttttccgccacatttccaacctgaagggtatcgatcacttcgaggatatcggaccctgcgtaatcatggcgtcgccgggtatgatgcagtcgggattgtcgcgagagctcttcgagagctggtgcacagatcccaagaacggagtgattatagccggttactgcgtggagggcactttggccaaagccgttctctccgagccggaggagatcaccacactgtcgggccagaagctgccgctcaacatgtccgtcgactacatatcgttttcggctcacacggactaccagcagaccagtgaattcatccgcctactaaagccaacgcatgtcgtgctcgtccacggcgagcagaacgagatgtcgcgtctgaagttggccctgcagcgggaatacgaagcagatgcaagcacggatataaaattctacaacccgcgaaacacacatgccgtggatctttatttccgtggcgagaaaaccgccaaggtgatgggaagcctcgcagccaagaactcggaggtgggaagcaaactctcaggtgttctggttaagcgcgactttaagtaccacctcttggctccttctgatctgggcaaatacacggatatgagcatgtctgttgtaacccaacgccagtcgattccctggggcagctcgctgagcactctagagctactgctggatcgcattggagccggatgcgttgaggtgctggaggcggagcgaaagctgcgcgtgttcggctgcatcgagctaactgtggagcagaaaatcattgtgatggagtggcaagcgacgcatgtgaatgatgtgtacgccgatgccgttcttgcctgcatcatgcaatcggagttgggcggaacaaatctgaagggtgccacaaagcaaaccaagtcagaggactcgcgctttcgggagtgcctaatcgagacgctacaggacaccttcggcgacaactgcgtgccaaaaatgttcgagggcgatctgctgccagtgacggtgagcggtaaacgtgcggaaataaatctggaaaccctggtgagtgttcgtcgaaggtgctttttaaaatcgaaaaatatcgttaatctacaatctttccaggccatcagctgtgccgaggatgatgtgctgcgacaaatgctcaatacgacggttcagaagttacaccagaccctagtctccgctctttga

SEQ ID NO: 41436 - protein, 705 aa, DROSOPHILA
MTQATGDARMPDEESDLLQIKPLGAGQEVGRSCIMLEFKGKKIMLDCGIHPGLSGMDALPYVDLIEADEIDLLFISHFHLDHCGALPWFLMKTSFKGRCFMTHATKAIYRWMLSDYIKISNISTEQMLYTEADLEASMEKIETINFHEERDVMGVRFCAYIAGHVLGAAMFMIEIAGIKILYTGDFSRQEDRHLMAAEVPPMKPDVLITESTYGTHIHEKREDRENRFTSLVQKIVQQGGRCLIPVFALGRAQELLLILDEFWSQNPDLHEIPIYYASSLAKKCMAVYQTYINAMNDRIRRQIAVNNPFVFRHISNLKGIDHFEDIGPCVIMASPGMMQSGLSRELFESWCTDPKNGVIIAGYCVEGTLAKAVLSEPEEITTLSGQKLPLNMSVDYISFSAHTDYQQTSEFIRLLKPTHVVLVHGEQNEMSRLKLALQREYEADASTDIKFYNPRNTHAVDLYFRGEKTAKVMGSLAAKNSEVGSKLSGVLVKRDFKYHLLAPSDLGKYTDMSMSVVTQRQSIPWGSSLSTLELLLDRIGAGCVEVLEAERKLRVFGCIELTVEQKIIVMEWQATHVNDVYADAVLACIMQSELGGTNLKGATKQTKSEDSRFRECLIETLQDTFGDNCVPKMFEGDLLPVTVSGKRAEINLETLVSVRRRCFLKSKNIVNLQSFQAISCAEDDVLRQMLNTTVQKLHQTLVSAL

SEQ ID NO: 41437 - DNA, 2921 bp, DROSOPHILA
aaactgcgccgccactgaactcctattgtgatatccttctaattggaaaagttgtcgcacacctaaaattagtttcgtttttaattggttttgtattgacaagaatttaattaggctgtcaaaatattaatttcttaaaattaaattcaaattttatttagattatctattaaatacaatacaacaatgtaaagcctacgtttaatatttgagtcaattaggttgctaaattttgagtaagtttcttacattgttgcataaaacattaaacaatattataatattttcgctcatcggtcacactgtctatgaccaaagagcgcgatcagcggctgaatctgattaatactgttctatctcgataaagttaaccacattcattagaagttcctgggactaaagattaacatcttcacatataatcagctgtttaaaatcatatttataactatataatctgtattagcaatacccgttctttattgataaaacaatttccttaaaatttcacattgaaaaccagttcaatatattaaatgaggtcgaatattttattcactcttgccgtattatcgagtgttcactgtttggagcgaccgcttaattagattctctctgtacatacgtacatgcatatgtacatatgtgcgataagaaaagttaaaaacaaaaacagctgtaaaactcgatcgacaaataaagtgcaaagcaggtgaaaatcgaatttttgattagattgagctgaaaaactagaacaaaatagccggcacccaaaatcattggctatagcggagctccaaagttaatattaataattttaagttaagcaaggaaatgacagattttcagtaaaaaaataatttagaatatatgaaatattgattatacttactttacatgtagaaagtaccaacatcgaaacactaactttaacaccagaacgacctcattaatgaatagaaagtaaataatttttgagtgaacaaaataccagattaagatgacccaagtgaaatctgtactttgcgtgggttgcacggtgattgacttcgtgaccatcaatgggagctatcctatggaggacaccgatcggcgatgcctggatgggttctggcaacgtggcggaaacgcctctaatgtgagtactgtgctccgggttcttggatgcaaggtggacttctttggaatgctcagcaggtcggatggattccgagtgcttctcgacgatctctcgaagcgggaaatcggcacgaatgactgtcccttcacggacagggatccgccattctcctctgtgatcctggctcaggattccggcacccgcaccattatccactgcaataaggactacccgcagaccacctatgaggacttcagcaagataaacctttcgcagtatggatgggtacacttcgaggctcgcaacacgccgcacaccttaaagatgatgcaaagcatccgggagtacaaccaaaggaccggacaaggcatcattatctcgttggacttcgaaacgaggtatgaacaaaaccaggaattgtgtgcgccctgcgattttgtggtcttctccaaggagctggctggtcagttgggttggaagacaccgcggcagtcgtgcgaggagttggcctccaaaattcccgaaggtggtccaaagcctgtcttcatttgtccctggggaagcgccggagctggagctatggatgctaatggaaactactatgaaatgtcgtcctataaacaggacaaggtagttgacacgctgggagccggggacagtttcatggcgggattcatctacgccaccctcaaggctcgtcgaagtctagcggaggctgttgactttgccaaccgagttgccagtcacaaaatcactggattcggctacgaacacatttcccagcttagcttaaccaagtaaatattggtttaattctagcttagattaagtcacattgaaggaatttattaagataaaagcctggcaacaaaaatagcaaattgcattaaatattatattgattgttaaacagaataaactaatacgtgcatcacgctcaattatgaatgctttaaaacatatgtaaaacattttttgatttatatgattaaatgatgacatctctcgaaatagttaaaaaatcctttacccaaaaatgcaatcggattggaaatgaacagcgcttatgtattctcacaaattttataaacttgtcaaattcattattgtatattataattattttcgtgatcattgattaggcaaggagtttcttttgttggtctggagagactttatattgaaatcgtaaatcaagagatatcatggcaggatgcgtctataggtcctctgctcttttttaatagttgtccagttgggagcctctcgttgttgtctatgtgtatttaatgaagtcacctcgctggtcgtccatatccgaaccaatggctgaggcgttgattccgatgccgctcgaggcgcttccggatttttgctggctgtttaggccctcaattagctggttttgaggtgttaatcggttaatctttatcaacccctttaaaatcacaaatatatcttaccttcgatcgcaggcgctttagtttgcgcaatcgttctagccaattcgatgcgtacggatgctttttctgcacactttggtagactagcgacgcgagctgtaattgattggaattaatgaaaatcgcagttagcaatagatcctatgcttacattggcgtgcagcgccatctgtcgggccaaaagaggagcactgcgatcggacactatccggtattctgcgtggcacacgaatttcgaaatctccgatcgcgccttcacatacaccctgttcgagttcaggtcaagtggctcaacgatcacgcaggcgtagttgaattggccctgaaagattattaaa

SEQ ID NO: 41438 - DNA, 921 bp, DROSOPHILA
atgacccaagtgaaatctgtactttgcgtgggttgcacggtgattgacttcgtgaccatcaatgggagctatcctatggaggacaccgatcggcgatgcctggatgggttctggcaacgtggcggaaacgcctctaatgtgagtactgtgctccgggttcttggatgcaaggtggacttctttggaatgctcagcaggtcggatggattccgagtgcttctcgacgatctctcgaagcgggaaatcggcacgaatgactgtcccttcacggacagggatccgccattctcctctgtgatcctggctcaggattccggcacccgcaccattatccactgcaataaggactacccgcagaccacctatgaggacttcagcaagataaacctttcgcagtatggatgggtacacttcgaggctcgcaacacgccgcacaccttaaagatgatgcaaagcatccgggagtacaaccaaaggaccggacaaggcatcattatctcgttggacttcgaaacgaggtatgaacaaaaccaggaattgtgtgcgccctgcgattttgtggtcttctccaaggagctggctggtcagttgggttggaagacaccgcggcagtcgtgcgaggagttggcctccaaaattcccgaaggtggtccaaagcctgtcttcatttgtccctggggaagcgccggagctggagctatggatgctaatggaaactactatgaaatgtcgtcctataaacaggacaaggtagttgacacgctgggagccggggacagtttcatggcgggattcatctacgccaccctcaaggctcgtcgaagtctagcggaggctgttgactttgccaaccgagttgccagtcacaaaatcactggattcggctacgaacacatttcccagcttagcttaaccaagtaa

SEQ ID NO: 41439 - protein, 306 aa, DROSOPHILA
MTQVKSVLCVGCTVIDFVTINGSYPMEDTDRRCLDGFWQRGGNASNVSTVLRVLGCKVDFFGMLSRSDGFRVLLDDLSKREIGTNDCPFTDRDPPFSSVILAQDSGTRTIIHCNKDYPQTTYEDFSKINLSQYGWVHFEARNTPHTLKMMQSIREYNQRTGQGIIISLDFETRYEQNQELCAPCDFVVFSKELAGQLGWKTPRQSCEELASKIPEGGPKPVFICPWGSAGAGAMDANGNYYEMSSYKQDKVVDTLGAGDSFMAGFIYATLKARRSLAEAVDFANRVASHKITGFGYEHISQLSLTK

SEQ ID NO: 41440 - DNA, 4810 bp, DROSOPHILA
tgcagcccaggtgcagaacacgttacagccgccggactttaactttctgtaccaccaggccactacaacggccacgacggccacatacttcaatcccttttccaggcagcagcagcatcatcatcagcagcagcacggcgtcagcgatgccaccaatgcggctactttggcttcgtcgtccagtaattcgttggaccacgagtcgatgaatgctacattccgggtggccaagacccaatcgctgcagtcatggtatcagcaagagccggatcacgatccacagaatcagggtggtgcggaatcgggaactgtcactccctccaatcagagccaggatgtggttagccaccagccaacaaactttaacgccgccctagcggccgtcgattgctgtagcgttgccttggacgaggacgcaaaatatcttgatctagacgcctgcaagcgtgagcagctgagcagcagtagcaatctgccctccgcttccgcgtccacaacgtcgtcgtcgttcgctggcgctggcacggagagcagtttggtgggtggtctgaatatccgaaccgatgaaaagatgcccgccaagggtgaaatttccgaacaggaaagcaactgcgacatcgagaactcctggagtgagtcggtaagttcaatttcatttcggtcattttataacgaaaactaagtataattttgattctttacaggtttatggggatatttcgcagcggtacttcagaaaccagttttctggcggctaccaccctgattggcgacaggactattatccggctcaagatctcagcgctcagctgagagagcataaacggtaagcattgaaattgtattctgtgacgacaaggtataatagtttttaaatctcttaaacactaacagttttgactttaatgctgtcgatgatgaggcttcatccagctcgagaaggagccatcttacagatctcccgacagcggccacctcctccgcatgtacgtcatcagctatgctggcgggtccaccaatagcttcgacatcacgggctgctgctgaggcggcagcggaggcggctgctcttgcccagcggaaaccgcagcgccgcaagctctacaagtgtcctcactgcgaggcgatcttcgaaaagcttaaggagcgtaatgcgcacatgattggcgagcacaactacgtacggcaaaatcgccgtctaatttgcactcagccgcaaatcaatacttcgatgttaacgctacagcaacagatgatagtgcagtcaggtgaggttgaggattccaaggatggcattgtgaagataaaacaggagcagtgccaggaaaagcaggatgttgagcaaatgcacgaccattccgaactattggctgatgtcaaggactctgagctgatgggcatcggcggtgatggtgacggtgatgtagatgacgacattaagccacccaaccagctagatgaaaagcccacgctgccgccattagccatgacgaccccagcggctaaattagcagctttgtatcgaatgctcatcgcctacaacgaatccaagctcggacaggagcgcaacaatcttagcgagctggagcagaaggctatggaaaaatccatatttctctgctatgtctgtcgtaccgacttcccgtccgtaaagctctatgacgcccatctcaccgagcatcccgctgaatgctttacgtgcggcaagaagttctaccgttggaagaacttctcattgcacttgaagcggcacttgggctggaaggagttcggatgctatgtctgcgacaagaagttcgtagtgcgcagcgccttggtcgaacacatgcggatgcacacggggcaaacgccactcaagtgcaagatatgcggtaattcaattacataattaactatttattaccatcaatgttatggatctagttagtcctattgatgaagtagcaacacttatctactcaaaatactccagctataatatttttcctaaattcttttatacacacaataggtaaaaagttcaagagatactcgaatctgacgcaacaccgcaaacgccacaccaaaatgatggtgcgcaagaaggaatacgtgtgtcactgcggcgaagtcttgccctcgaaggctcgcttcctgtggcacaaggaaacgcacgacctgaagccgaagtgctgcccgtactgctgcgatcggtttgtgcacgccaactcgctacgtcgacacatacggttggcccactctgataagtttgactatgccgaacctatggaatgccctatgtgtaagcaaatcttcgcgaagacgtccatcaaggcgcacatggcgacgcactcaacggagccccaatacgattgcgccatttgtagcaagagcttctccaccaaatggaatctcaagatccactcgtgggtacacgccaaccggacggccaagccctttaagtgcgaatactgcccaaaggcgtttgtgcgagagctggacttcaagaaccacatcaacgcgcacaaacagatcaaaccgtacacgtgcgagtactgcggctgcaagttcatccgcaagtacaattacatgcgacaccggcgcgaacatcatggcaccaagaagttcacctgcgaccaatgcgataagtctttccatcggcattactatctgatagagcaccggcgaatgcataccggggagcgtccgttcacgtgtaccatctgcggcaagagctccacaacgaagaccaaccacaacaagcatctgaagatccaccattcgcgcgatccgttcacggtggaggcctaagggggttcggttccattgggctaatcgtaatcgaactaaagtttaatataatcattacctaggtagttgttcatgactcttctatgtgtgtactgtgtgtgtctgtggttaaaacaacaaaacaaaacaacaaattagtattacctatcgaactatatatttagttaacatatgcgattgccaattcttgttgattaaaccaacaagaaacaattatcacaataattacattttactaatcttacattttggatgtggtttaagaacgtagctaaatgtgaaagtgttccccattctcttcctccggattcgaatcacaattcgcgtcaaccgctttaatcccgtttaggttttagattctaacccactttagtaaaatgttatacctagttcagtgcaatatacatcgattaaatactatatgccgcgatactttttcatttctattttagtagtttagttcgcattaagtttattcatttatcttatctatccacgcctagaagagcatactagttaatttaagttagccgaaattggtcttaaaactttcgagtttttccagaacttgagcacattctaagcgaagggcacatacacagaaaacgaacacccatctaacaacttgttatataatttgtatttttctaattgaagagaaaactctctgccagcaatcgaacgtaagcgaacacaactgtcatattggataacaaatttcgatgtacgtagcatatttttgatttatagtagttgcaacttctctaggctattttaaaggattgtttcaatggtttattgcagcattagttaaaatttgtagctctaagtgaacccaacattaagtataaataaaatttcacaatacatgcgtacatgcatcataatacgaaaacaaacaaatgaaaacaaaacaattttaaaatatttacaacttacgataaagatttcaatgagaactaatggaaagaatcccattctatgaaggaaataaattcaatttatggataattacaaaacaatcaacgccttttattgattcttttgcgggactggttgctggacgactgacaccactgataacagcacaaatcagttcaaacttcaagaactttatcaaaaaaggatgacattaaattttaataagcctatttcgtgttttttataacatctgaaacttaaaatatgaagtaatacatacatattcatttatgtagcataggagtagtaaactaattaataaatacgaactgaaaatggcttacatcatatgtggctttagccgtagccttaatgacattaaattcgaataaacatatttcgtgttttttataacatctgaaacttaaaatatgaagtaaaacatacatattcatttatgtagcataggagtaaactaatgaataaatagaaactgaaaatggcttacatcatatgcggctttagtcgtagccttatgattttttcaggaacatccaattttcacataaagattgatacactagctttttttcgtgcctgttctcgtaaagttccacttcgatgagatcagcgtcgcaattagggcggttggggtaatagttgagaggatagtgtacccgggcgaaaaccagcggatgctggcagaggcaagcctgcagtgcctggcgcaccgatttttctttaaaactcttgtttctcttaatgccgtgcaatttgacgcagaacgatcgcaacgggaacatgaacaactgactgggcattacttttaggtggttaaacgaaactttttcggtgtcatggaaatcaatgtagaatactgtgacttgctcactggttggagacaggattggtgaaatctccttgatattggccctgtaccactgcttgtctctcgaatagcgggccagacacaagtcgcctaccttcggctccatcagcggttccgcgtccttgatcaaagtgctcgtctcctggatcaggctgatttcatgctttgtgaactccgagagacatggggctatctgcaactccgtgtccg

SEQ ID NO: 41441 - DNA, 2670 bp, DROSOPHILA
atgctggcgggtccaccaatagcttcgacatcacgggctgctgctgaggcggcagcggaggcggctgctcttgcccagcggaaaccgcagcgccgcaagctctacaagtgtcctcactgcgaggcgatcttcgaaaagcttaaggagcgtaatgcgcacatgattggcgagcacaactacgtacggcaaaatcgccgtctaatttgcactcagccgcaaatcaatacttcgatgttaacgctacagcaacagatgatagtgcagtcaggtgaggttgaggattccaaggatggcattgtgaagataaaacaggagcagtgccaggaaaagcaggatgttgagcaaatgcacgaccattccgaactattggctgatgtcaaggactctgagctgatgggcatcggcggtgatggtgacggtgatgtagatgacgacattaagccacccaaccagctagatgaaaagcccacgctgccgccattagccatgacgaccccagcggctaaattagcagctttgtatcgaatgctcatcgcctacaacgaatccaagctcggacaggagcgcaacaatcttagcgagctggagcagaaggctatggaaaaatccatatttctctgctatgtctgtcgtaccgacttcccgtccgtaaagctctatgacgcccatctcaccgagcatcccgctgaatgctttacgtgcggcaagaagttctaccgttggaagaacttctcattgcacttgaagcggcacttgggctggaaggagttcggatgctatgtctgcgacaagaagttcgtagtgcgcagcgccttggtcgaacacatgcggatgcacacggggcaaacgccactcaagtgcaagatatgcggtaaaaagttcaagagatactcgaatctgacgcaacaccgcaaacgccacaccaaaatgatggtgcgcaagaaggaatacgtgtgtcactgcggcgaagtcttgccctcgaaggctcgcttcctgtggcacaaggaaacgcacgacctgaagccgaagtgctgcccgtactgctgcgatcggtttgtgcacgccaactcgctacgtcgacacatacggttggcccactctgataagtttgactatgccgaacctatggaatgccctatgtgtaagcaaatcttcgcgaagacgtccatcaaggcgcacatggcgacgcactcaacggagccccaatacgattgcgccatttgtagcaagagcttctccaccaaatggaatctcaagatccactcgtgggtacacgccaaccggacggccaagccctttaagtgcgaatactgcccaaaggcgtttgtgcgagagctggacttcaagaaccacatcaacgcgcacaaacagatcaaaccgtacacgtgcgagtactgcggctgcaagttcatccgcaagtacaattacatgcgacaccggcgcgaacatcatggcaccaagaagttcacctgcgaccaatgcgataagtctttccatcggcattactatctgatagagcaccggcgaatgcataccggggagcgtccgttcacgtgtaccatctgcggcaagagctccacaacgaagaccaaccacaacaagcatctgaagatccaccattcgcgcgatccgttcacggtggaggcctaagggggttcggttccattgggctaatcgtaatcgaactaaagtttaatataatcattacctaggtagttgttcatgactcttctatgtgtgtactgtgtgtgtctgtggttaaaacaacaaaacaaaacaacaaattagtattacctatcgaactatatatttagttaacatatgcgattgccaattcttgttgattaaaccaacaagaaacaattatcacaataattacattttactaatcttacattttggatgtggtttaagaacgtagctaaatgtgaaagtgttccccattctcttcctccggattcgaatcacaattcgcgtcaaccgctttaatcccgtttaggttttagattctaacccactttagtaaaatgttatacctagttcagtgcaatatacatcgattaaatactatatgccgcgatactttttcatttctattttagtagtttagttcgcattaagtttattcatttatcttatctatccacgcctagaagagcatactagttaatttaagttagccgaaattggtcttaaaactttcgagtttttccagaacttgagcacattctaagcgaagggcacatacacagaaaacgaacacccatctaacaacttgttatataatttgtatttttctaattgaagagaaaactctctgccagcaatcgaacgtaagcgaacacaactgtcatattggataacaaatttcgatgtacgtagcatatttttgatttatagtagttgcaacttctctaggctattttaaaggattgtttcaatggtttattgcagcattagttaaaatttgtagctctaagtgaacccaacattaagtataaataaaatttcacaatacatgcgtacatgcatcataatacgaaaacaaacaaatgaaaacaaaacaattttaaaatatttacaacttacgataaagatttcaatgagaactaatggaaagaatcccattctatgaaggaaataaattcaatttatggataattacaaaac

SEQ ID NO: 41442 - protein, 549 aa, DROSOPHILA
MLAGPPIASTSRAAAEAAAEAAALAQRKPQRRKLYKCPHCEAIFEKLKERNAHMIGEHNYVRQNRRLICTQPQINTSMLTLQQQMIVQSGEVEDSKDGIVKIKQEQCQEKQDVEQMHDHSELLADVKDSELMGIGGDGDGDVDDDIKPPNQLDEKPTLPPLAMTTPAAKLAALYRMLIAYNESKLGQERNNLSELEQKAMEKSIFLCYVCRTDFPSVKLYDAHLTEHPAECFTCGKKFYRWKNFSLHLKRHLGWKEFGCYVCDKKFVVRSALVEHMRMHTGQTPLKCKICGKKFKRYSNLTQHRKRHTKMMVRKKEYVCHCGEVLPSKARFLWHKETHDLKPKCCPYCCDRFVHANSLRRHIRLAHSDKFDYAEPMECPMCKQIFAKTSIKAHMATHSTEPQYDCAICSKSFSTKWNLKIHSWVHANRTAKPFKCEYCPKAFVRELDFKNHINAHKQIKPYTCEYCGCKFIRKYNYMRHRREHHGTKKFTCDQCDKSFHRHYYLIEHRRMHTGERPFTCTICGKSSTTKTNHNKHLKIHHSRDPFTVEA

SEQ ID NO: 41443 - DNA, 4786 bp, DROSOPHILA
tatatatatatatatatgtatatatacatacaaatatccgtatacaactgcataaattactttaaggagagagccgacggaacgcagcaaaatcatgccacattgagatttatccagcacgccgttggatttcactgaggatagaactgcttggagaatatatacctacctaaataatccagaggagatctcgggatactacaattccaattaatgagaaacaatcactcaatttacctactattagttctattgatttactcctaattgttaagtgttatggactatcgttaagttttaggtccaaacgaggccctgaaaattgtttacacaccccactaatgaatacgctacgcaattaagttaattattactaattacgcctgtgtaagcccaatcagaaacccattcccaaaccaatttgaacagcgcgcccaggcaaaggtgttgcgaataatcaaaggcagttgaacaacttgaacatatactatactgagctactacagcaaaagataaagaatccgatgcatgcatatatcacggaatgaatgtaaactagctactaaaaagcgttatattcaagcagacgtcaagtctataccataaacagcaaatacatatttacattgaatgtggtttaaaaaacaaggcggcaatttgtttcatttttgggaagtgccctacagtacaatagcatattttgaaatttgcgcccaatacaacagttgttagcagctgctaactcacatactcaccactgctgttaagcgctacaggcgatgttttgcaaaacatcgcccaacatcgatatcaagagaaacgtcgagctatcgagaaaaatattgaatcgacagaacatgtgctctagctccagcctcgggaaacaaaacagcgtaaattgataggaatttgatagttaattacctggtaactatggctgatcatgcttttcatcggcccgggccgctgaaacaagcgaacaaggctcacaaaacgggtcgtcatcgctccaaaggagcaatagacaatgcccaaaaaggtatgtggaaatcttaatagcatcatccagagttctaacccacatgggcgttcacctttcacagggaagattggactgaggcctatctcccacaagcacaagcagcagcagcgcaaggagcagcgtcgcaaccagatgaaccagctcaggaaaaacaaaagggaggaggtgttggagcaaaagagaaaactaggtggtcagaacacagctccctttcttgtgtgcctactacccatgcacgaacagattgatcccatgtccgcattggaaatcctaaagagctgtgacagcgaactggtcgtggagaactccccaagtggcattgtttacatcaatcttccaaggttcaagcagcgtttcgcttttgtcacaccaccagtgggacgcggaaatgagctaattgccctggattaccttaaggtttgcgacaccaccctgcttttgaccaccgcagcctttggcgatgacgagatcttcgaccgctggggtcaacggatctttaacatgatgtcagcccagggaatacccactccggtagtagccctcatggatctggagtcaatcaatcccaagcgtcgtcctgctgccaagcaggcggctcagaaggtcatatctaagctgttgcccgaggagaagatcatgcaattggacaccgctagcgaggccttgaatgttatgcggcgcattggaggccagaagaagcgcatcctccataacgtcgccaatcggccacatctctttggagatgtggtagagtttaaaccgggctcagatcccagcgacgatctgggcacactagaagttactggtttcttacgtggacagtctcttaacgtgaatggtttggtccacattcccggcttgggtgatttccagctaagccaggtggtggcccctccagatccgtataagctagataaatcgcgcgatggagagaatagtgaggtgcgtctcttggatcgcagtgatccctctaagcgcacttcccttcaaagcgaaaacatacccgaccccatggacgcggagcagacgtggcccaccgaagacgagattgccgcatcgcaggcggaaactaaaaagatgaagcttgttaagcgtgtacccaagggctacagcgagtaccaggctgcctggattccggatgtggaggaagtggaagacccagacggtaaggatgacgatgacatgagtgaagatgatgatgacgacaaagaagacgataatgaggacttcatgtcgtgcgacaacaaatcctttgaggatgagtacgagaagcgggactcagacactgaggagttccaggacaccgtgtccgtggcctcggaggctgccatcaacgacgaaaagtacgatcagcaaatggacttccaggaggagcgtgagaccctgaagaagctgcagcaagcacgcacggatcagctttggcccgatgagatagacactcctttggatgtgcccgctcgcgagaggttccagaaatatcgcggcttagagtccttccgaacttcgccttgggatgccaaggagaatcttcccgctgactatgctcgcatctatcagttccagaacttcgaccgcaccaagcgtaggattcttaatgaagccaaggagttcgagggcgttctggtagggattttccaaaaattcggttttataagattataatgtttttgctttcagcctggtttatacgtcactctttatgtgataaatgttcctgagagccgctggaatgccttcaagtccgcccagcttatggacaacattattgtatatggaatgctaccccatgagcaccagatgtgcgtaatgaacgtggtactgcagcgaatgcccgactcggaggtgccgctgaagtctaaagaacaattgataatccagtgcggctatcgtcgctttgttgtgaatcccatttacagtcagcacaccaatggggataagcataaggtaatatttggactaatttgtaattgactatttattaatggattatgtttatccagttcgaacgctacttccgtccgtacgaaacagtttgcgccacgttttacgcaccgattcagttccctccggcacccgtgctggccttcaaggtgaatcccgactccaccctggcgctggttgcccgtggacgcctgctgtcctgcaatccagatcgtattgttctcaagcgcgttgttctcagcggtcatcccatgcgtatcaatcgcaagtcggcttctattcgctacatgttcttctacaaggaggatgtggagtacttcaagcctgtgaaactaagaaccaagtgcggacggctgggacacattaaggagtcactgggcacgcacggccacatgaagtgctactttgatgggcagttgcgatcctacgacactgctttcatgtacctgtacaagagagtcttccccaaatggacctacgaagagtgtctggtgcgaacggcggagcacgagcgacaacatgcgtcggcaaacaggaggagctcgcagcaagtggccatggaagagtagaggtgtgtgcaaatggatggataaataagtgatcgatggacagtgcgaataacttctgaaatgagtttatattattgttgttacatttaaacctctaaaagtatgaaacctacgaagtgtccattcgggaaatgtcacccgaaaagtacataaaatatgtacacaaaaatcccgcatcgataattttttatatgtgactgcgttgtataataggaataatagaattatattcacaaacaattgtcttaacttaatggtagaggcaatacaatatacatacatataacatggatacgtttaaaagcttgtcgcattgcacaaggataaagaatcggtcaggttctcatagaatatggctaatacagttttgtggggggacaggacatagggcagggatgggactatgattattcagtaattggtggacagacacttgcgacgcttcttttgcaattgctcgatctgttcgcttatttggattggtgtttggaaacctcttacaatgctgttgacagtcagaaccgtggcgataaactgggtaatagatatgtgccaggattcggagatgttagtgctgctgctgtccccactgcttgttgttgtggtcctggactttccgctcgcctgacgaagctcctcttctagagccacaaatagacgggtagtgccaatgggttctggtgcaggagtggtgggattgccattgctatccggttgctgaaagaaaaatttagttttgttttgattgttgggaatctttgaaaagacaaagcaagtcatacctcatcgccacccatatttagctgggtaaagctctccaggctgggctcctttttaatattgctgtttccaagctccaagagattctcatctaaaaaatgaacaatagttttgaatggtactttcacgttttaaaggctatacttacaagccctttgcatctcttcatcctggaccagacccatgatctctatgatactgcgccacaacagctgaaaattctccttacgcatgtggggaatgctgtgttgcgaatttgaagcgccttcgtccggctggtccagcagatagccaagactgcccaagcttcgcaagtccgtggcattcgagtcaacacgttctagacgtgtggccgcaacaaggtcgctgatctgtgagaaattcgatatagtctcgacattgagaagcatgtgatcagcggccgcagacgaggctgctccggctaccacatcag

SEQ ID NO: 41444 - DNA, 2758 bp, DROSOPHILA
aacatgtgctctagctccagcctcgggaaacaaaacagcgtaaattgataggaatttgatagttaattacctggtaactatggctgatcatgcttttcatcggcccgggccgctgaaacaagcgaacaaggctcacaaaacgggtcgtcatcgctccaaaggagcaatagacaatgcccaaaaagggaagattggactgaggcctatctcccacaagcacaagcagcagcagcgcaaggagcagcgtcgcaaccagatgaaccagctcaggaaaaacaaaagggaggaggtgttggagcaaaagagaaaactaggtggtcagaacacagctccctttcttgtgtgcctactacccatgcacgaacagattgatcccatgtccgcattggaaatcctaaagagctgtgacagcgaactggtcgtggagaactccccaagtggcattgtttacatcaatcttccaaggttcaagcagcgtttcgcttttgtcacaccaccagtgggacgcggaaatgagctaattgccctggattaccttaaggtttgcgacaccaccctgcttttgaccaccgcagcctttggcgatgacgagatcttcgaccgctggggtcaacggatctttaacatgatgtcagcccagggaatacccactccggtagtagccctcatggatctggagtcaatcaatcccaagcgtcgtcctgctgccaagcaggcggctcagaaggtcatatctaagctgttgcccgaggagaagatcatgcaattggacaccgctagcgaggccttgaatgttatgcggcgcattggaggccagaagaagcgcatcctccataacgtcgccaatcggccacatctctttggagatgtggtagagtttaaaccgggctcagatcccagcgacgatctgggcacactagaagttactggtttcttacgtggacagtctcttaacgtgaatggtttggtccacattcccggcttgggtgatttccagctaagccaggtggtggcccctccagatccgtataagctagataaatcgcgcgatggagagaatagtgaggtgcgtctcttggatcgcagtgatccctctaagcgcacttcccttcaaagcgaaaacatacccgaccccatggacgcggagcagacgtggcccaccgaagacgagattgccgcatcgcaggcggaaactaaaaagatgaagcttgttaagcgtgtacccaagggctacagcgagtaccaggctgcctggattccggatgtggaggaagtggaagacccagacggtaaggatgacgatgacatgagtgaagatgatgatgacgacaaagaagacgataatgaggacttcatgtcgtgcgacaacaaatcctttgaggatgagtacgagaagcgggactcagacactgaggagttccaggacaccgtgtccgtggcctcggaggctgccatcaacgacgaaaagtacgatcagcaaatggacttccaggaggagcgtgagaccctgaagaagctgcagcaagcacgcacggatcagctttggcccgatgagatagacactcctttggatgtgcccgctcgcgagaggttccagaaatatcgcggcttagagtccttccgaacttcgccttgggatgccaaggagaatcttcccgctgactatgctcgcatctatcagttccagaacttcgaccgcaccaagcgtaggattcttaatgaagccaaggagttcgagggcgttctgcctggtttatacgtcactctttatgtgataaatgttcctgagagccgctggaatgccttcaagtccgcccagcttatggacaacattattgtatatggaatgctaccccatgagcaccagatgtgcgtaatgaacgtggtactgcagcgaatgcccgactcggaggtgccgctgaagtctaaagaacaattgataatccagtgcggctatcgtcgctttgttgtgaatcccatttacagtcagcacaccaatggggataagcataagttcgaacgctacttccgtccgtacgaaacagtttgcgccacgttttacgcaccgattcagttccctccggcacccgtgctggccttcaaggtgaatcccgactccaccctggcgctggttgcccgtggacgcctgctgtcctgcaatccagatcgtattgttctcaagcgcgttgttctcagcggtcatcccatgcgtatcaatcgcaagtcggcttctattcgctacatgttcttctacaaggaggatgtggagtacttcaagcctgtgaaactaagaaccaagtgcggacggctgggacacattaaggagtcactgggcacgcacggccacatgaagtgctactttgatgggcagttgcgatcctacgacactgctttcatgtacctgtacaagagagtcttccccaaatggacctacgaagagtgtctggtgcgaacggcggagcacgagcgacaacatgcgtcggcaaacaggaggagctcgcagcaagtggccatggaagagtagaggtgtgtgcaaatggatggataaataagtgatcgatggacagtgcgaataacttctgaaatgagtttatattattgttgttacatttaaacctctaaaagtatgaaacctacgaagtgtccattcgggaaatgtcacccgaaaagtacataaaatatgtacacaaaaatcccgcatcgataattttttatatgtgactgcgttgtataataggaataatagaattatattcac

SEQ ID NO: 41445 - protein, 814 aa, DROSOPHILA
MADHAFHRPGPLKQANKAHKTGRHRSKGAIDNAQKGKIGLRPISHKHKQQQRKEQRRNQMNQLRKNKREEVLEQKRKLGGQNTAPFLVCLLPMHEQIDPMSALEILKSCDSELVVENSPSGIVYINLPRFKQRFAFVTPPVGRGNELIALDYLKVCDTTLLLTTAAFGDDEIFDRWGQRIFNMMSAQGIPTPVVALMDLESINPKRRPAAKQAAQKVISKLLPEEKIMQLDTASEALNVMRRIGGQKKRILHNVANRPHLFGDVVEFKPGSDPSDDLGTLEVTGFLRGQSLNVNGLVHIPGLGDFQLSQVVAPPDPYKLDKSRDGENSEVRLLDRSDPSKRTSLQSENIPDPMDAEQTWPTEDEIAASQAETKKMKLVKRVPKGYSEYQAAWIPDVEEVEDPDGKDDDDMSEDDDDDKEDDNEDFMSCDNKSFEDEYEKRDSDTEEFQDTVSVASEAAINDEKYDQQMDFQEERETLKKLQQARTDQLWPDEIDTPLDVPARERFQKYRGLESFRTSPWDAKENLPADYARIYQFQNFDRTKRRILNEAKEFEGVLPGLYVTLYVINVPESRWNAFKSAQLMDNIIVYGMLPHEHQMCVMNVVLQRMPDSEVPLKSKEQLIIQCGYRRFVVNPIYSQHTNGDKHKFERYFRPYETVCATFYAPIQFPPAPVLAFKVNPDSTLALVARGRLLSCNPDRIVLKRVVLSGHPMRINRKSASIRYMFFYKEDVEYFKPVKLRTKCGRLGHIKESLGTHGHMKCYFDGQLRSYDTAFMYLYKRVFPKWTYEECLVRTAEHERQHASANRRSSQQVAMEE

SEQ ID NO: 41446 - DNA, 3119 bp, DROSOPHILA
ttcttcttcatagcaggcacggttttgatccataatctgaactagagcctcgatcgtcttaatgcgcacgttaacgttggacatgcggtagtagcgccggacgaactgggccagcacctgaagccaatctggccgcgttgctgtaacccgtcgggatcggtactcgattagggctagaacggaagcctctgggcgtcggtcggcaactcgctcgatgagatcgtagatgcgctccacattgcccagaatctgggatctatcctgctgcaacagcttctcgatgcagtcgatattctcgtggaaattgatctgcaggtgatgcagacgatccttgtttatattgacttcttcgtaatactcgatattgctaacgatcgaggacattatatcgcagatcagatcccaaatgatctctgaaagctgccgcttggtaatcaccatgcgaacgctgaggatgacttcgaaggtcacgatcacctgacgactgtctagtgcctgaggaaaaacaatgattattttcccgttttaggtacggattttcaggcttacccgcaggaaggctgtcagcacattcgttgcataggtcataggcgaaacctggaaaataatgttcgagccaaagatgttcatgtttagatggaacacggccccacgcaacaggtgggcatcatcgtaaagagctcgatcgttgaggatactgcacatcatcttcatggaatggtatcccaactgggtgcccaagaggttcttcatgatctggagattttaaaaatacatatgacttaatattattcttcattccaacgaaacaattaaagccagacatagaaaaatagcaatgacactaatagttattctattgtctttggtaatagttaggcctggtaattacattgcatctgcattttgttaacgaaattagtaacacttcaaatatctttgatatttcaatcggcttacaaacacatttggctagtgtcgaaattcagaagtttccacaatgaaaaagcaaatcgtaagggagttcataaccgtaaagaaggtacttcacctgccgccggagccacccccaccgccgccacctcctaagcgccacgttctggctgtgggcagctgcaccctggacatgatcaccatcgtggatctgcctctttttccaggccaggtgcaacgcaccacggagggaagctggcggcgcggcggtcccgctgccaatatatgcactgtgtggcggcgactgggcttggagtgcgaattcctcggagttttgagcagggttagggcgttcgagagcctgttgaatggatttcaatcgcagggaatcgacatttcgcattgcccgctgacgaatcaccggcctgcgcaccgcagcatcattgtccaacgtaacgtggatacgcgaaccatgctcgagttcgccaatgccaaccaggagctcacctaccagcagtttgtgggcgccgtggactaccagaagtactcgtggatacacttcgaatgtcgtaatcccgttgagatgctgcgcatggtcctggcggtcatacaattcaacgagcgctgccccgagtcaaggatcacactctctgtggatctggacaacttgcgaccggccaccatgttgatggccagtatggtggactacgtcttcgcccgaaagaccatgatgcgtacgtactgttttatgaatggacgcgaggttgtttgggcgattaggaatgaaatgcgaagagcacggactcaatgggaaaaaagccagcccaaaaagatgccctatctacctcctgatcccccagatgagcattccaacggatattgcccgggaccgctgaataaccaacccgtcgtcatatacaataattatatggaaggcgccagttgcctgatggccgacgacacctacttcaaggtgggctcccagattccgcccaaattagtggacgttgtggccgttaacgacaccttctcggcggccgtgatatatgcactgattaaggtcaagatgcggctgagggatgccatcgagtacggaacccgggcgtcgtctctgaagttgacgggaaacggattcgatgtgctgcggtgtatgcccaaagatctgattggttgttactatacttaagcccatggatttataatcattgattttgtaaaatctactctgtaaacttgtactaaggtcacttaaagggaactgggtcagcgacccactcatttatcgtcggtatcgaatgggccttgaatacactttttccaccggggggccacagattcaatgatcacttcttatttcgggaatagggttaatcatcatcggctggaacatgttgaatgataagaagtgctgaagtcagcggaaccctcgataagtggtggaaatattgagcagataaagactgagcagaatactcattagtattaaaaaacaaatgtcggagcaatctctgccagcgattgccaaatgggctgaaaaaattcaatcaaagcgaagacataaaaagccaagtcattagcaatcaacgccgcattcgacggattcccagcataaacgcgcatctgacgaaaatggagagtgagtgtaataagagtaccttattttagggtgattaaagagttctcgttttttccagatcgcttattagttatatggctgcttcttgccatcgccacggcattggttaaggccgaacttacagatatatccgctatctgcaggatatccgatccctggcaaatgctgccccacaaagaccactgccaaaggttctatgtttgcactggcgacgatgacatgcccttccaggagttcaactgtccggcggagtaccattttagcaagaagctcatgatttgtgtacccggagcctgcaccgatgaatccgtattttgtggacttacgaatagtgtggagcgagtccaaagcgattgcacgcgataccgacaatgcctggagggaggatccttcgccgtggccaaatgttccgtcggaaactactttgatccagcccgaagagcctgcctcccagtggccataagtgcggcccatcagtgcagctgtgtgctgccggataatgccaccctggcgaatccaagcgactgcgagacatatttccgctgtcact

SEQ ID NO: 41447 - DNA, 1119 bp, DROSOPHILA
atgaaaaagcaaatcgtaagggagttcataaccgtaaagaaggtacttcacctgccgccggagccacccccaccgccgccacctcctaagcgccacgttctggctgtgggcagctgcaccctggacatgatcaccatcgtggatctgcctctttttccaggccaggtgcaacgcaccacggagggaagctggcggcgcggcggtcccgctgccaatatatgcactgtgtggcggcgactgggcttggagtgcgaattcctcggagttttgagcagggttagggcgttcgagagcctgttgaatggatttcaatcgcagggaatcgacatttcgcattgcccgctgacgaatcaccggcctgcgcaccgcagcatcattgtccaacgtaacgtggatacgcgaaccatgctcgagttcgccaatgccaaccaggagctcacctaccagcagtttgtgggcgccgtggactaccagaagtactcgtggatacacttcgaatgtcgtaatcccgttgagatgctgcgcatggtcctggcggtcatacaattcaacgagcgctgccccgagtcaaggatcacactctctgtggatctggacaacttgcgaccggccaccatgttgatggccagtatggtggactacgtcttcgcccgaaagaccatgatgcgtacgtactgttttatgaatggacgcgaggttgtttgggcgattaggaatgaaatgcgaagagcacggactcaatgggaaaaaagccagcccaaaaagatgccctatctacctcctgatcccccagatgagcattccaacggatattgcccgggaccgctgaataaccaacccgtcgtcatatacaataattatatggaaggcgccagttgcctgatggccgacgacacctacttcaaggtgggctcccagattccgcccaaattagtggacgttgtggccgttaacgacaccttctcggcggccgtgatatatgcactgattaaggtcaagatgcggctgagggatgccatcgagtacggaacccgggcgtcgtctctgaagttgacgggaaacggattcgatgtgctgcggtgtatgcccaaagatctgattggttgttactatacttaa

SEQ ID NO: 41448 - protein, 372 aa, DROSOPHILA
MKKQIVREFITVKKVLHLPPEPPPPPPPPKRHVLAVGSCTLDMITIVDLPLFPGQVQRTTEGSWRRGGPAANICTVWRRLGLECEFLGVLSRVRAFESLLNGFQSQGIDISHCPLTNHRPAHRSIIVQRNVDTRTMLEFANANQELTYQQFVGAVDYQKYSWIHFECRNPVEMLRMVLAVIQFNERCPESRITLSVDLDNLRPATMLMASMVDYVFARKTMMRTYCFMNGREVVWAIRNEMRRARTQWEKSQPKKMPYLPPDPPDEHSNGYCPGPLNNQPVVIYNNYMEGASCLMADDTYFKVGSQIPPKLVDVVAVNDTFSAAVIYALIKVKMRLRDAIEYGTRASSLKLTGNGFDVLRCMPKDLIGCYYT

SEQ ID NO: 41449 - DNA, 2693 bp, DROSOPHILA
cactttcgaacgtcgagtgatgctacttgaatgtttaacccacgttaattaaagccatctgacttataagccacatctgagtttaatacttgaaatgaatacttttcctaattataaataatgaaagagagaaggtttttatttatattgattttgttacgacctatgaaattaaataaaacgttgttcaaccaacaaaagtataagccagaattataaaagttataaagaatattttttctgaactctataattgaagccaaattataagcggtacacattaatcgcaattattttttaattcttacattgattttaaaactatgcaaaataataatgcaatcaataattactatttcatatgaattcgcctactgcagtgtaacgttgatttatcatcgaataatacaattcagacttaaggtaatatttgtgaacatttccaagaatattttacaaaccagggagctttttattatcttagatctcaattgctggctataaaaaatatcagatctacgctgcgctacacaataagctggttttaacccggagttcagttttgttagcaattattaactacaaatattctcttaaccctatggtggtctttaaatatttcaatattttattcatggttggtaaaatattgttttatactaaagaaatacccaattatctgattaaaatatagaaatattaaatacatgttctatttttatagcgaataaaaaaaaatattgcgcttttatatttagaattaattatttagaacatttatggaatgtcccagaagataatttcttttagatttttatttttacgaatatgaaatacttttaaagccgcttagtcgaagtgctattacaactcgaaggggtcagaataggccatgcaaattcgatgtaggttaaagtggctgttatgggtgggaatcgtataaatatccacgagtgtgctttagagaacctcagttttcgtaccgtaatcaacgaatgagatgcacggtagcagtcagttgactttgaccttggctttggccttcatgctcatctgtttgggatgcaatcacgccctagcccaggacgagctcttccgctgcagtgtgcagtacaaatgctcggatgtgaaagagctggtttgggccatgtccgacgaacgttgccatgtctttcacaacgattgtctgctgaaggtcgagcagtgcgcccgaaaaaacagcggaagatcggagctgattgaaaccacgcgggagatctgcaaacccagctgcaccaaggaatgcccggatatctatgacccagtctgtgcgcagatcttccaggaggagtacttgacatttagtaacgagtgcgaaatgcgtaactacatttgcacaaatgagaggcgtaagttaaatgttttaattaactacgaaaggattgtttatagactgagttttattcttatacagcgtactcatttatttccgtcggtgaatgcgtggaacagccagttggttaggtctagataacagacttgcttataaaatatagaaagaaatacatgtagaaacttaaaaattgtaaaaaaataacagcttaaattcgattttgaaggacataacaagtacaattcactccctaagtgcgatttaacccacttctttttagaggcaccttgaccaaaaacaggatctgcaaaccaactacagaaaaaaagaaaatgaaaataaaaataaaaataaaagcaaagttggcgcacagatgtgttgcaatcgtgtctttaatatttaagctggccaacaacaacaagttgcacaacttttacgcagccacttcaagccagcaattcaagttcaatgttgtctggcttttccagcgaccacgcgctgccaccactctcttcctgattggccgcgattgatcggatttaattaaggaaaattttgcatttgcaatatgcaaaatacaaaaaaaaaaaaagctcatttgagcagtcagccaccaacaaagaaactccgcagcgccaatgtcctcggggccgtttcgcaattacgcgacgtccgagagagctggttgcaacattttcctcatagtccacatcgaatctgtccaggttgcagttccagcccacagatttgctttcatttgaattaacttggttgcttttcattgtaccctacgagaggcactctacactttcgggcaaaagaagtattttgaataccctaagtttagatataaataactcttcaaagctctataatacaacctgtatgctataactttatattcattttcaatcatgtatgcagtggcatttgatcctatagtatagggtatctttagctcattgagttcacaaattcaatattaaataaaatcattataatttcttatctttatctacaagggtatttgggatttcagtccccaaataaatgcctaaccacctttcttgttttccttattcattcggatttgcatttcttgagtgagtttctcactctcgaagtctctcatccacttttcacccaatggatttgattgttttatggccgttggcaaatttacacaataccatgccgaatagttatcaacttgtccaaggagcgaactgcaagtcaagtgcctttccacaggcggaagaaatactcacaatgctgaactgctcaatgcaaatgcaaatttcccacagatgaaacaagctga

SEQ ID NO: 41450 - DNA, 628 bp, DROSOPHILA
atgcacggtagcagtcagttgactttgaccttggctttggccttcatgctcatctgtttgggatgcaatcacgccctagcccaggacgagctcttccgctgcagtgtgcagtacaaatgctcggatgtgaaagagctggtttgggccatgtccgacgaacgttgccatgtctttcacaacgattgtctgctgaaggtcgagcagtgcgcccgaaaaaacagcggaagatcggagctgattgaaaccacgcgggagatctgcaaacccagctgcaccaaggaatgcccggatatctatgacccagtctgtgcgcagatcttccaggaggagtacttgacatttagtaacgagtgcgaaatgcgtaactacatttgcacaaatgagaggccgtactcatttatttccgtcggtgaatgcgtggaacagccagttggttaggtctagataacagacttgcttataaaatatagaaagaaatacatgtagaaacttaaaaattgtaaaaaaataacagcttaaattcgattttgaaggacataacaagtacaattcactccctaagtgcgatttaacccacttctttttagaggcaccttgaccaaaaacaggatctgcaaaccaactacag

SEQ ID NO: 41451 - protein, 145 aa, DROSOPHILA
MHGSSQLTLTLALAFMLICLGCNHALAQDELFRCSVQYKCSDVKELVWAMSDERCHVFHNDCLLKVEQCARKNSGRSELIETTREICKPSCTKECPDIYDPVCAQIFQEEYLTFSNECEMRNYICTNERPYSFISVGECVEQPVG

SEQ ID NO: 41452 - DNA, 4241 bp, DROSOPHILA
ttaaaatttgtttttttcgtttgcccactcttaaaactaaataatttcgattgcccaccttttaaaactaaataatttcgtttgcccatcctttaaaattcatttttaacgtttgcccaccctttaaaaataaattatttcgtttgcccaccctttaaaatttgtttttttcgtttgcccactggtttgcccagcttctttgagctaatgacgagaccaaaaactcaaaccaaattcacccgaagaaggaaattttttagcacaatgcgcattccttcgttaaaattagaactatcgtaataaataaacgtagcttttttaacaaaactgtatacaagcattagttttagtttaacattttttatattcaattctaaatttatattaaatatacaaattataaatatttttattggcactggaaagggtttttgcgcatctgcaagcttaatgtaaagattcaagtttttattgttcccgagattacaaggttcatacgcacattcaacacggccaatgaatctgatctcactttattccttcattttaatatttttatggaaaaattcaccaaatgttaaaaccgataccatacaaaagatgttttatttatacttgatggacattgtatttctctatttatcgtttccgtttattatatttactagaattttaattttaaataataattccacctattaaagatttttttctccttttctagcatacttttcaaaaatcgattatcttttttgaaatcgttacaaatgctcttaatgtggggtctttagcaattattgcacatttttctttctgtgatagaaagcaaactaatcaaatagtccaaacatataacctctgcatttcctcgaacaatactaattttttctttctggtattttattgcagtagatctccgctcgaatgttctccaagtaccgggcattgatcacaggcctgcaggcttagatacgctagccttggattggacagcgtcctgatgtcgtcaagtaacggtggacttagcagtgccaccaatggccgcagcggcagcaccggcagcgccaccattaaccttaatctgaaggggcatgagaggaccatagtgggggttcctgggactggggcatcaagtgccacgactacgtcaattactcacaaaacactgccagacctgaagacccagaggagcaatagcgcctgccacgcccacgagtcgttgtccgcccttcgccgtatcgcgttgttggaaaaacctccggaaaagttgctcagctatggggcggcacaaagccggatcctgggccaggaggctagggaagatttccttgtctacagcgaaggacgattgcactcaggcccgctgcaatcgcttattgcccacatggtccccacccacgaatattatccagatgaaggatttattttcgcttttcttctaagcgccaggctctttgtgcgcccccacgagctattggcgcagatctcacagacctgggagcatcagcagcaggatgtgggcaccggcggagatgtagtggacgatgcaggtcaggggcccggtcgcacaatgatggtcagcatcaactcagcttcaccgctaacacagcggaaaggaagtgcggcggccgcctcacacagttcggagctagaaccacgtcttcaacagcggacgaacactcagcgctctgcccaacactgcatcagactcctgtcagaatggatagagatcttcccttacgactttagagatgaacggcttatgcagcaagttcgcatcctggcaaggaagtgcgtctacattgataattcgctgggaaagcaagtatcgcgaatcttgcagctgctagtgtctcgccttacgacgctagagcagtatgaggagtttttgcagactatcagctcggaggaggcacagagtcagcaacagcagcaccaccaccaccacgggcaccacaatcacttgcacaatgcctttcagacctttttgggtagctcttcacatgctaacggagctagtggcggcggtggatctgccagcggcacctctaattcatcatctagtggtcacacctcatctgcctccacatctaactcgatctccacaacaccccagccggacgatgtgtttggcatcatggacatgtgtccgagctgtgcacatttggcccaccagcttacggccatcgagctggagcgcttgtcgcacattggcccagaggaatttgtccaggcctttgcaaaggattatcaacagcaggccaaggatggaagtagggaggccaacaacagcaagtgtagtggaggtggaggtggttcgttgaacgacatgaaaaagactcgtaacctggaatcgtatgtgcagtggttcaatcggctcagttacttgacggcaagcgagatagtcaaggtgggtaaacagtagaattttcatcaacggatcataaaaatatattaaattcaatgtgtccttttgcagtaccctaaaaaaaagcagcgtgttcgcatcatagaatattggatagaaacagcccgcgagtgcttcaatattggcaactttaatagtctgatggccataatagcaggtctaaatctggcacccataggcagactgaagaagacggtgagttgggtggaatgttaaatttataacggatttgattaattgtgattttaatacttagtgggccaaagtgcaatcggcaaagttctctgtgctggaacatcaaatggatccaacatcgaacttcaacagctatcgctctacgctcaaagctgcgatgtggcgctcagagggcgctactgaggaacgcgaacgcataatcattccattctttagtttatttgttaaggatttgtattttctgaacgagggatgttccaaccggtaagtgggtctagtaatgctctttttgagttatttgcttatcgacatattgccgatattttaaacaggctgccgaacaatcatatcaacttcgaaaaatgctcccagctggccaaacaagtaatggagtttaatgaatggaagaaagtaaactgtccgtttgagaggcttcccaacgtcatagcctatcttcaaaacagcgcagtactcaatgagaacactctttccatggcatccttcgagtgtgagccaccggagaacacggaggagaaggaccgctacaggaccgtaaaggcggagacgaagcaacaactgctacagcagctgcaagatcagcatcaacagtcgcagtaaccccaatacagggtgtagattaagctacgcttaagcgcttgccatgattattttttctactaagccgtaagaccggggatattttagcctaagtttaatgaaccaaggagttcaccggggtatcaagcctcaagccctccttaaccccttactccgaaagaagagcttctgaagctggggtcgccaagtaataatttgtcaatcatttttgttttcaattatttccgttatctttgtgttcctgttccaaatttgtattgacgggcggcttcaagtctttttgctgcgagacgttgccagtaattttatttatttaattagaccattgggaggatgggaataatgaaagaatgtacttaaggccgtacacggctaacagctaatgcaactaatttagttattagcgcaaaatatttggtttatcataattcattttaatataattatgatgaaaaccaatctgacaaagctacatgagtacgcgatatccgtacgtgaccagtatttatatttatgtatacaattttatagctaaatgaaatctttttgatattccgtaattacatccgggtacattctaacggatttcattctgattctgtctcgaggctttttgcatcagcaacatatatgggcctactatcagtcgcaggccattaatactttcgtttaaggaaaccaacagaacaagtaagaaaaaacagaaggagaagtacaccttgtgcttgaaaaatgctttttcttaataagaatttgatttttaacaatgtagttgcaagattttgcaatattgtggatgaattcattattgatattaattataacgggactaaacacacctttaatgataaaaacagctttcgaataaacgatatgaacagaaccagttcccaaaacaaatctcgatacctttctttttttttagggattattcaagagaaggtaagaagtaagttatttaaaggccatgcattttgttataatatagttatcataaatg

SEQ ID NO: 41453 - DNA, 1839 bp, DROSOPHILA
atgtcgtcaagtaacggtggacttagcagtgccaccaatggccgcagcggcagcaccggcagcgccaccattaaccttaatctgaaggggcatgagaggaccatagtgggggttcctgggactggggcatcaagtgccacgactacgtcaattactcacaaaacactgccagacctgaagacccagaggagcaatagcgcctgccacgcccacgagtcgttgtccgcccttcgccgtatcgcgttgctctttgtgcgcccccacgagctattggcgcagatctcacagacctgggagcatcagcagcaggatgtgggcaccggcggagatgtagtggacgatgcaggtcaggggcccggtcgcacaatgatggtcagcatcaactcagcttcaccgctaacacagcggaaaggaagtgcggcggccgcctcacacagttcggagctagaaccacgtcttcaacagcggacgaacactcagcgctctgcccaacactgcatcagactcctgtcagaatggatagagatcttcccttacgactttagagatgaacggcttatgcagcaagttcgcatcctggcaaggaagtgcgtctacattgataattcgctgggaaagcaagtatcgcgaatcttgcagctgctagtgtctcgccttacgacgctagagcagtatgaggagtttttgcagactatcagctcggaggaggcacagagtcagcaacagcagcaccaccaccaccacgggcaccacaatcacttgcacaatgcctttcagacctttttgggtagctcttcacatgctaacggagctagtggcggcggtggatctgccagcggcacctctaattcatcatctagtggtcacacctcatctgcctccacatctaactcgatctccacaacaccccagccggacgatgtgtttggcatcatggacatgtgtccgagctgtgcacatttggcccaccagcttacggccatcgagctggagcgcttgtcgcacattggcccagaggaatttgtccaggcctttgcaaaggattatcaacagcaggccaaggatggaagtagggaggccaacaacagcaagtgtagtggaggtggaggtggttcgttgaacgacatgaaaaagactcgtaacctggaatcgtatgtgcagtggttcaatcggctcagttacttgacggcaagcgagatagtcaagtaccctaaaaaaaagcagcgtgttcgcatcatagaatattggatagaaacagcccgcgagtgcttcaatattggcaactttaatagtctgatggccataatagcaggtctaaatctggcacccataggcagactgaagaagacgtgggccaaagtgcaatcggcaaagttctctgtgctggaacatcaaatggatccaacatcgaacttcaacagctatcgctctacgctcaaagctgcgatgtggcgctcagagggcgctactgaggaacgcgaacgcataatcattccattctttagtttatttgttaaggatttgtattttctgaacgagggatgttccaaccggctgccgaacaatcatatcaacttcgaaaaatgctcccagctggccaaacaagtaatggagtttaatgaatggaagaaagtaaactgtccgtttgagaggcttcccaacgtcatagcctatcttcaaaacagcgcagtactcaatgagaacactctttccatggcatccttcgagtgtgagccaccggagaacacggaggagaaggaccgctacaggaccgtaaaggcggagacgaagcaacaactgctacagcagctgcaagatcagcatcaacagtcgcagtaa

SEQ ID NO: 41454 - protein, 612 aa, DROSOPHILA
MSSSNGGLSSATNGRSGSTGSATINLNLKGHERTIVGVPGTGASSATTTSITHKTLPDLKTQRSNSACHAHESLSALRRIALLFVRPHELLAQISQTWEHQQQDVGTGGDVVDDAGQGPGRTMMVSINSASPLTQRKGSAAAASHSSELEPRLQQRTNTQRSAQHCIRLLSEWIEIFPYDFRDERLMQQVRILARKCVYIDNSLGKQVSRILQLLVSRLTTLEQYEEFLQTISSEEAQSQQQQHHHHHGHHNHLHNAFQTFLGSSSHANGASGGGGSASGTSNSSSSGHTSSASTSNSISTTPQPDDVFGIMDMCPSCAHLAHQLTAIELERLSHIGPEEFVQAFAKDYQQQAKDGSREANNSKCSGGGGGSLNDMKKTRNLESYVQWFNRLSYLTASEIVKYPKKKQRVRIIEYWIETARECFNIGNFNSLMAIIAGLNLAPIGRLKKTWAKVQSAKFSVLEHQMDPTSNFNSYRSTLKAAMWRSEGATEERERIIIPFFSLFVKDLYFLNEGCSNRLPNNHINFEKCSQLAKQVMEFNEWKKVNCPFERLPNVIAYLQNSAVLNENTLSMASFECEPPENTEEKDRYRTVKAETKQQLLQQLQDQHQQSQ

SEQ ID NO: 41455 - DNA, 3148 bp, DROSOPHILA
gcggtcatacaattcaacgagcgctgccccgagtcaaggatcacactctctgtggatctggacaacttgcgaccggccaccatgttgatggccagtatggtggactacgtcttcgcccgaaagaccatgatgcgtacgtactgttttatgaatggacgcgaggttgtttgggcgattaggaatgaaatgcgaagagcacggactcaatgggaaaaaagccagcccaaaaagatgccctatctacctcctgatcccccagatgagcattccaacggatattgcccgggaccgctgaataaccaacccgtcgtcatatacaataattatatggaaggcgccagttgcctgatggccgacgacacctacttcaaggtgggctcccagattccgcccaaattagtggacgttgtggccgttaacgacaccttctcggcggccgtgatatatgcactgattaaggtcaagatgcggctgagggatgccatcgagtacggaacccgggcgtcgtctctgaagttgacgggaaacggattcgatgtgctgcggtgtatgcccaaagatctgattggttgttactatacttaagcccatggatttataatcattgattttgtaaaatctactctgtaaacttgtactaaggtcacttaaagggaactgggtcagcgacccactcatttatcgtcggtatcgaatgggccttgaatacactttttccaccggggggccacagattcaatgatcacttcttatttcgggaatagggttaatcatcatcggctggaacatgttgaatgataagaagtgctgaagtcagcggaaccctcgataagtggtggaaatattgagcagataaagactgagcagaatactcattagtattaaaaaacaaatgtcggagcaatctctgccagcgattgccaaatgggctgaaaaaattcaatcaaagcgaagacataaaaagccaagtcattagcaatcaacgccgcattcgacggattcccagcataaacgcgcatctgacgaaaatggagagtgagtgtaataagagtaccttattttagggtgattaaagagttctcgttttttccagatcgcttattagttatatggctgcttcttgccatcgccacggcattggttaaggccgaacttacagatatatccgctatctgcaggatatccgatccctggcaaatgctgccccacaaagaccactgccaaaggttctatgtttgcactggcgacgatgacatgcccttccaggagttcaactgtccggcggagtaccattttagcaagaagctcatgatttgtgtacccggagcctgcaccgatgaatccgtattttgtggacttacgaatagtgtggagcgagtccaaagcgattgcacgcgataccgacaatgcctggagggaggatccttcgccgtggccaaatgttccgtcggaaactactttgatccagcccgaagagcctgcctcccagtggccataagtgcggcccatcagtgcagctgtgtgctgccggataatgccaccctggcgaatccaagcgactgcgagacatatttccgctgtcactccggacaagcggagctggtccagtgtccatcaggagactactttgacgaacgagtgagcagctgtgtgccggatcacacgggaatttgcctggaaaagcccacaatgccgccgacactcacagagcaagctcttgccatggacgagtgcatccggacgggcagccgcctggcaccgcacagccgagattgccaacgttactacatatgcgccaaaaagagggtgctggaaatgcgctgtccgaggggtcagtattttgacgttgtacggcgctactgcgctcttgatctgggaagcgaatgccaggctctgcaggccgagaaacaagacctggagctggaggagaatattcaggtagagctggaaaagaatatccagatggacattccagcgaaacataaggtaaagaatcagggacacaagccggttcagaagaactccgaaaaggaagtggtccgcgaccaggaattaccagtgccgcaggctaatgacaaacttccacagccctcagccgaggcagtgagcagctacgataagttctcgtcgaagttcatttctatgtaaccgattaattctaagcgacattcattaaatataacaatatcagacgataactataaataaagggaactaaataattttgtatttgatcgctgtattctactatcaaataaatgtatatttgcattcaaactgaatgtattctatttcaaattatatatatattaactacatttcctaaaaagaactacatatttttgctctaattgactaataggaattttttttaaccttttatagctttaattagttcaatcatttgatgttttagggacttaccttgaaagaagacgggcagtaaggagcatgattcacagtccggcacaaggtggtgatgcactgcggcagcggttcgcttgggaagatggtgtacccgatgaccatctccagaattgtgaggcactgcagaccgatttcgtttacggtaacgctacagctcagatcgcaagcgttcctggcgaaaaaagggatcttcaaacaaaagatgtgggttaaagagtgcgccactcactgcacgatgcccacaaggatgtctttgtccagatgcgccgcattgaacttgatcaggttgaccagaatgtcaaggtagggggtaagcagattggcctccgtaatggctgggatccagagcagcataaacttgccaatctgtgggaggaagaaagtcagttaggtcaccattcatttaagtcagatctagggccaaccttctcctcgaagtttgtgatatccttcccattgtcggtgagggtgtcgagcagctcaagaaggtgacgcagatcttcgcgggcttcgtggttctggatgaccaggaagaacttctcccgcatgatggtcaggttcttgtactgtgtgtgaatgagccgtttatagaagctcaaggcaatctgccgcgtttctgccggcttgttgggcacgatgagatcgttggtgagattgaacagaatggtgatggcggactgtggggacgaattacgagaaataacacatgttcatggcatgg

SEQ ID NO: 41456 - DNA, 1090 bp, DROSOPHILA
tcccagcataaacgcgcatctgacgaaaatggagaatcgcttattagttatatggctgcttcttgccatcgccacggcattggttaaggccgaacttacagatatatccgctatctgcaggatatccgatccctggcaaatgctgccccacaaagaccactgccaaaggttctatgtttgcactggcgacgatgacatgcccttccaggagttcaactgtccggcggagtaccattttagcaagaagctcatgatttgtgtacccggagcctgcaccgatgaatccgtattttgtggacttacgaatagtgtggagcgagtccaaagcgattgcacgcgataccgacaatgcctggagggaggatccttcgccgtggccaaatgttccgtcggaaactactttgatccagcccgaagagcctgcctcccagtggccataagtgcggcccatcagtgcagctgtgtgctgccggataatgccaccctggcgaatccaagcgactgcgagacatatttccgctgtcactccggacaagcggagctggtccagtgtccatcaggagactactttgacgaacgagtgagcagctgtgtgccggatcacacgggaatttgcctggaaaagcccacaatgccgccgacactcacagagcaagctcttgccatggacgagtgcatccggacgggcagccgcctggcaccgcacagccgagattgccaacgttactacatatgcgccaaaaagagggtgctggaaatgcgctgtccgaggggtcagtattttgacgttgtacggcgctactgcgctcttgatctgggaagcgaatgccaggctctgcaggccgagaaacaagacctggagctggaggagaatattcaggtagagctggaaaagaatatccagatggacattccagcgaaacataaggtaaagaatcagggacacaagccggttcagaagaactccgaaaaggaagtggtccgcgaccaggaattaccagtgccgcaggctaatgacaaacttccacagccctcagccgaggcagtgagcagctacgataagttctcgtcgaagttcatttctatgtaa

SEQ ID NO: 41457 - protein, 353 aa, DROSOPHILA
MENRLLVIWLLLAIATALVKAELTDISAICRISDPWQMLPHKDHCQRFYVCTGDDDMPFQEFNCPAEYHFSKKLMICVPGACTDESVFCGLTNSVERVQSDCTRYRQCLEGGSFAVAKCSVGNYFDPARRACLPVAISAAHQCSCVLPDNATLANPSDCETYFRCHSGQAELVQCPSGDYFDERVSSCVPDHTGICLEKPTMPPTLTEQALAMDECIRTGSRLAPHSRDCQRYYICAKKRVLEMRCPRGQYFDVVRRYCALDLGSECQALQAEKQDLELEENIQVELEKNIQMDIPAKHKVKNQGHKPVQKNSEKEVVRDQELPVPQANDKLPQPSAEAVSSYDKFSSKFISM

SEQ ID NO: 41458 - DNA, 5068 bp, DROSOPHILA
gagtgatatcaggccccaaagcacttttatatttaaagtcggcacttgaacggatggcggatcggatattattggatcgggttggattggatcatcctccaaagtgacatctagcatgccacacatacatgagtaatctccggactgtctgcctacgtcataaatcagccaaaaatctaacttgactcgatgtgtctgtggtgttgccgagctttgacggttcctccgcgtcgattgggctcgttgatttataacaagttgctgccgcttcttctccggattcggtgtctggcttaattgcttctggccgttatgattgtatcgacacaaggttagtcaattgcactaggcaggcaggcacagggtctcgattacttgtataggaagtgttattcgcgagtttggccaaatcggaaacgatcatcatcttgttcccgagccgatgcaaatgtacatttatctctcactcttttatggcattcccggccattaaaatccccatcggccaattagcggctataaacgggcatatcgtctggaccaaagtctgagctcttctatttataaaatcaatgcccgatttcatcccagcccagggaccgaccgcacggcatgatgactgggctggttagaatcgtgatcgtgatcgcaatagccacgcatgacaggtgtaatggcaatgtcagtccatctggacggcgaactatttttatcggcccaacgaaagtgaacatcacatttagcgcttcgcagtcgcggcttcaaccggtatatgtatgtgaatgtgagtctgaatctcagtcacagacagccgatatatatggccatatatttttctacttttgttctgtttcgtcagtcccgcacatgcgatgattgtggttttgtttttagtggtattccattttattctatgcgtagtcaccgacgaccgctgcccgctgggactacgtataaaatcagcataatcagaaattctacccagcagttcgttctaagccatcgacggagccggacgctcatcgcgcttttggcctggaatattcgatcgggactcgcggtgcccatcgcatctcaagtaattgtgcaattcgtttgtgagaataagagttgcaagatttactacgccaaaaataagtcaagtgaaatatattaagttcgaaaatccgtctgcggataattaatcgtgtctgcataagataagaggtatgacaagagagggtatcatgcgagtatttggtttggcgttgttctatatttgcacgttcgcttcctaagtcttttgtttcgtatggggctgaaaggaagcaaattcgcttagccaaatgaaatcgaaatttaaatcaatctttatcacaactggatttggcacgctctctagatgtcttatgtagctctgactcggtttcccccttcctagacacttccgcctgcagtccagtataatttggataattttggccattttcggcaactttgtgaactgaacgttttatattttttgcaaattttatgaacgtcttaagagttgaatggataaaatatggtgttgacttaaatcttaataaagagcagtaataaataatgacttgtggaataactttcaaagacaattaaacggaatgggtgcctcttgttttatgagcagttaaaattaggtaaagtaatatacgtgacttaaaaacataagattaggttagtcggatttaagccggtaagatgcatgtatttatgcataatattatggaatctttattaaaatttgtatctaggtatttcatcagaatactcttcttaccttaccaaattgattagtcatttcgctttatctatggctccaccacatattttgtaccatagcaatcaattagcataacgtggtcaatattattaaatgccgaaatgttaaaattagtcgacttcaagccgcctatgccaaaacaaaagccaaaaacagccaaaggtgaataaactgaaggggcccgagcgcggcttctgtgtaatttcttggccaagtttggcgaactggttcaaagttgagcacgtcaccagcgaaaccgaaagtgtgcggtgtggagtggggttcgtttttacagacctggtcgagacttacacggctttttatcttatctctctctcgccacagctgcctttcgagatgtcatcgagtcgcttaatttgctttggcctgctcttcctgctcgctttcggccatgtgacgtcacagcgcacgtcactggacgtggctctgaagaacgtctacagaccgctgcgacttctgggcctggcctttaccggtcgatctggcgacgatccacaaaacgtgcagcgcttacaaatcgcgggggtaagtccagcagacaataatgcaaccattgatccggatttggttccaatactttccgattggcttatcgttggagttaagaacgcaatcgaaatgcggtcagtgtactgttatttcaatttaattggccgacagcgctttagatggcaaaaatgccccacaaaatgtacaaattatacacatacgtttttattaaaaatataagaaatatcaaacttagatttcatgtaaacgagtattgctgtctcttatggattgagaactaccaaactgtttcttcttctactttggatgatttgaagaacataaatatttcaaaatattaattttgatattccgttttcgatcgccgacagaaaacacaaaagtcgaacccccgcactcgagccctgctggagttctgcgatgcggaccacggacccggaaagaggagcccggagcgacccaccagtgtgcatcgcttgcgacccggtgacatcgatgtgatcggagcaatgggtgactcgctgaccgccggaaacggcatatttgccacaaacttactgcatgtgaccgtggagaacaggggcgtggtgtggtccattggggggcagtacgactggaggaagtacttgacgttgccaaacatcttgaaggagttcaatcccaacctgtacggctatgcgatcaaggacggcatctcgacggaccgctcctcgcgcttcgatgtcgccgaactggccgccatgtccagggatatgccgcacatggccaaggtcctggttcggcgcatgcaacgcgatccgagggtgaacatgacctccgactggaaactggtcaccctcttcattggcaacaacgacttctgcacggacatctgctactatccagaaccggagaagaccgtcgactggcacgagcgcaatatgctgaagacctatcgctacctcagggacaatgtgccccgcctcatgctgaacatagtgcccgcacccaatctccgcttcctcaccaacctcacgggtctgccgcccatctgctacagtaccctgcgcttcgagtgtccatgtctgatgggcaagggcaagggccagctggattatctggagggcatcatgaagcgctggatagccaaggactttgagattgccaacagggaggagttcaacaccgaggtgagcttaacttttggtcgggatgttacacatttaagtgctaacaattgcttaatattggaattttattttgatatgtttcgaactcattgaaacatctttaatcttcttttttcagacatttacgataaatgtacagcccttctcgcagttccaggactttccgcgcacacgctccgggcagacggatacccgattcttctcggaggactgcttccatctcagccagcgaggacatgcggcggcggccaactccatatggaacaatatgctggagctgcccgggcataagagcggattcgctacccatctgttcgagacctttcgctgtcccagcgagatgcgcccgttcctgatcacccgggagaacagtcgaccggagttcgtgatctcatccaaaaaatagtggggcccgttctcctccgtgaattactccctgtgatatcgcacctaagtcttcttcgctagcttgccagtgtatttgtagtcctaattagccgtatgccaagtgtaaatacaaaacttcgacgaaaatcagaaagtcaaataaaatgatattcttaaattacgtgagtgaattttgcatggcgaatttccatatcactagcatacgcggtgggcacggggatttctgttggcagagtacggaaaacttctatggaagtacaagtgatccataacaatgagaccatacaacgtttgattacctatttatatgctatataatattataatatcagctcggattggaaaagttgtaattatacaacacagcgagaaacaagattgctaagaaccagagatatttccgatcttagtatcttatcgaagtatcttagtatcttgaaaatatacccgtttcagtcgaataacttttctcacctttacatatttaaaagttcgcttaacacgctaaccattcattttgatgaccgagagatgtgaagtgtatcaagtggtattcccaaatccaaatagcacctcctaataatgccataaacctaatgagtccgtgaaaataagagtcaaataatagtaacgtttattatgtgtgtggggcctgttattatgatcgccctaacaaattgtttctttcgttctgccaacatggtgatgaattgctcacctgtgcgatggatgttcaggaaaatgaatggcccattaagccagtcgtcatatgtgtatttattaaaacatctcccatctcgttataaacttgcaaatcatgataagcgataagctgtggaactgtggatgacacacgacacgactggccaaccgttgatgggcgcgtcataaaacctgttacaattaatattttttattttactcttcccagccaacgaggcgcacgcaccagcgaacatcaataaagccggatcagatcataattgtggtttaattcggtggccgggcatatacagcgaattgccgcgtgttgtacgtgttttcgagtgggccaatgatccccgccctgccccctcgcctcgtctccaacggtttcgccgcctggtgccaaaaagtagcaacaaagtttgagtaaacaaatacaaaaatatacactact

SEQ ID NO: 41459 - DNA, 1654 bp, DROSOPHILA
catcgacggagccggacgctcatcgcgcttttggcctggaatattcgatcgggactcgcggtgcccatcgcatctcaagtaattgtgcaattcgtttgtgagaataagagttgcaagatttactacgccaaaaataagtcaagtgaaatatattaagttcgaaaatccgtctgcggataattaatcgtgtctgcataagataagagctgcctttcgagatgtcatcgagtcgcttaatttgctttggcctgctcttcctgctcgctttcggccatgtgacgtcacagcgcacgtcactggacgtggctctgaagaacgtctacagaccgctgcgacttctgggcctggcctttaccggtcgatctggcgacgatccacaaaacgtgcagcgcttacaaatcgcggggaaaacacaaaagtcgaacccccgcactcgagccctgctggagttctgcgatgcggaccacggacccggaaagaggagcccggagcgacccaccagtgtgcatcgcttgcgacccggtgacatcgatgtgatcggagcaatgggtgactcgctgaccgccggaaacggcatatttgccacaaacttactgcatgtgaccgtggagaacaggggcgtggtgtggtccattggggggcagtacgactggaggaagtacttgacgttgccaaacatcttgaaggagttcaatcccaacctgtacggctatgcgatcaaggacggcatctcgacggaccgctcctcgcgcttcgatgtcgccgaactggccgccatgtccagggatatgccgcacatggccaaggtcctggttcggcgcatgcaacgcgatccgagggtgaacatgacctccgactggaaactggtcaccctcttcattggcaacaacgacttctgcacggacatctgctactatccagaaccggagaagaccgtcgactggcacgagcgcaatatgctgaagacctatcgctacctcagggacaatgtgccccgcctcatgctgaacatagtgcccgcacccaatctccgcttcctcaccaacctcacgggtctgccgcccatctgctacagtaccctgcgcttcgagtgtccatgtctgatgggcaagggcaagggccagctggattatctggagggcatcatgaagcgctggatagccaaggactttgagattgccaacagggaggagttcaacaccgagacatttacgataaatgtacagcccttctcgcagttccaggactttccgcgcacacgctccgggcagacggatacccgattcttctcggaggactgcttccatctcagccagcgaggacatgcggcggcggccaactccatatggaacaatatgctggagctgcccgggcataagagcggattcgctacccatctgttcgagacctttcgctgtcccagcgagatgcgcccgttcctgatcacccgggagaacagtcgaccggagttcgtgatctcatccaaaaaatagtggggcccgttctcctccgtgaattactccctgtgatatcgcacctaagtcttcttcgctagcttgccagtgtatttgtagtcctaattagccgtatgccaagtgtaaatacaaaacttcgacgaaaatcagaaagtcaaataaaatgatattcttaaatt

SEQ ID NO: 41460 - protein, 424 aa, DROSOPHILA
MSSSRLICFGLLFLLAFGHVTSQRTSLDVALKNVYRPLRLLGLAFTGRSGDDPQNVQRLQIAGKTQKSNPRTRALLEFCDADHGPGKRSPERPTSVHRLRPGDIDVIGAMGDSLTAGNGIFATNLLHVTVENRGVVWSIGGQYDWRKYLTLPNILKEFNPNLYGYAIKDGISTDRSSRFDVAELAAMSRDMPHMAKVLVRRMQRDPRVNMTSDWKLVTLFIGNNDFCTDICYYPEPEKTVDWHERNMLKTYRYLRDNVPRLMLNIVPAPNLRFLTNLTGLPPICYSTLRFECPCLMGKGKGQLDYLEGIMKRWIAKDFEIANREEFNTETFTINVQPFSQFQDFPRTRSGQTDTRFFSEDCFHLSQRGHAAAANSIWNNMLELPGHKSGFATHLFETFRCPSEMRPFLITRENSRPEFVISSKK

SEQ ID NO: 41461 - DNA, 5131 bp, DROSOPHILA
tagattttaatctccattttaaatgggtcgcaaatcgaatataaatcaaaagatacagtcaaattactgcagattgttttactagccgagctgataacaaaaataaaatagcaaactgcaagataatgtgcaaacactttgaccaaaatgcccttatcaatattaagacaattgagtggcaacaaaaaaaatagaaaatagagttgaaaacaaggtgataattgtttggttacgaaaacgacaacttgttcgctatgaacccagtgtttaaaattcactatcaaaacaagtgaagttgacatacacatgaaaatatatcttacttaaaagtaacttttataaataataaaataaatgttaatattatttaaactactggcacttacgccttttggtgacttcatcagcatgcattcacgactcgagcggttggagctgcttttccggggacacctattgacgctccttggcttgcaggccggagtcgtgggctttcgggaacacttgggcactattttcttgcggccgcatcccatatgtttgagtttctccgattgacgccgatgacgcgaagtggagcttttgctgagacaccgtttctggtactgcagggtattaacgaagggcagaagataaagttcgccggtcagggggaaagtgtgtaatccctaggaacttactttcgatcgatactgattcttttctcgcgaactcaatgcattccagtaccccgctccctgacgcagtgactcctccatttggaggtgcggggatttaagatgtatagccaccgcgtaacttaaaaagccgtttggatacggtgccatctctacttatacttttcaactaacgtactgaaatttaggatgctaaactaagaattacgtacaaaacattcgagcttgaaaaattgaaaggtacaaatttgagttgagttgctgttgctaactgatagaagtgaaatctcaaaactacttgtttaataataattgccagtttctggatttgatacacaactcttcgttggccttagtttattatgatgtatatattacaatttggttaaaaactgttcgcttagcctagcaacaagcggtttaacttcaaaacttacagataatttgtcattacacttagccgtattagataagcgagagtcgttccgttccgaggaccctttctccaaatttatattgcttcgactcctaaatatcaacttacgaactaattgatttatattcacgttgcgcatggacctgcatccatgccagtaacttggctaatactggccactcccgccgatccccaaatcaccccgatccccccaaggtccttggccaactcctccctcgattatcctcgccattccccaaacacgcaggtgaaaggatttaggttttggtttggttctagtagtaggcctgctttatggccgcactggtgataaggaaagcggagccaatcagcatgaaggtgatgattttgagagcacttggtctaccggaagaatctgcgaaaagcgtgacattcatagatcatccttactcaattggttttgcaaggacacttacttttcttattgggcatcacgcgaatgcattgattctgattggcgttcgccgagtagcccagcttgcactggcacacggagttgcggcactcgacattctcgggatccttttctacatagcactcggtggccttggtgcacgactctcccagctctgcaagattgcaacatattagaattattacaaataattaaagaaagcttagcgactcaattacctcgcttcgtctcacagactccgttcttagcatgctgctcatcgttgcatccacacttgccctccgaattgcagctcgccaggagcggcttgcactgctcatcctcgacgcactcgtcctccagctcctcggctataatgaaatgtaatgtggggcagggcataattttgctgctttgcatttcagcttctgagtactaaccctcttttaggcactcatccttaaagtgcacgtatccctttcggcactggcaggtgcgcgactgatcctcctcgtccttctcctggcattcggtgttctcaggtatgcagtcatcctccaccgagcagtcggcaccgatgccacgcatacactgatcgtccttctcaaagtagttgtccgcacaaacgcacacgcgattggagcagacggagtgatccacaggacagccatcgttcgactcacactcggctcccaggccacgtttgtattcgcagagctgcttgatggcatcgtagagagcgtactcctcgcaggtgcacctcctcggaatctccgggtggcaataggaggcgccaaatggactgcattggctgttcgaggtgcaggataagtggtattgaatggctgttttgatggaaaaggatatatcttaagtgcgattcagcagctagcgttggaaccacctacgttttctgcaattgcgcagatcccgctcgtagaaataattcttttggcaattgcaagttttggtcaactgatcgaactcgtactcgcactcatccgtgctctccgcaatttcccccagttctaaagaattttcatttcagttaatttcattaatagaagaattaaattgggggaaacccagtttactcaccggcaaaacattttccattgcgggcatagtaaccctggcgacataggcaaatattcttggaacaaatcgagtgcggcagacccgagcatgtctttccattatccgtgcagctgctgccatctaaatgggaaaaaaaatagttgaaatatatttaagattgcctaagcattgagagacttcatttttttgggggcattcttggatactcacacttcttctcatcggcatcgtcgtcatcgcggctggaacccagcgtggagtaggtctttatatcctcgtcatcgaatcggaagagggcgggcaagcggcgtctttggccatgggcgtgtctctggttgcggctggagttgcgcctgctactggtgctcgtggaggcggtggctgtcgttgtggtggtggcggtggccgcattgcgcacacttcgtcccacctccctcagctcgtacttctcgatgctcgtctggacggcaatctcgtgggatcggggcgagatgagcggctcggtgtcgccattggtgagctgggcgaaggacacctgggcggcggcatcgctgtgagtgggcgggggggcgtgtacaaaggccttggttagctgccttcggctactgaaagcggtctcctgttccggatcggcagtctcggtgatcgcctcggctgtggttgaatcatcatcctctggcgagcccggattggtggtctccgtttcctcggtctcgccacccggagtcgttgtgatctcgtccacataggtgcatactaggccaacgcactcgacaccggcgcccagttcatcacagtccgcgttaacgacgcaggcatcgttttcttctgaaaatcaggcatatatagagccatatagagccatatataccatttacaataacttctcgactaacacatacccattgatttgcgacggcagatgtttccatatctgttataatagccatttgcacagccgcacacgttttgctgacaacttacagacgcacgatcgtagccaaagtagcagtccaagtcctgtttaaaatcgaaaaatcatgcgaaattataaaggatatgtgcacggttgattgggccgtggtctcaccgtttcgcaggactcgccgagtccgttcagtgggcgacacttgccacgcagatagttctggccatcggcgcaatcgcagaccccggctttacaactggcccccgttggcataagattgcactggacgctgtcgtcgcacttttcaccaatgagcgacgtggccaggcattgggtgaagttctccgcgagcaccgtatcgaatgtggagcactcgcactggccgctggcaaaatcgcagctagtaccgtcagctgtgcagtccgcctcggtttcacatggccaaaatacggccaacacgccgccgtcgcctgaaattggttaagaaatgggttaggacagcagcctgtttggttggttaaaaattaacgtatccacggtgcctgtgaccacacattcggatgtgtcggggcgacccactttcggctgactctcaattattcaaaacgggctccagttcacacacttgattaaggagattttcattaactttcgatgggttgggacaattttcctaatcacctatgtaccatagaatccaatcagcaaaatccttaaaatattatagagactagttcaaagaactcactaaaaactggaagtgaaaactagatttattatgttctataacatatgtatattggtggatattcaatatcttcttgtctcgtttttaaaaataaaatttgttacattttctgtcccagctttaaactgattatcatttacatttgaaaatcgccctactaaacctcttccttgatccgataaatttgtaattggctaaacatcctggtcaatctaggcagtgccacgcccacttatctacctgtccagctgattattacccttacaaaaggcaactctactaccctttactataagcaaaaattccgagcgtcgcgacgtgcaaagcttcttttggcacgcaacgtgtcggggccgcaatttattacgtatacgccaacgacttccggatgaggttgcggcatcgaaaaaatttccatataaaacagtatcaacgcggcaacaaacaatgcgaacgcgaaaaattgtaataacaataacaatgccaccgaaaagaaaaaaaaaagtgaacttcgctggacgctttgccactttaatttccattttccgtggccggcaaaacaatttctcaaaccgcaaaggaccttgggacctggacattcgtgagagtcctttccaccgggggatggcgttgctcgttgagtggtggggtcaatggggcaaagtacttgaccttgattgcgtttgcattaattacttgtggttctttaatgttatgactgtcgtaggcccacatttatttgtccactaatttggccaactgccctttcgatggcctcacacccgattaaacgtggctttaattcaat

SEQ ID NO: 41462 - DNA, 2503 bp, DROSOPHILA
atgtgtggtcacaggcaccgcgacggcggcgtgttggccgtattttggccatgtgaaaccgaggcggactgcacagctgacggtactagctgcgattttgccagcggccagtgcgagtgctccacattcgatacggtgctcgcggagaacttcacccaatgcctggccacgtcgctcattggtgaaaagtgcgacgacagcgtccagtgcaatcttatgccaacgggggccagttgtaaagccggggtctgcgattgcgccgatggccagaactatctgcgtggcaagtgtcgcccactgaacggactcggcgagtcctgcgaaacggacttggactgctactttggctacgatcgtgcgtctgtaagttgtcagcaaaacgtgtgcggctgtgcaaatggctattataacagatatggaaacatctgccgtcgcaaatcaatggaagaaaacgatgcctgcgtcgttaacgcggactgtgatgaactgggcgccggtgtcgagtgcgttggcctagtatgcacctatgtggacgagatcacaacgactccgggtggcgagaccgaggaaacggagaccaccaatccgggctcgccagaggatgatgattcaaccacagccgaggcgatcaccgagactgccgatccggaacaggagaccgctttcagtagccgaaggcagctaaccaaggcctttgtacacgcccccccgcccactcacagcgatgccgccgcccaggtgtccttcgcccagctcaccaatggcgacaccgagccgctcatctcgccccgatcccacgagattgccgtccagacgagcatcgagaagtacgagctgagggaggtgggacgaagtgtgcgcaatgcggccaccgccaccaccacaacgacagccaccgcctccacgagcaccagtagcaggcgcaactccagccgcaaccagagacacgcccatggccaaagacgccgcttgcccgccctcttccgattcgatgacgaggatataaagacctactccacgctgggttccagccgcgatgacgacgatgccgatgagaagaagtatggcagcagctgcacggataatggaaagacatgctcgggtctgccgcactcgatttgttccaagaatatttgcctatgtcgccagggttactatgcccgcaatggaaaatgttttgccgaactgggggaaattgcggagagcacggatgagtgcgagtacgagttcgatcagttgaccaaaacttgcaattgccaaaagaattatttctacgagcgggatctgcgcaattgcagaaaacccattcaataccacttatcctgcacctcgaacagccaatgcagtccatttggcgcctcctattgccacccggagattccgaggaggtgcacctgcgaggagtacgctctctacgatgccatcaagcagctctgcgaatacaaacgtggcctgggagccgagtgtgagtcgaacgatggctgtcctgtggatcactccgtctgctccaatcgcgtgtgcgtttgtgcggacaactactttgagaaggacgatcagtgtatgcgtggcatcggtgccgactgctcggtggaggatgactgcatacctgagaacaccgaatgccaggagaaggacgaggaggatcagtcgcgcacctgccagtgccgaaagggatacgtgcactttaaggatgagtgcctaaaagaggccgaggagctggaggacgagtgcgtcgaggatgagcagtgcaagccgctcctggcgagctgcaattcggagggcaagtgtggatgcaacgatgagcagcatgctaagaacggagtctgtgagacgaagcgagagctgggagagtcgtgcaccaaggccaccgagtgctatgtagaaaaggatcccgagaatgtcgagtgccgcaactccgtgtgccagtgcaagctgggctactcggcgaacgccaatcagaatcaatgcattcgcgtgatgcccaataagaaaaattcttccggtagaccaagtgctctcaaaatcatcaccttcatgctgattggctccgctttccttatcaccagtgcggccataaagcaggcctactactagaaccaaaccaaaacctaaatcctttcacctgcgtgtttggggaatggcgaggataatcgagggaggagttggccaaggaccttggggggatcggggtgatttggggatcggcgggagtggccagtattagccaagttactggcatggatgcaggtccatgcgcaacgtgaatataaatcaattagttcgtaagttgatatttaggagtcgaagcaatataaatttggagaaagggtcctcggaacggaacgactctcgcttatctaatacggctaagtgtaatgacaaattatctgtaagttttgaagttaaaccgcttgttgctaggctaagcgaacagtttttaaccaaattgtaatatatacatcataataaactaaggccaacgaagagttgtgtatcaaatcca

SEQ ID NO: 41463 - protein, 697 aa, DROSOPHILA
MCGHRHRDGGVLAVFWPCETEADCTADGTSCDFASGQCECSTFDTVLAENFTQCLATSLIGEKCDDSVQCNLMPTGASCKAGVCDCADGQNYLRGKCRPLNGLGESCETDLDCYFGYDRASVSCQQNVCGCANGYYNRYGNICRRKSMEENDACVVNADCDELGAGVECVGLVCTYVDEITTTPGGETEETETTNPGSPEDDDSTTAEAITETADPEQETAFSSRRQLTKAFVHAPPPTHSDAAAQVSFAQLTNGDTEPLISPRSHEIAVQTSIEKYELREVGRSVRNAATATTTTTATASTSTSSRRNSSRNQRHAHGQRRRLPALFRFDDEDIKTYSTLGSSRDDDDADEKKYGSSCTDNGKTCSGLPHSICSKNICLCRQGYYARNGKCFAELGEIAESTDECEYEFDQLTKTCNCQKNYFYERDLRNCRKPIQYHLSCTSNSQCSPFGASYCHPEIPRRCTCEEYALYDAIKQLCEYKRGLGAECESNDGCPVDHSVCSNRVCVCADNYFEKDDQCMRGIGADCSVEDDCIPENTECQEKDEEDQSRTCQCRKGYVHFKDECLKEAEELEDECVEDEQCKPLLASCNSEGKCGCNDEQHAKNGVCETKRELGESCTKATECYVEKDPENVECRNSVCQCKLGYSANANQNQCIRVMPNKKNSSGRPSALKIITFMLIGSAFLITSAAIKQAYY

SEQ ID NO: 41464 - DNA, 32548 bp, DROSOPHILA
ggggcaatgaggccgtatcgtgcccccttctagcggcgtattaagtcgattgcaagagtctcaaatgtattccggctttagtgctcagcttgtttgtccaacacttggcacgcacacgcagctccgcaggtacagtgtacaccctgtaatcgggatcgtagcgaaagcatatatttaatacatttttgataaattgtttgttagttttccctactcatcaattattaacgttaagttgcctacttatgtttgctattcgtattgaaatcatattatattcaattaatatttacttaaagtaaacattgcctttttaaaaatatatatattttcgttttctaaagctagttaattgagtacccactgtatgtggcagtgtccttgtacttttacataataaatcaaaccccaccgaaaggaacggaaatgaaagtaaggcaaggaagaggaaggaaacgaaaagaaatgccactgcggaaagccaagaaaagaaaagtgcatttgcacgctaacaggagctgttaccatttcactgataagagccggcaagcgcgaacagctgttcgagaaaatcctcggagagaaagcagccaaggatatcgagagcatttctcttcgctgtaaacgggcactgtaaaggcggccagttgttgactgggaactaagccaattgcacaatgtgggccgaagttgatgtcgtgttgctgctgttgctgctgctgctgctgctgctgtgtgtgttgcaacacgagcaactacaagtgcaactacacaacccttcgactgcaaggacttcggcagcaacgagcatgtatatgtattccaccgaacccaccatgtactgcgtttatgtgttgctgctgcttttgcctttgacgctgctgctgtcgccgtgctgcgcctgctgctgctgcgtttcgttggtgctgcgacagcagagtcgttgcaacaatcgcagcttgcacatccagcagcagtcagttggacgcggcggctccttcagcaaggacgcacagctcacacaatcccttcgaaggaaatcagcagccgacataccgaacgacctgccacaacattccaattcaaatccaatccaatccagactttgaagtcctgtaaagcgttttacattccgcttacataaatgctagagcgctgtaaaaatcggcgctagaaacgccaattagccaaacatgttagccatgttttagtcggtcctttcgcgcttgacttgttttgcaactgtgtgcgtacgtttgagtgtgcgagtgccgcccgattttgtttgtcctttttttttctgttggtgtctcaccgagtgccgttttaagccaagatactacagacatactagcgactagctaatacatattaacttgttgtgccagcgttttgtgtgtgccagtcagcctctgctgagtgcattttcattaaagtcaacaagttgcagccgcataaggtcaaataaaagcaggtgagtctgtgttcccggccaacaagagccaggtattcctatgtaaagttacttaaagtgcaggtgatatgctcttctgagagcagattttatgttgttcaaattgtattaagtggttttgtggaatacgttaagggcacaggtacaaaaccaatattaaaaaaaaaacatttgtttgctcattttctttgtataaatatttattttaactaagtcttttgaaaattttataatgtgggttctaaaaatatttaaagtgcattctcactatgtgctatctattatgaagtacgtgtttatcaattaggttttatatttaaaaatgttagataggttcgaaaacgttggggtttccaagttttaatataaaataaatatattaaaatatttgagtgagtatccaagcagttaatatctatggtactgcaagaaaattcactacgttaacacatttaaaaaatattcatccattcacatcagtacagatgtataaaataattaataacaggtcagacaaatatatggtccttatttacctttaataattacaaagaatttttagaaaattaaatcatagaatctactgacagaattaagatatacctaaattaaattacaataaattatttttctaaaccacattgaggtgttttgcaagaatactatactgctaagaaacattcggttcagttataacaacaaaatcttcgaaaacttttaactagcaaattaaattacaacaaaacctaaagttggctgagcacaattcaaatttcagtttcttatattttattagcaaatatcagtttacttcatctgcatttgattcagtttattcagaagttcagcagaccaaggccaattgcaaactggctaatccgtgttaccaatttatattcaataatatatttgagtactcttacatctcccccggccaacataaatttggtttttaaaggcacccaaaaatattttgacaaattatgaggtaggaatgtgtagtaaatatttccagagattaaatgacaagtctaaagggaaaatatatctacgctcttaatgatcctttgtaataactacaaatctgtgggccgggtgcatcctggccgtgtcctggccatgtcctcaatttcgttgagttacaaaaggtttaagtaagtaagcaaaacggtaggaatcgagtaatcgctctcaggggcatagtttaatattggatttgtaatggaaatcaatattgcccgaggaaaatttatgcagaggccaacaaagaaagcaaaccattcaaattgaaccgggccaataaaattgcagtgcgaagtttgcgtccgagtttgatttgagttgtgctgaatcgtcagccttggcattgccaatttcattaggggccataaagggaaagagtccgcttgtaattgcaattagttttatcgtaacttgcagttaaataatcaaaacattttcccaagcttccgtccccatcgtccgtccaccgaaaactctttgtaatgcaaaactttttaatccgacgccttggtttgtttacacgaactgccagcgccccgcccacagcgcccccgatccctatccacactccagacaataacaacaacgttgacaataaaaacaggattgacaggatacaccccaggaagtcgatacgcttaatacccttgcacgaaaagtgcctaaaaatagatgggaatctatttcggtagaaattaggatgatttaagaaagttactcttattatatgagttaaaataaagtaaaaagcagaccatatcaactttaaattaaaaaatgtgaactcaaacgatgcaagagtatataatatttcagttaatcttattatgaaacagaaaatcaagttagagcttgtaaactaaatggattaggaaaaaatcgggagtatatatattaatttttataatgatttggcaaaattatattttaaatttcattagataaatagatacatctcaaaggatttccttcgtagaaaaaaattgcttgaaggaaatgctgaataaactctttaaatatttttaaagtcgcatttgtttaatacaactcctatacagttgagcatattctgaatagcacttacaaaaaagtgcttaccaaagttactagttttacttcataaaacagtactagtgcggctgcattttcctgagaggcttgtaaagttcttgttgcagcagtgcgactccctttcagggtatgaaaataagaaaaatttgcatatttacacaagacaatttacacactctcccagtcggctgactgagtgactgagtgaagggcccctgcgaggcagggacgcagttttccagcggggcgcgggaatgcgagattgagtgggtggattgaggttattttgtaaattgtgtgtaagccgaactgctgcgactgcagcctgatgaacagccagtgccagaaccgttacaaaagtccaacaagttgggaggtgggaaaagtcgggggaagcacgggaaaatatgggtaaaatatgggtggaagtaaaaggggggggggtggcttggggccaaagggcggtctgtaacggatgacaaggacaagtgaagtgaagtgtcgagatggagctgcactggcggctgctcgtgttgttgtgcggcatgaattggggatatatatacatatatatatatgtatgaatgctagtgctcacaatgccacaacatacggaagtaattcgattttgttggcagaatgatgatggcccggcccccagtgacagacagcctcgtagaaatcccagagccataaccccatacagatgcagaacccatagagaacccacagagttccacaggatggcagcatttcgagcacattaaaaacaacttaatatctgtgttgtgtattttattgggtctctttccggtgtcgagcccattatgaggcatttcccagcaaagtaatttaattatttatttacaacatggaaattaacaaacataactcggatggtctacgggcgacacattgtgcaaattatacaatatcaacattgcataagttgagattggggaaggtggatcgagggggagaaaggcaacggacacacatgtgctgtgtttggggtttttacaaatttcatttccatgcactcgacaattacagcatttaatgtttttacactttattgtcattaacagattttattttctatggttctgtgtatattttcacgcgattacgtgtgtttttggccgtgtttacatgtgttcatatgtgcatatgtggcttggctaaatcggaaatagtcataatatagtattatgggctatttgttgagtgcacattagataaaagctacggcgaaagcatctaaatcaactgcggtaatttattacaaattaacgaaacataaaaagtgctcactgtaaatggaccttatgcaattaaatgctttacagaaagtgtgagtaaattggcaaatatggatatggataattcattttattgttcgtaataacaatgtacactttacttgatatttgtgctaaaaacttggatgagtaacaaggtcgaagcttctaactttaattgaatcgtagcaagttagcaatattttcataagccaagttgcttgcgtaattggtttacccatcgcgaaattggccaatttattggctaatctaggattagcctaactttcgcacttgaggtcgttgtaaaatgttacaccacaaaagaactgctcaaaagtcacggatagttaaacgctaatgccgcaaagtaattcaaaacttaaagcgcacttttcggggctctcgacgcggttttatttgagttttttttgcagtaactctggcatgtttctaatgcttttgtgccagtaagtctgtgcgtagcactaacaggaaaagttaagtaaaatgaaatgaatgcacaaatgcttttttgtttgaattgtctgcagtttgctatcaccagcacgccctttgaccttgtaagctggtcttaaattttgcactgacagtcaaacgaaaagtgaaatatttcaatgaaatcattttcgaatcaaataatgcacaagccgtgccaaagttgatcgagattattatatatgggctataactgcactttaaaatattattttagattgcctatctgcgaattggaaacgaaatttcttgcaataaaaatgctggcactttaaactcgaatcgcacatttaaccttaggccaataatgataccagaagtctctctaattccatttgaattgggaataagaccattggagatatgcaaatatttggcttataattgccaaccaatttatcggtttgcttggacacctcaactgtatacacttttcaagttatatatttctttcttgctgtcgtcttgccttctgccggttttttcgacaaacaattagtgtgccaaaccacaaattgttaaatgaatttctgtgcacaacttttccggcagatgaagatgaagattttacaatccagtcggatcttacataagactgccaaaatgcagctcaatactgcagcttggctgccaattaaaggagacaaaaatgtctttactaagccagttgcttcataattgcttcaatttaaaaatgcatgaaaagtatttgcccaaatgctcaaaaatgctcaaagtaataaaatgactcggacagaactcaagacagaatggctgaagggagggctatatactggctaaaagcacatatagaagaacagagagttgaatttgtaaaattgcgtaaaatgcctcgacttggcttggctaacattttgattacctaatgcccatgagcagttttattaggcctgtggttttgctccttcgatatttagtatttttctcggacagcaaacgcctgcatcaatatttaatttcattacaagccaaagaagccgaaagagcatcaacaatgccacagcaggacatggcatttgataaattatttaaaatatccacatccagcacttgggtgaaacgcatccgcatccgcatctgcatcctttgctcctggtcaaagactattagatgcgttgtatctcagtcggctcgattagttggacacattgagtgcctgtaaataccgttcaactacagtgaagctgcgcgaagttcgacgaaactcgcagctttactaaaaataaacactgaaaattacgtgcttaacggggcacaacgttcttttgttttaagccaaatacatttattgaattccctgtgtgtagggtttaatcaaatatagaataaataggtagaatttattcctgtttaagttttaaggtagctagttgagctgttttgactgtaagtgtcctttcgtccaattcattctgtctgcgtttctgctccatttacaccttttggtttttggggtgtaaaaccattggcccggccttatccaattttacacaattttaagcacttggccacgagttggtccggctttaaattgcagtcgagttgagtccagtggcgaccagtccagtccagtccactccaatcgaatcctagcagacgccagagacacggccaagtgcattttatgttcagccagcagactgccctctattcttgccgctttttacgtggcagtggtatccccttttagcccactgctcttggcccgttctgttctcgtccttgttctgggacacaggacatgagcaccctgtgcgcctgcttaaaatgataacgttgaaaacgctggcccgtctacacaagacaaatgtgcgctattgaggcgtgaaaatattctactataaacacacaatacagcagcggccaaaattgaaggactatgcctggcttcaaatgaacgggaaaatcgtgctagtcctggcaaggatgtgaaacaatttagatatgtgcttaaagccattagggagattgatatcattcattcaaatatttcttaccttttacattaaataaagaagaaacataattcttattttttaaccaattagaacgatagcataatatgttgatatatgtgtgctatttttgcgaccaccattacgcctacacatgtgagatgcgaaaacccttttccatatccccatgttttttcctttaagccgtgtgtaatttgccgtgtaaaaatgtgggtggctagctgtttatttatggccttgcccggcgacttcttaaattatctatggaaatggctaaaggcaaccgctaaactggacgctaagtcgacactgattatggatttaccaccagcagtgacttcggagttggagaaacattgtgaaacaccaaaaaggacgaaaaactccctcgagacattgcaaaacggagacgcagtggcgccggaaaagtataaatattccttgctccttagctggcgaacttgaatgtgtcagaaaaaaaggacattgtttcttttgcctacgaattgcatttcgcaggcctgcagtgctacctccttagtgtttccgcaattgaaagattatctgtgttatggttgaccaagtgtgttcgcaacggtttctaaattgccctttctgttataattatatgattttcttagaaaataatagttgcaataaaaagtacaacagaaaaatggcatatacatatacttcaattgtcattgtttaaatagtttaattattcagactgattttatttatcaaatgattcataatcatttattactaatactattgtttaagctaatattactttattgtttattattcaaaattatgttttgatcataaatgataagaaatactataaagccgaattgatatagattttctataaaggtttttatatcagctatttcttgttttcttatagtatttctattctatttcttgtcatgcagcccatttttcttactaccaaattgttctgacaccccattattgctgcaatacgatatagagatcccaagtttttccagcaaaaactgagccatttatttaactgtttagcacttcgtatcgctttatgatctgttcgcatatttattcaacgaccgaatagttcactggtatagagtaaattgtatggaaattctcggcagacagatttcccctcctttctccgcgactttcccccctataaacgcttttggtgtcggctgccagccaaaaaaaaaaaaaaaaaaatgtggagcgacaaccgaaaagaaagaaaacaagctgggaaaataggggcaaaaaaagggctccagtaaatggcagcagcagccagtaagtaaatgcaaaacgagcagttttcccgcatcacgaaaaacagcgacggcagcagacagtgaaagggacgggtatagcagcaggaacagagacagcatcacagacgatgaaagagaagggtgcggaaaacagaaacaagagcagcgacccaatttcgccaagtaaaatcgcagttttcattaaccgcaatgccagacgacggcgacagagggggctaaaaaaaaaaaaagaaatgggttgctgtggcggttgggcgggaaaatgctgagtgggtggcacatcctggctaggagaaaggtacagcagcaagctgtcgcgacagtcggcgctgctgttagaattacaacaaccagtgccactaggtggctgcttgattgccagcgaaatgccacatcgacacagtggtagcttcatagaaaattttgtggcagatattgcaggagcttatatcaatgggaaaaagagaaagttttgcgaacaaaaattaaagtaaagatatggggtatattcatcccttaggtagaaagatacatattctaagatcagctttaatagtacaatttcataaagtcagaagagccgttggcaaaataaagctacagttccaggacttttcctgccacttactgtactctctgcacaaaacctttgccttattcactgtgcactcacggcggtctgattgcgtcccttttccgctgtattgccaactctttcgctctgctcctcacccgctcaccctttcatgtatcgccgaccagctttgtttgcttggattatttatatagtgggtatcccgatgatttgttggtgttagccattccgttagttgtaaaactttggcgagacgtaggatgggtggcggaaaattcggctgggctcaccttgccccgaaatttagcaagttttcccgcgaactttgagaaaataccctgggccggtttaaagttttggcgccagcacggaaattaaatgccatcgatggcctggcaaatggcacaaggatatttccgttaaaagagtggccgatgaaaacggagagagagagaaaaaaaaaaaacttaaaattgaaaggatatcctacggtcaagtgtttgtcatttgcaattaatttccttttgaccaaacggcatcttccgccgcccgttttgtgcttttcaattagcaaaactcaaagttttcccggctcagactcaaggcaaagcgattccaataatttcctgatgattccctccgtttccacaaaaacccaaatcccccaacccaaatcatcgaagaattttgctgcgcctaaaagccaactgcattttttatcaggccaatttaaacgtattatcccggccagagaaatcccaactcatccatatccatgggcacatcgatgtccggcacatttataaatagcaagcgactcaaaaatgttttccttttacttttaatgtcaccaaaaaggaggggacacactatctctgaacttcttacatgggcggtgggcggaaaaaaggggggggggggggctcaaattcccccctctgccacttcaatatcctatttatcgtgtgcgtttgcttgtgtaaccttgccaggagccaactgtcgctggcatatgctaatgccgggaggacgtactccggcatctctgaaagcactgagagaaattatggtgtgggtaaaacattttattttgacaaaataaaaataaaagtttgtattaggaaaatgtgaacgaaacaggtcacttgaagctagtattttgaattaggctaaaatattatctcttaactttagaaaaaaatcctatctatatcctggaatacaaatatccaattaaataacagtagatcgattcctcttactttttcctcattttggttgtttgcacttattttctttcatttcactgtgactttaaacatcagcttatagttttgcatattacttaagtgaatgtaagtgaaacccactcactttttggcacagtgttgtctcctttggccgtttggcaacaactgctaaatatgtatgccaaatgcgatttgcatataacgttttgtgaaacggtttgcgaagtagtggaaaatgaggagcggtgcgcgggcagtggggctttggctactggctactactgcctggtatgccttttagccatgttacgttggattttgactcatttttcgtctttttcggagggacgttaggagcggggtattaccagagaggcgggccatgactgaaccgtttgtgtggccgaactttgtgcagccactgtgaatcaggtatgcaagtttgagcccctcctgcggatccatctctgtgtttactggtctaacaacggattgttgtcagttttgataggcaaagtaggtgcacttgaagttcaatgcggtcaaatatgtatttaatgttgaaactagacagagataccatcaaaacaggacattagttgataaaaacacttggaaaataatacgaacaccacgaaaaatatatttcaatttaaagaaatattttcgcaatggaaaactcaacttccaacactagggatttttcctagatttagttacaatttttctaagtgtcctttatggcataggagtttggccagcaaggatcttccccctgcccttttaactgcccacctgcaattgaacttcgcattgaggcggagatcgcgggcgtggcttatttacatgaaaattagacgggaacacgatagattggccaactgattggccgtggcgtaaacatctcattaaaatgctaaaatcttacatcacatgcatacaattatgctgggcgagagcgatgccaaaatttattcatgcacagccaatccaatcggttggcaataaaaataactttcaattcatttggccaatatgaatgcgattcgcatcgtcatcatcgattatatacattgccaaattgtccgatttatgaccagtggcagaaggcagatttaatcgagattttaatatttctgaatatttttgccaatcgggaaattgaatgaactttgagacagtaggctttaaaaatatgatttttatgaaatccacttctttgaaaacaaaattgttagaaagcataaaaaactatgagcaatagtactttttagatatgggaaatgtaccaccattcttttaaataacttaacttaagatacaatataaataagagtgttaaggaaattgaatagggattgttaaaggggaatctttgactattattaaattcccgttttgaagagaccactgtgcatgagaaattagccacgaatgtattgtcgtaaaggacgaaagtatgcccagatccgatccgggtccaggtcccacgtccagttccaagtccaagaccaagtccaggccaaaggcattgtcgaaattctatcccccaaaaaactcactccgctctttcggaactctttggccaagttgcacgatggcgataaatctccaccgaaagttgtatgtgttgtgcggggtaaaagggggcggaataaggacgagtgggcacggtagtccccaggattgtgtaaaatatgcacagcttttgggccgcaccgagtgctgcacacggaggcgatggtactgcggacccggccacttggagctgacacaacgtcacaaagcgcattatgatgatgatcaactcgattatggccaaaaagggaagcagtgttggccaacttgacacaaagcagtgaggagcataatttttaatgcgaaaattcaacaggatctttgtgccgtttaaggctttttattaagggtttcgattgtgctcaactaagctcgaatattaaagcaaacgaaaactggacatcatttaaaatacacttagctaatcacttacttgcattattgtttcagttttaaaggaagagaaaggtttctgtatctgccagaatttcatttcaatgcattttggagtaaaaaaaaaaacgcacacacattgctaagcagactcagtctaacctgatttagggcacagcaatcctcgagctgaatctcaacactgtggccaagttagtgcagtaagttttattggtatttggtttttgggccctgcctttccctatttcgcccaactgccttttccgcccacatatcacacaatcgcaggcacagtaaacagttggacaaaaggaattcgattttcagctattttctatgccaaaaacgaagttctggaagagctggaaacaacctacttacgactttgctagctggacgaacaaaaaaaaagggcaaccggaagcaaagggaagggaatggctttcgggggtggtcataagcacgtgataaaagccttacttccaatttgaactctgctgtctagtgtggactgagccgtcagacggagacaaaaatagcatcagaccagcgagattttttcgtacccattaaagtaaaaactcaaggattaaatggactgtttttcatccggcaaatgagagctttagttcgactttaaatttttgggaatcaacacttaagtactaacttacaatttaaagggatttatttttaaagtttccttataattcaatagcttataattccataaataaaataattgattggatctgtttcgtacccattcctttattaggatatctaaatttaatgaatgtgtttttttttttttttttttgtatttcagcaaagtaatcattttctttgactacttctaagataccaggtagctcgtagtcgacaatctgagccgctttccttcagcttttccttattttccctttgtttccattgttgttccttgggtgtctgtctgtctggctggctgggtgggctgtctgtctgacagttgggcgtcgctgcggcgccaagggcagccatttttcatcggcgggcgtatgtgttgtgccaacgatgtcgacgccgcagccggagtaactgccagtcagagagtcagttagttcgtcaaaccaacagattgtttgtctgctcgtcctgcgtccttcatgccaccgcctctccgcatcctagctccgcgattgttgtatccatctgcccgtgggattctttttaccacacggccaggccatccgtctggtgtcctcggtcttgggtcatttccacttgtattccggcttgaacttgtcttcatttgacttttcggtggtttacgaggttgaataaggcgcattttcagctggcatgcatatagatttacaggcaaaatttagatttatttgatgggtccatacattagagttggtcttggtttaagagcatttttatagatttaaccaataatagcattgtaagtataccaaaagggaatatattcttgaataaatgtgatagaattgcttgagcataaattctctaaattatttgctgtacccaacatttctttaagttactttcaaggcttctcaacttggtattgctgttttgtgcatatttcagtttctgtttttgttttcgttgcttatgcacagccgtctataaattgaatagtttttacttgaaagcagggtaaaaacgaaaaaaaaactgtgggtttttggagacggaaaaccgcaaacagagcgccaccccctcgcaagtaattggtactgggatcatttcaattccggtccggattcctttttttggcacagaatcaagcgctggcttcgtcttacataaatatgccacttaacaagccaccaacgtaaacgttttttatttcctttggctcgctgattgcctccttcgccaaggatcctcgatgtggcagtgtagtaaacaaatggctggctggtcgtaactatcgctacaagtatcgcgactatcgcttggcattcgtaaatggcgaaaatgtaaatcttgcgaaatccaaaaaatgcaccactgctccgctcatcatcagtgcagttttgcaatttatttaattcgatatttgtttttgcaagtactttgcatgggtgaagatgcaaccgaaaccaaccacacacacacacacacacatgcacttcgtattctcattctcattgatttgaatatgtcagcaatttgtgtagttttgtgcaccaatgcgccaagtttcatctgaatgccccggtaccacccacactgccacccactaaatccacccgttgggcggaattgcgggagaggttttcctgcgtaatgcaatgtaaaccaaaccaaaccaaacaatttaaaatcatggcatgcatttggcttcaattcaatttaaactgaaatgagcgcgtggccagcatgcatcggtgtcgtcggccaggccaacgagtggctcaaagagttgggaagggggttggtggtattggctgcaagctgggtggacattgggcggaaaattggttaccgccccattggcaggctcgccattattgcagaggaaaaacctatacaattggtaaatcaactggcttaaataaatcttgaaattaatgtgtttcgaatttttaatgttaagcaatcgtttagccaaagtctaaattttaaaaaaggaatggggatactagggacctttgaaaagtatgtagcgggtatgaattaggaagcgtttctgaaccttttaaatatatgtattcctgattgggatagctagtcgtgtccatttgtctgtccgtatgagcttcgagaactttgtacttagaggtattttttcgtggggtagaatgatttaattttcttaggttgtttcttagtatgctttacttacttttccctaactttaccaaataaggaaattacccattgtattaaataatgtacccattacataattacattaaagggcttttacgaaagacaccttaccctcacacactttaaacactttccccggggaaaacttagttttcgcttaaagtacgctctttactttatacgcagcccgcaaatggaaagcaatttcattacgaaagttttcgcacagctgtgagcactgtaatgcagccacttacagtcacgctgtaaacgcggctgttaaacaacaggctttaatttgaataacattccctcaaaatggggttaaaaaataaaaaataaaaaaggactctagggtcggaaaaatgggggccgtgattgtaacccgtaaattcgccctttagttatgcatttttaatgtccgcttgcaggctggcgaaagtttcaccatttcaatgtagccttcgctgttttccattgcgcttattgacacttggccaaaatttacggtcgcaatttcaatgggtatgtgggtatacttctgatgccgcctaacgaacacatggctgatacagtggcgaccaaaactattctctactttgaccacttatacagccttatacacgagtttgtcaaaaaaaaaacaattggcattcgttcgggccaattaaaagtttcctcgagaaaacagcaataaagtggtggccaaaaatattcgacacttgccaccttacgctggcgccttgttagtaagtttatggcaactacccggatatttaccatggcaatttaatgagaaaatgtaggacacttcctcaccctcacccacatccacactcacaccacccccatttactggcttatctcagtgggcggtgggcgctgggctgcagcactaccccctcttttgtggactgaagcactactcaaagtcgtctgagtgccacagcattgactgaaaatgcatttttatagagagagagagagttgtgtgggtgtgtggctgtgtgaatgtgtgtgtgtggcgcggaacccaacttgcatatagaacaggccgagacctcagtgctggctggcccttttcaataaatcagggacccaaatccgcagatgtcaacaaatgtggaggcaaactggttgttgcaacagtatcaacaacggtgacaattactgcgataacaacggcaatgaaaacaaactggcgtggaaattaattatgacacctgacgaaggtggaacattggctgaacaacactggggaaatgtaaagtgcaattgttagaatgaattctagtattgctagcaattagctagatttttgattgagttaaagaaagtttagatattcagaaagtaaaatagaaaatattatgaattattaaattagacagctaatcaaggcaaaattgttgccgaaatatattgcaaataggtaaataaatgcataaaaatacaatttttaagtatgaaatagaaaatagaaataaagcacctaaatacactaaattaatatgacccttaagtcaagaatataaatttaaaattactcaaatctttttatacactttttaagtgtgtgggtaaaatacaataattttataacattacacaactgcaataaatttaaatgtgcaattgagaactcatttgttttttctaattaagtgaattcttttccacttttcggaactgcatttttgaatgttccctatttaaagctatacctttgatacaaaattataagataaaatctttagcctactattgagcgatgttaccaagctcttttagcccctttctatttgaatttaccttattttacctcatgcgtaggccttaaagtagtgactgtaaagtcaagtgcaagaaaagggggccaaagtgaccgccatggcaatggggtgtgaggtgcgaagggactttcaataccttaaccctcgccatcttccggccaaactgtaataaacttttgtgctgtggcctttggacatctttacaacttgctgcggctagccaggttgccaccactcagctgccccaactgccgccaactgccccacgtgcaacgccaccactttaaatgcctttggcttttatgggtagcgctttacgttcgggaaaatgtacgaaaaacaacgccagacaaatgaacttcaagcctcatgaggcgagcatttaaaaaataactaagaatattttacatcagtcgattgggctctaaaaagtttatggcccaatttattggcggtcaaccaacacccaattgctttttctaagccgaacatgcatatacgtatatatagatatatctaaatgtgcagcgtggtgttaacagttttttgcgctagtttcaattagatttttatattggctgcaatttttgttagttgtaaaaccaaaattgatttggtatttgacaatttttcggcttgttctctgttcgaccaaaaattggtaataaaagagaaaaaagtaaagcgaaattagataccaatttttggttgggtatattttaaatggacaagggtgttctctataaaataaagcaaaacatttcaaatggaataaatacgttatgtagcctatacatgcatagtggttaattattcaagtagtggtaataatggtttccgacgacatgaccttaaaaactttaattaaatttgaccaaatttctaattttgtatttatacatgttcttatttcgatttaccatctccttcaggcttttcaacctgccaaaacaagggcgagctaatacaactttcgtctgaataacatttgtttaggacggcatcaagttggcgtttatttatttaatgcccagcacagtgggttaaaactagatgtgaccaagaatgaatgctattaatctcttaagtttaaagataattacttctagttataaattggtttaaaactatgttccacagtagctttaactgggatggccattgaaatttagcgtttaggccagcgcagttgccaaatcgtggcaccctccaggatggcagactgtatttccgagtttgcccattaaaatgctgttgttttgtcaaataattttcacttttattgctggggaaaaaagtgtattttgtttttccctatttttttgcccattttttgtttgcattctggacgtctgcgaatttttaatcatttgcagcccgaatgccggtgctgtctcaatgtgtctgctaaatggtaaatgcaaagtctgagcagtcagacaggcaagttgagagcgtgaactaattagtgcattagcattcagtggcatgaatttggcgcagtcgaaaactttcactgtaatgtgggttaggcgaagttatatatttttctgcggctgcaggcgatgtacatttgtgtgtgcacccgaaaaagatatatatccccgagatatatatcctcgagatatatatccacgagatgccaccactgacagcagatgcagatgcctgcttctgctactgctgctgtaatgcttgacacatttgtgcatataacaagctgttgatgcggttaatgtatctggtgctcattaaggctgcatatccgatggatgtgatgtttagttatggatttgctggatttaacgcaggctcaacgcctcaaaatgcactcaccgattgatgattgattaaaattgcccctaagtaaccatgatgagctcaactaaccacgcgacggcaatgcaattagcaaatcaattccgcaactccgcaattctgcaattctacaattgttcaattgaaatttaaattaaacagcagccacgaggaattcgagtcctccgtttgggacagcggacaggagttgattttcatgtaaaacaaatatcacttaatgtggccacggtggcgcagttctaccaggctaatggcaaagcaaaaaggcacgtatctgccggacactggccactggacagagtgtccttgtccccaggacctcaggacttggaaactttccggcacgtgtgcgtgtgcagctcgtaaaaagtgtgcatcaggttgcagaaggggctactggtgttgctgctgtggctgatgttgctgtgcggcattaatagcaactggcgacaaacaacaacaggcagcagcaacagcagtaataataatatggcaaaaggctgggcggcaggagtccaaggtcctgggaccacctggtggtcttagctgatgatgcaccatttcaggacgctgctcactggacgcaaagtgtcattgggattagggaaacatcaaggacattcgggtaaacaaacaacaaaggcataacaaattgtcatttccattccagtctagtctagtacttaaattggtaaatcaatagacctctggaaaacattaatttgaatgttgagtatatgcacatagcatcaaacaggcaaaggtagtaatagaaacgtttattggactaatgtaaacggttctctttaaaactcatttaaagattgtaatagaccgagggctaactactatactaagagttttaactatggaaataaataaatagcagccaaaaccactgttcttcggctcttcagctctatgacacttaattttaataaacaaaatactcggcgcgtggaccggtgtcaaggatagagagtgatgtaatggtatgtgtgctgcttttgtgtgggtgaaacgaaacttccagttggaggaaagtctagaggaagtgcagtctctgctctgatatgagtgttttttactgctctgacggagttgtaatgagccgcacgagaaatgcaaaaactttttcggaacgaagctttagcccggctaagtcagctctgcaactgggcttcccaggagatcgatgtctaaccataactcagccagagtcggaaaaagggggcagaacgggcgggcattaaagggaagcatacacgttaaaacaaaattatggcgaatcatgtaaatagtcatgaaaattctatatacctgtcaaggagtactgctcttacaagccaactaaatatgatttttatatgattcatatatgatatgaattctagagaaatttaatgctatttcccaattttctcacagtgtagtcaaggtatacgacgtaaacgaactccttcaatttcgactaccgccgaacaggtcgcacgtgctcttgtcattttacttttaaaacttttgcgttctactgtcgttttcgatgttgttgttgttctgtttgttgttgtcgttgttaatgttgttgtttttagttgttgctggtggctggtgctgttttggctgcttttcaattttattgtgggtaaaacaactggcactgtaaaaggcgtcagagtgctacgtgatttacacctagccaggatgtggatgtgcattttgtgggcgcatcattttatgatggctgcctgaaaccgaactgctcttgtccttttgctttggattccttttcagtacttctggagctgcttctcctgctgcacttaccacatgtcacgccctttcacagctccctgaatcgcagttttcccagcaccgggaggaaaatcaagtcgaagatcatgctttaaggaaattccttttttagtttgatttgaatttaaaataatctattgatgtttgtacgatttttaaaacaaggatatcttaaatatatttcaaattggaaatggttaatgctaaccatttaagcaatttaattaaacgtatatcgattgattgaattaaataataaaaatatgaagtattaaaatctaagtgatagccgaaataaggtattttatgtaattaatatatttaatgtaagttactttgattttttaaaaaacaaatttataatgcaaatgttatctgatgtattaccaaaaagtttgtaaaaagctgtcctacccatttttccagtgccaacctgccagcctctgcttgttttccatttaaagtttataaggtgctggctgcttttagctgccagtctagatgtttgtttatattttcgttaatgctgctcatccgcagtcacaacttccagctcgacaacttgccatgcccatccccatacccatacaccgatttttcacggcggacttccaattttacagctccagttgatttgacttttacgtacgtgttgatgcgagaggtcgagccgcagctttggtcacggggcattgcatttgaaaaatatggtgtcgggctgggaggcgatggtgttggtcctgcgttgtcctgccaaagtcctgcccggcggccatgtcaaagtcaaagccacgcgccaccattgtcattacacgcgcggacgcttacacgattgaaggtttggggattgggaaccgagaatcggggaccagggaccagggactacggactgggggcctgcaggacgagctggggaccatggccagcgggttgggttggctagaaggggggggggggggaggtggtgcagcggacccattgctctcccaaggatgcattgcattttaatgaagatatacggcgcgagcagcgagttgagttgcgttgcgttgcgatgagttgagttggtttgagttggtcgtgtgcgagtgtcagtcgctctgctcgctgtggcttagttggaaaatttacacgccgctttttccgcctccttaccgtccttgccacccaacgccaaaccaacccggctccaaccacccagccaccagaccctcgattttctattcgcactgggcctgtcagtcagccagacttcgcaactcgtgctcgttctcctatatattttatacccttttcggttggctccatttaaatgtcatcgactagaccaaggggcttataagttataatataaataataattaataataatatttacactaaaaaaaggaattcaaatactaaagctaattataataaaagaaagaaatgctatagaatatatatatatatatgatgtatatcaaatgtatgtatgcattaaatttatgtaaaaataggtgattttctatctttacaggatattctagcgaactatttctaaaactttatatccttttcgatatccttttttccttgctggcgggcgcgtgcctttcattttgagcttgtccagcggcgttcgttccgctagcgttgtcgacatccacgagttagcaatgtcactttctctcccgtacctttctcctttccccccaagcccccctttcagccacgccccctgcctcctgcccccgccactgcatttttgtacggacgccagcgagtgcgaatgcgtgggagagtgcaatttagctgccattttggttagttttgtaaaatatttgaaaaatgcaaatctgatttggttgcgggcatgaatgtttattaacacggaatttattcatgtttccggttttttgctggtgtgaagaatggagtgaatgcgtgcctgtttgtatcttgataactgacttaacatttttaggtggagtgtttataaactggcttagatttaattaagagattgtagacgatgcaactgaattctatttgaaatattttaaaagcgtactgttttccatatacatatgatgcatattaaattgaaagtttttcaaacattttactttgcgctttaaagggcatacattatttaagattcaatgaattgctgatcggatcgatttaaagtttacccactgacgccccttaattgccggaagctcttaaagaaaaatggcaggacagagcgttgaaaactctgctggtcacatgaataatgtattaacactggcgcaccattcttttttttttttggccaaaagtgtgcaaaaaaggcgccaaaagcgacagccggaaactttaactcggctctttgtctgtttgatgccttggattccgtctgctgtttgctttgatgtcggggccaagttcttgtggttttggccactctctttgcctttcgccttttgcctttgtcttcttggcaacttttcgcattaattctgttaataatttttaatgtctgtacagcggaacgtaaagttcaccaactatttgaacacatggtaattaaaaatttaattgccttgtcaatatgtggctcgaactttttgttcctttcattttacttccggataaaagttaagtagcgccttgttaagtgcaaccacacatttgcattacaaattagccattcaatcgatttttttccaccaaggatatactaattattatgtttaaaagaaagaacaattaaatatttgcgggacttacaaaaaatcactcatacgcaacgttgcccattgaacgttcttagaagggtagttgctgcccttaaactgcatatactctagaccttctctcactatatttatcccatatccgtctccatgcgctcatgtctgcctattaggtcctgctaataggaccctttaaggacctccactcgcacgctgtccaaaacagcaggcacttcccatttcgccgcatggcatgtggcaactattgggagctgtcaatgcagaagccgcttgacgtgttaattcgccagctgacacgcacaatccaaaacacacacaataaacacacatccttccagcacacacacacacacacacgcacacacatctacgcatattcaagtacaaggacccaggcaaatggctgatccgacatgcaggcattcttatttatggcagcacttcctttgcggtttattagccacgtgcctgcatttcacaaattccggcaaaacaaaaggtattccatataaatgcaaatgttcgcaggcagctgctattaatgcatattttacaatgcataagtactgcgtaactgccgtcgactacggtgtacctttttacaacaggactatttcattcagtagggcctgccaatctctggaaaagttaatatacatataattttgtaaaaagggaaattgttcacttggttaagtgctcaattaaaggcgggaacgtatagtttagccattgttttagccatgcatgacgtaaagggaaccctaacagtttgttattggtttggagtcgtaagtaaaatatttataatcaaagaataattatttcttttctattcttttccttgacttgtttcttttaattaatatttttagacccaaaattgtaagaataataaaattaatttggcatgttactactttctttcttttaattgtatattaaatagctcatgatagacacaataaattcacaatacttggcaaaatgtaagaataacaccatttcttggcaacggaaatagccaaatatcaatgcaagctgctggctaacacacacatgtgccgataacatttcgatctcggggtcacttaaatcagaattaaagactatgcaagagtttaaaggctttggcagacagggcagccatgattttcaatggcaacagttgtggcaacatgtaatgctgtttccttcaggccaacaactgcgaatcggggaaaatcgaagggggtggggggaagtcgaagtgattcacggaaaagctgctgaacatcagcatgttaaatgagctgctctctggctcagtgagcttgtaaacagtttggcacttggaaataaattacacacgcaatatctgtaaatcgttttaagagtcgaaacgaattgaatatgttgtccggtcgagtgcagattatatttggttaactcccaaccggagctggccaaaacttttccggctgcgtaatagtttatttatgcagcacgggttggccaaaaaaaaaccctagtgcgggctgtgacagctgtaaatgctgcgagtctttacaaattgccaatggtcaaactttggcatgcgtctatcgataaaagtttttagctccctcgcttaatttgaaagtcaagtaacggcttgggtttttgcattcaacgctggctgccgcgccacttgattgccacatttgtggtgcggctgacaggcgtggccaccaatatttggccaattccgatgcggatttgccagaagcgctttattaatggcgtcactttggttttattagagatgggcgcttttgaaatatttaattaaaatgctctaagctaatggtaagatatttctatttcccactgcaaaatgccacaaggaactggcatccagcagaaagatacaaattttatcaaattatatatagcaatatttttatttttatttatgcattgtatccttaattcaaaaactaaggttaactattttaaaagcagctacatcagcttaattctatagtatgttaaattcatattctcgaccatgatctcaatcaccagcttattttaaagtcatttagccagtgccatttaaacgaggcaacactttgtgctcgactaatattgcattacaaaaacaattgaatttataaactaatacagtaactaggtggcgttgggtggtgcaatggcagcagtttgctgatgaaatcgcaaagttggagtggcgagcacgtgcggcactttgtgcaacaccgcgatgtagatcccgccacggacatgtgccaatatggacatgtaggagtatgtccagatatatatgtatgtgtatgcagacccacctgaaagcccagcacataattggccattaacagcgaccaggccacaaagcacaaaggacgacacttaatatttttatccacgaaattgagaaattgaattaaaaagtgcgaaaattgactgcaaatctggcgaaaggccacgccccgaactaagcataaatgtaaaattaattgaatttgcattttgagcacacacacacacacacacacacgcgcgtcgcggaaagctttaatgacgcccgatttaattgcggcgtggaccctgaggttggacacgttataaaaataatcccaataaaatgcatttttcatgtcaaacgcctgagctggcggaataacctgaatgcacgcacaggactttacggaattgcatgcaaacaaaccggaacacagagcaccatcgcctgccacgcacatgactgcagtccaaaaattgtcataagtggggctttcggtgcaggcggggattttgccgggtatcagcttttcccgcccccaaaagtgcactccctctctctctctctctctctatttgagcattatgtaataacaaaaacaaaatcaaatatccagcacggctaatcaaatagtcgagagggcaaacattcaaagccatttcgcaagcaaagaaaccccggccaaagaaacacaaagaaacagtcattcgatggcaaaaggagctaatggaggaggtactgcacaaatcagctaacaaatgaagcatattactaaacaagtgcacagctggcggggctgccccaaagttatggtactgtgaaaaaaaattgtatttcgtttttaaaaactaagcaaaactagttaataaaaacttgttttcaactaaacaaatattctgaataggttcttgctcatatgccatgactatagaaaattcttcgtagtagaaaagatccatttagtaccgcatatcctttggaatttattttgctcagtgcaacagccaggactaagaagatttgtcttggccgcaaattcaatttatttgcgtcttaaagcgtcaccagcgctataaagcaataaagccggaaaaaggattatctttcaggctgcctgctccgcctgcgggtcagcaaacgtctcccgagtgggagctccggaaaagttactgcaaaaaatgggaagacgcctcggcaaaagtcagccaaagttgcaaagcactcgctgatagcaagcaacaaagaagtttttgtaaccaactcgaaaataaaataaaacagccagcataggaattataatggaacacaaaaaatggcattcttaagcgatagcaaacttcttttccagacgcatgctgaacaaattgcaggcagtgtaccaagtggttcaattaattgcaactcacacaaaatgcataatgagtgccaaaagggggggaaatttcaatatgcgactccaggcccttttcccactcccaacttacggagttattatatttccgcccttgcaacgcccctccagcgaacttatcatgcattatgcagcgtgtgttgtggtgtaaatgattccatcgatgccacaacaaaggcagcaaacgagtgcgtctcaacagcgaatttgcgatgagtgcgtgagtacgcctatttcaatataaatcaattactttgatagtcgtgcttaatgccctctagttaagacattattgaacaaggtgaaaactaccgagcactgtttctgttataattattttaactactttagaaatggactacaataattcggaataattttagtataaggaatataacaaacatttgttgggatttatttaatggtgagacactgtgaccgtgaaatattgcaaatttcgctcctactttcactactttcttcattcaagaacctcatcactagtcattaaaatggatgtgcatatatgcaaatggatgtaggagtgtatttctgggcccagaactctcagtctcagcggcgcacaaaagtaggcaacaaaaaccgtcggcatttgttgtccgctgccattgttgccgtctagcggcttttaacttgacgccaacgcacttaggacaacgcacacacacacacacacacacgcacacttattcagacactcacacccacaaatgcatcatatcttgactcattaacagcccctgagcgcagcgctgtaaaagcgttccagagcagagattactttgcctgataccccaaacactccgacgggcattctagtcagcagctctgccaatttggctttaaatcactaaaaataatggataaataattagggagaataaacgagttgtatgtttgtagaatttccacatacctaaacttttacaatagcaaaaaaattcgtaatcccacttaaacaacaaacagaggctcatactgtcattttaacaatatttaaaaattcattgtgtatttatttatatttatatttattagtttggaaaatttttatatttgatatttaataccattaagattgatttttgtttttaattttactgtcatataaaatagcttgcatttcacggatttatttctgcaaagaaaatacgtatagttttcataaattttagtttcccaaacatttttgttttgcaaatattttatcatcactggctttgggcgtttgattctcgacgcttagcgctcggaattcagtgctcagttcagtaggtgacaccattgcgttaaggtgttttggtcggcccacaacgtctggcctatattgccacatatggcagtatatggagctcctcccgactgccacacaggagtcctcatcctcgatgcagtgcactagactgcgtgcacttgacgctattgctccacatttccttcactttcgagagttagggtgcgtacatacagtggccgtcaaaataatagcggaggctatcgtttattgagatttatgtgggttgtgcatatttacagactatcaaggagtatatttcaaatctagctttgagtgagttatacaaaaaatgtgataatatgtaaagataattacatgttaaactatgtactaccaaaaagtcttatactttaaaaacgaatctgattttgttacttattaaaattgcaagaatttcaaccgcatctggacatttgggcaggtgcactgccacctccaatccgcgcttcccattccctttgttgcaacaacactctggggggcgccattagtgtcgcggtgcgtggcatgaaaaaaagttgagccaagtaagttaaaacaattcgcaacgtgcgtgccgcaagctttcacgtagatttccgatatccgtatgctgatgtacagttttcagctgcctgccctaactttcgcaaaatgctcctttcttacacgtaattatgcaaaagttaaaagcaaccatcatcgactgggttttccttttttttttgctgtatatatttcgacgtcttgccagtcagccagccaagcagccaggtagaaaaccagtcagcacttgagctgtcgctgtcgcgttaaattatgcaaaaatatatatatataataaaaggaagggaaaggcagtggaaaatggctgagaaagatgaaggaaaagttcattaaaacaaaaaataagcaactcgcattggtcatcacaccgctgagcacttactgattttcccttttcggtcgttataattgcggctgggaaaatggattgcgagacgggaatcctgcgaaatgcggctaaatgtgtttgccacttgatgccaattggttggaaatttgcgtaaacacgtcgagtgtgtaaagtcggctccacatgagtgggcgtaaggcgtttcgtgggcggggctctggctcggaccgcagtgtaagcatttaattgcaagtggcttcaagtgttggccgatttgatggtagggaaataatgagccgtttatgtttacatgagcaagtggagaatgttggctgggattgctgaatatttggaatttgcgtttgatgcgaaagcaatggtacaatgtaattgttttgatcatgatatgtaattagataattgccttatcaaataaccattaatcggtttggatactcccatagaagcctttcgaatatgtttaacacaaaggctttgtaatgtgcaaattggcaaagatttattatatccccataagcttaaaatgtttatattggattgtacagcttagtacgcatttaacaaatgattattgtttgctttatataattgtaaatatattttttgctcaattagaggactggtttggctacctaaaaataattgtttttaaagtcttgttctttatatcttgtacttaaaagtacttgttcttaagttttctcatcaaattcgtggtcaattcagtctgaatagttgccgatttattagaagaccgtactattttatggctataagctgtagtagcttattaaatatttacaagataaaccagcttaaaagccatttaacaattgttcactgaagataaacggcatcgtataaattaataatttttatcgctcaattaggaggcacttgtcttcggctcatcccatgtggctggccggccaagtgttcccggctatctgatatctgatatttcccacgccaaaggccgatggccattgtcgcctcgttacgcgttcgtggcaattggccggcactttaagcgacaagccggcacttaattacatgtgtagtccgctgctggcatgtcctctgctgtcaattatggtgtgtccgacatgtgtattgcatctggatcgctttgggtgagcagggggctggggggctgcgagttaagggtcaggtcctgcctggtgacgggcagggtaagagtatcaatcacgacgaacatgttaaaataatttcatttcacaaccggaattaaatgcagtcgcgtgcggggcccatttacatgacacgactattaaattaaaaaacatgaatggacagccacaaaggcggtgaagagattttttcgcgagaaagggcttataacttcactaagaaaaaaatgtgtaatgaataccagtaaatattcatctttaaagtattctcctaaaaacaagtttaatgatacataagtgtagctaagtaactctaaacttgttttttaatcatagcaaaaaccatttgctcaaaagtagaagatattctacattctacattctacagaactttttcaagtgcattcgttcaaatgccatcgtttagtcagaggcaatcggtggctataaaaatgctttattgacatgccagcaatcgcccaatgtttgcttttaatttcagcagctgtgcagcgctgccctgtcataatttgtcaattgcgagctaattgttttctcttaccactcattttgtgtgctttcagccagagccaaaatgatggcgacgtcacaggattattttggcaatccatacgcccttttccgtggaccgcccacaactctgcggccgcgcgagtcgccgctgggcgtgggccaccctcacggtcatgggcacctgcacagccacgcccatgcccacgggcacggccacgcccactcgcattacgcggccttggacttgcagacgccgcacaagcggaacatcgaaacggatgtgcgggcaccgccgccgccattgccgccgccaccgcttccgcttccgcccgcatcccctaggtaagcctccccacccccccccccccccccgaaaaagagtaaaaccaaaatgggggaggaagagagaaagtgggcagtttaacaccagatcgaagacgagcaaagaattgcggagaaatcaaaaaaccaaaagccaattcacattggcatatcatcagcaacacacatcaacacacttctctgctatgtctgcaatcaaccaaaatatcgaaaaaagaaaaacaaaaagagtcaacatcaattttaaagtttttacgttggttcaaaagagtttaaaatgcccttaactattaacgcccaaaagtaaacgtagattaaagtaatattagccaatcaatcgtaaaatatcagctttcattttttaaaccttaccaatggactttgatcccatcaattgcaaatctaaagtagagaaatagagagagataagagatataatatcactaaccaaaagtgtttgccacgagtattaaaatgttaactactacaatagaatacgtattatgtttaattcgctagtatgtataagcaaactaactgcaagaaacaacaccaactaattaatattcaatagcataatgctaatatcgtaagaatatcatagatttaaggcagagcatttcagacagcacttgtaccgttctagacttaagaattcgaagtatacgtaactcaagcaattcaataacaataactaagtagaaattcttttcaaaataatactatacacgaatacttcagtcaaaccccctacaatattactgagataaacatatagtattatatagccaaagccaggaaaggagttgtaagccattgcatatatatatttggtagataaagaacagctaacgaaagggtccacaagctacccataacttacttagaataactaaacacaactagccaagaagtagatatacatatatatatcgagttttgctaatatcaaagtatacgtaaattgaaaaccaagaattttgcctagcttaaataacactctttcaaagcaa

SEQ ID NO: 41465 - DNA, 779 bp, DROSOPHILA
cagcaaggacgcacagctcacacaatcccttcgaaggaaatcagcagccgacataccgaacgacctgccacaacattccaattcaaatccaatccaatccagactttgaagtcctgtaaagcgttttacattccgcttacataaatgctagagcgctgtaaaaatcggcgctagaaacgccaattagccaaacatgttagccatgttttagtcggtcctttcgcgcttgacttgttttgcaactgtgtgcgtacgtttgagtgtgcgagtgccgcccgattttgtttgtcctttttttttctgttggtgtctcaccgagtgccgttttaagccaagatactacagacatactagcgactagctaatacatattaacttgttgtgccagcgttttgtgtgtgccagtcagcctctgctgagtgcattttcattaaagtcaacaagttgcagccgcataaggtcaaataaaagcagccagagccaaaatgatggcgacgtcacaggattattttggcaatccatacgcccttttccgtggaccgcccacaactctgcggccgcgcgagtcgccgctgggcgtgggccaccctcacggtcatgggcacctgcacagccacgcccatgcccacgggcacggccacgcccactcgcattacgcggccttggacttgcagacgccgcacaagcggaacatcgaaacggatgtgcgggcaccgccgccgccattgccgccgccaccgcttccgcttccgcccgcatcccctaggtaagcctcccca

SEQ ID NO: 41466 - protein, 94 aa, DROSOPHILA
MMATSQDYFGNPYALFRGPPTTLRPRESPLGVGHPHGHGHLHSHAHAHGHGHAHSHYAALDLQTPHKRNIETDVRAPPPPLPPPPLPLPPASPR

SEQ ID NO: 41467 - DNA, 4487 bp, DROSOPHILA
cgagtggacggcgaggattgcaagtgcagccaaaatgcattggccagcggcgaactcttggacaccaattctcgcttcggttgacccagtctaatgtatgtaattgcccacgatcgcagatactttacatgatgcgcacatgacaaataaagacaacagaactacatgagaatcaaacaaacttgaagttctccattatacagcatctagatgcatacaaaatctgaagagaatatatctaaacagatagctagggttccaaatctagatttcagctaaggtaagtaaagtattaagaacgggaaacaaaaaacctataaattataattgcatagtcattaaacaaactgtcggccatattaagtccttaaaaaaaaagaactaatttgtttaccgaggcctcagtggcttagttagctaataggaaaatcaattctgggccgtaattggggaactcaagtatcccgtggaagccttcatgctcttgaaaggtgaaattggttcggcaatgacgacgcaatccaggcataacccattttcgctggacttgaactagatacataacatatataggacatatatttacatctattttcttaagctgttgtccagcttattagccagacccctgggaatggtcaccacctggcacccacccggcatggcgtccaatcaaagcctcgaatctgcatttcactcaccgaggttggggtggaagttgtggccccccaaaggagtcgcacgttccatgacccactgtcatgtttgcacttgtcattattgttaattgtatttgcggggtggccaagcgtacagggaccatatttacaaagcaatccgaatggccgaggcgggacaaatgtaattcaaagttaccactttccgtttcagtgaggcacgtggcgttgtggggaacgcaacagcggaatgtctaggaagcgcaaaaagtgaaattattagagttgcaaacacctaaagagtacagtaggcactcgtatcgatggccactggcatcgagctgctggtggccgccgccctctgtgtcgcctgtccgccgctgaacgattccccgccgacgaacctaatccaaatgggcgagaatggcactctttccccggtcaccgagctgcccatggatgtggacgcatcggaagctggattcgatgcggatgcccccgtggagacgctggagaccattaacaggaagaagccgaagctgcgggagatgctcgattggatcggcggcaagcacctgcgcatcgctaccctggaggactttccgctcagctacaccgaggtcctggagaacggcacccgtgtggggcacggagtctcctttcagatcatcgacttcctcaagaagaagttcaacttcacctatgaagtggtcgtgccccaagataacatcatcggctcgcctagcgactttgatcgcagtctcatcgagatggtaaacagcagtgtaagtagtcaggcggagatcggatttggatatactatagtcggattataccctatatcgatgcccaacagacggtggacttggcggcggccttcataccctcgctctctgaccagcgcagcttcgtctactactccacaacgacgctggacgagggcgaatggataatggtgatgcagcgtccccgcgagtcggctagtgggtccggactgcttgcgcccttcgagttctgggtgtggatcctgatcctcgtctcgctgctggccgtggggccgatcatctacgcgctgatcatcctgcgaaatcggctgaccggcgacggccagcagacgccctactccctgggccactgcgcttggttcgtctacggagcgctgatgaagcagggcagcaccctgtcgcccattgcaggtgggccgcaattaggttaaagtgcaatcgagcggttaagatagccatcggcgggcgctaatggcccactgattgcatgccaagccatcggggaacgggaactccggcagtttgtcgtttcattaagcccattgaaaaccattgcagactcgacgcggctgctctttgccacctggtggattttcatcacgatactgacgtccttctacacggccaacttgaccgccttcctgaccctttccaagttcacgctgccgtacaacacggtcaacgatatcctcacgaagaacaagcactttgtgtccatgcggggcggtggagtggagtacgccattcgaacggtgagcgggatcccgtgggaatcagatgagttaaaaggcatgggaagaccatgaaaatttcgatttttactggtgcaatacttctggatccctaatgcacacatttttgcttaattatatacataaaaggggataactgatagggttgtacaagctatttacccaagctttccatagattaccattctcatgagaaggaaccatcatttcgagacgcaaacgatatcaatgtttttatttttagacggaaggtgaaagagagaaaattagagagagacagagagcgaaatgagagcaaagtcatttgcaatctgagcatggtacgatctcgatcggctatattttcagatcgttgaggacggggttttctttgagtgaaagtatacaactcttaatctaaattcaaatcctaaatttgattacttacatataatttaaattttatatgttcatccgttcctttttacttcagaccaatgaatccttgtccatgctaaaccgaatgatccagaacaactacgccgtattctcggacgagaccaacgacacctacaatctgcagaactacgtggaaaagaatggctatgtttttgtgagggatcggccggcgataaacataatgttgtacagggactacctgtaccgcaaaaccgtgagctttagcgacgagaaggtccactgtccgtttgccatggccaaggagccgttcctgaagaagaagaggacctttgcctatcccatcggatcgaatttgagccaattatttgacccggagtgggtgagctgatgctttaatcatatggataatgcgatttcacaccttgcaggctgctacacctggtggaatctggaatcgtgaagcacctgtctaagagaaatctgcccagtgccgagatctgtccgcaggatctcggcggaacggagcggcagctgaggaacggcgacctaatgatgacctactacatcatgcttgccggtttcgccaccgcactggccgtcttcagcacggagctaatgttccggtacgtcaatagtcgccaggaggcgaataagtgggcgcgccacggaatcggacgaacgcccaacggccagtcggtggctccatcccggtggctccgtggctggaggcgattgaacagtggacatgggcagctcctgggcgcctccacccacggccaaaatgtcactcctccgccgccgtaccagagcatcttcaacggcggcagtcacggagatccactgaatcgctggcgacgtcccctcgcaaacggaaacgcccttggcaatggtgtcctcctgggcggcgattctgaaggtggtgtacggcgcctgatcaacggacgcgactacatggtattccgcaatccaaatggtcaaagccagctcgtgccggttagatcgccctcggcggccctctttcaatacagctacactgagtagcaagtgcagtgatgcgaacttcatatggcctaattggaataccttctacataatggatacaatttaagctcaaagttcaactgtgtattttcagagttttgatcttactgcagatgcaatgtatatgagataagcctcaaaaaatgaatttaaaaagatcttacttatgattggatgttttgatataaatattagattcatcccatcactccttatattcacgtgcaatctacacctgtgaccacagcactcgagacgtagacatccaataaggaaagcgtttaaataaagtgcacttataaataacatttaactactttcaattggggtcttttaaatagctgtttacatattcatacaaataaagagttaagataataataagtttaataattttgaagaattgcttttgaacttaactgtacacgtttgtgaaataaaaaattaagtgtataatttgtcggtgactccattttcaggcattttaaatgtgataacattaagtatatagctttcacgtgctataatttacgttttcaaggaattcgtgtgctctttattgattttttattcccgctactcgtagagtaaaggtatactacaatagattcgttgaaaagtatgtaacacccagattccttctggcgtttccgatcgtataaagtatatatatttttggtcaggatcaatagccgagtcgatctagccatgtccatctgtccgtatgaacgtaaagatctcagaatgttaagactcaaaagagtaatagacgcagcgcaagtttgtttgcccatgttgccacgcccatatatatgggtatatatatatatata

SEQ ID NO: 41468 - DNA, 1911 bp, DROSOPHILA
atggccactggcatcgagctgctggtggccgccgccctctgtgtcgcctgtccgccgctgaacgattccccgccgacgaacctaatccaaatgggcgagaatggcactctttccccggtcaccgagctgcccatggatgtggacgcatcggaagctggattcgatgcggatgcccccgtggagacgctggagaccattaacaggaagaagccgaagctgcgggagatgctcgattggatcggcggcaagcacctgcgcatcgctaccctggaggactttccgctcagctacaccgaggtcctggagaacggcacccgtgtggggcacggagtctcctttcagatcatcgacttcctcaagaagaagttcaacttcacctatgaagtggtcgtgccccaagataacatcatcggctcgcctagcgactttgatcgcagtctcatcgagatggtaaacagcagtacggtggacttggcggcggccttcataccctcgctctctgaccagcgcagcttcgtctactactccacaacgacgctggacgagggcgaatggataatggtgatgcagcgtccccgcgagtcggctagtgggtccggactgcttgcgcccttcgagttctgggtgtggatcctgatcctcgtctcgctgctggccgtggggccgatcatctacgcgctgatcatcctgcgaaatcggctgaccggcgacggccagcagacgccctactccctgggccactgcgcttggttcgtctacggagcgctgatgaagcagggcagcaccctgtcgcccattgcagactcgacgcggctgctctttgccacctggtggattttcatcacgatactgacgtccttctacacggccaacttgaccgccttcctgaccctttccaagttcacgctgccgtacaacacggtcaacgatatcctcacgaagaacaagcactttgtgtccatgcggggcggtggagtggagtacgccattcgaacgaccaatgaatccttgtccatgctaaaccgaatgatccagaacaactacgccgtattctcggacgagaccaacgacacctacaatctgcagaactacgtggaaaagaatggctatgtttttgtgagggatcggccggcgataaacataatgttgtacagggactacctgtaccgcaaaaccgtgagctttagcgacgagaaggtccactgtccgtttgccatggccaaggagccgttcctgaagaagaagaggacctttgcctatcccatcggatcgaatttgagccaattatttgacccggagctgctacacctggtggaatctggaatcgtgaagcacctgtctaagagaaatctgcccagtgccgagatctgtccgcaggatctcggcggaacggagcggcagctgaggaacggcgacctaatgatgacctactacatcatgcttgccggtttcgccaccgcactggccgtcttcagcacggagctaatgttccggtacgtcaatagtcgccaggaggcgaataagtgggcgcgccacggaatcggacgaacgcccaacggccagtcggtggctccatcccggtggctccgtggctggaggcgattgaacagtggacatgggcagctcctgggcgcctccacccacggccaaaatgtcactcctccgccgccgtaccagagcatcttcaacggcggcagtcacggagatccactgaatcgctggcgacgtcccctcgcaaacggaaacgcccttggcaatggtgtcctcctgggcggcgattctgaaggtggtgtacggcgcctgatcaacggacgcgactacatggtattccgcaatccaaatggtcaaagccagctcgtgccggttagatcgccctcggcggccctctttcaatacagctacactgagtag

SEQ ID NO: 41469 - protein, 636 aa, DROSOPHILA
MATGIELLVAAALCVACPPLNDSPPTNLIQMGENGTLSPVTELPMDVDASEAGFDADAPVETLETINRKKPKLREMLDWIGGKHLRIATLEDFPLSYTEVLENGTRVGHGVSFQIIDFLKKKFNFTYEVVVPQDNIIGSPSDFDRSLIEMVNSSTVDLAAAFIPSLSDQRSFVYYSTTTLDEGEWIMVMQRPRESASGSGLLAPFEFWVWILILVSLLAVGPIIYALIILRNRLTGDGQQTPYSLGHCAWFVYGALMKQGSTLSPIADSTRLLFATWWIFITILTSFYTANLTAFLTLSKFTLPYNTVNDILTKNKHFVSMRGGGVEYAIRTTNESLSMLNRMIQNNYAVFSDETNDTYNLQNYVEKNGYVFVRDRPAINIMLYRDYLYRKTVSFSDEKVHCPFAMAKEPFLKKKRTFAYPIGSNLSQLFDPELLHLVESGIVKHLSKRNLPSAEICPQDLGGTERQLRNGDLMMTYYIMLAGFATALAVFSTELMFRYVNSRQEANKWARHGIGRTPNGQSVAPSRWLRGWRRLNSGHGQLLGASTHGQNVTPPPPYQSIFNGGSHGDPLNRWRRPLANGNALGNGVLLGGDSEGGVRRLINGRDYMVFRNPNGQSQLVPVRSPSAALFQYSYTE

SEQ ID NO: 41470 - DNA, 16870 bp, DROSOPHILA
cccattctgggttttctttattatttggaacatgatgtggtgagaaagttataataatataatatatataataatgtattcattatttaaaaaaattatttcctaattacttaagaatatttttcacgtagctattaaaatattttaaatatttatcagttttataaatcaatatttcgttttaaaagttttaaagttgttacaactttaaaggacaattagatataccattgcagtgacgaaagagctgggtgtaaaattgcgagaagcgacgaaatgaggtgacgaacgtaggaagtaaatacatatatgaggaagtttagaaggtaagcacaggctgatggcgataattggatgagatacatttatggtctatctgcttgtgtgcgaaagaaatgaaatataatgcttgattagctaattgttgggtccccattaaagcaaacaagaaggagatacatttttgttcatattggtttaagttctttatttaaatatagtaacctgtgaagacctaaagtatttaataatattagcgagccggtaagttccttgcaaattcagcagaaagaaaatcgatctttaaggttttagatacaaattccgaattataaacttttacatgacatcagtggttctttcagcgatggatttatgaagttcctcttaccgaattccgcggtttacggctcatttcagggcgcaaactgtcatccactcagctctgctcggcttgcagataattgacatgaatcactcagcacttgtgacacgaaaagtcactcaatttttggctcgcccactcaaagcccttgcaattgagtgagttaaacgctgcgtatacgtaatagcccgacgatgctgcatataacgtatacgcagcgagggaaacgactcgagttgctcggctcttcacgaggtcttatcagcaagtaacctgttggtcggccgtttagccgcacgaagttggaccgttcagttgcctgtgattcttcgttgacgacggacgcgaaaatcggcagaaaaatccgaaagaaaaacccaaacaagactttcaaacagaggaaaaattttcttcggcggaaggcaaaggaaacatattttcattgtgcggtaaagaactgatagcgaaagtgggagcgaggcagtgaaagggagaccaaacaagtgccgaaacgtgctcgagtgcctccatccttgcggtttttggtttttgtgttccgagccgtttctcccctccctgtatttatatacatttcgtatacgcggtgttgacacgtcggcggtcgacagctttcggtttttatttataccccctgtttagtactttttcccgtggccagccgggccaaaacttttcgcctttccgctgtttgtctcaatgcccaacaataataattaacggccagagtgcgagttaaagattaacttactggaagccagtttgaaattaaatcattaaattaaagcatcccgcagtgtggggtgagtatgggcggaacgctcaaatgtattcgaaaataagtttgacatgttttttggccagaccgatgtatgtataaccccgagtatattcattacgatccgaacaaattgaattcaagtcaactttctcctgcggccttttctttcgctcccacaaagaaaagtttttccgctgccaaaaaagactggtgggcctcctactggaggtcccgaaaaaaacattcaacttttatattgttttgcgacaaaacaaataagttagcagcagcaaaatggagaacagcacaagaaggctaaatggaaagcaagagcaaaagaagataacattaggaaaacccaattgcatttaaaaggaaatcgaaagtggtggtgggggagccacgtagtccgtttacattttatggccaagtcaaatggctcagtcgtcactgttccttaattaaaaatgcaaatttccctttaattttaataggtcctcgagtgtagggcgaaacgataaacaaaagacagtccgaacaactttcgattgattctaattgatcccctctgacatggatgccagtcattcagtcagtcagccagccagccatccatcaattgttgattcgataaacaaatgcattgattgctttgcccaacaagggcgcatgctaatgaccatgttgttcaggtggaaattggtcaagttagctgcgttgtatacgtaacgttaatcattattattgtcttgggacgcagatgtcataagtgataatcgtgtgatttaggatgattgatgctttgatttacttattagcggaacattggtgtcacatgcaaactcgttctcaactctgcctgcggagtttaagttcagccaagttagtcccctcaatcggatcatctttagacgcacactgcgtatacgtgatacgcgtgctcatttcaaggattccgcaagcccgaagcaattctatatgcaattctagcatcagttggtgtactcctacgatagttcaaaggtggggaagcaatggagcaaccatggatctaagtaaaaggaaaacgcatttcaatttgcatatcagaccgcgccaaagctgcctgatggccactaaaactggtctttgtggcaatttcaggtcgccgaaatttcgcaattggggcgaaaattgctaagatggtgtcttggatatcctcacccgattatcctcttttgctcaagctccattctcccccatttgcatttaaatcaactttgggccacgaaatagtgacaaattgagcagctggaacccaaaaaattcaagtaaaagttgcaaatatttgttttatccacttgtaagccaacgaggtgagcggctaattgaagtcagttttatattataatgtagaatattttcccaattttatgcaagtttagccgaaaccaaatattttttcaaaatagaagttctgctcaactgtatttttagagaaatatttgttcaattcctttttccctgtaatggcgatgtgcacattccgatgaaaacatttacatatttttgcagagccaaaactcaaagcaaaacattggcatttggttggaaaacgtatgttatttcttatgactgctttcggattaacaaaatatttattttggaactttaatggaagcgaagtacttattccgggctggttaaacggtttttattaaatatttactgatatgctgaaattactgaattgaaaaagtatagatagggtactttttagtcgaaccgctgaccaaaaccgatattttcattccaagcacttggcttgtatgctttttcaaaccgtttgccattttattggccaccaacttttgcataaataatgcataaggctaaaggcgtgtatgtaaatacacattatatgttcgtgtgtttatgaggcaaagggcttgataagaaatgcgtagaggggggagagccggccagctgcttgaatttatttgatttctcacagtcgcaagtcacaggtgacatttttacggccaatctgagcgatggaggccccagttctcagttcccgtacaaccagagtaagtccgggcagccaaggagccataaaacgattgccattcccaaggccagcactgccaagttggctatggaattgcctttgacttggtctttggtctagctcctattgccgccctgtaatctggtttttcgagtgggtggtcggtgtccctagttacctcccccattgacagccagtcagccagtcagccagtcagtcagtcagtcgtttgtggctaggattttcaaatttctccagagaccaagccagccaacccaaaccaacccaaaccaacccgattcggctcgactccgggctccctttcaatttacctctggtgatgtcgatgtctggttatgatttcggtccgtgcagttgctcacttaacttttgtcaataattcagcgtcctctgggagccacgcggggaagcaagctggttgcggggcagcctaatgcaggccaaaaaattaattgcttttcaattaaacgacggaccaaatagggatgcgcagaaagaaatcacttcgtgggagcttcatggatgttgaaaccgcaattggggcccccaactgaggcccaaacccgtcggccaacaacgtaattaattccctattcatactggagtccttttggctgttcgatttcagtgggggaaagtgcccaagcctgattttgtaatgcgcagataagtgctagtatcaaataacttattaaacgttttttaaaacatatgtaaattttggactccccggaaactttcaaagacatgaaaagatcccgaaaaggtggccatcaaaatgcgcttggtttttctaaagttaatagagtgtaaagttttttgtctaaataattcatgaaaaaggcctcatttaaatataaatgtacaaagcaaattccttttcaaagttccaaaaagaacttttcgctttgtcatctccccgaaacataacctatttagaataatccatttgacgccgaaagttttttccgcggcgccccatggaagtgtatttatcgattcattataatatggcttggagctggtcagggtcttcaccaacgccatcgccatcgtcatcctcatggccatcatcgttttgtgggtagcgcaaaccatccccacttcgtctctggtttttttcccaatgcaaccccatatcgtgggccacaccgcggttcaaatatcattaaaatgcaaaaattgacgttccacgtggaggaggcgactcgaaggatgggagggttgtcctggttgttctggccgaaacccagataataagtgagcggttctagtgtctgggctcctccgttccggcttagtcgagatgccggccatgaagagaacatttaattaatttcgtttgttgtcttggtacgttgattaaaacgccatttacaacagtttgcctgcatttaagtgagttgcttattaatttgcatagaccgggcaaagtgcttcttttgccttcctccccgcctcatacatatatttttctaaatgaacatattgtagacatgaatctgcataatgataaatggaaattgagaacagccagagccaggggataatcccgatgaaggtcagcagctggggtgtatcgtggcaacccgggataacttaatcgctcaaaagcagctgccacagaaaaggtcaagttctcaatttgcaagagtttctttttagatatttcaggtctggagattaggttttcgtacatttgaagggcttctatcgcattttgaaattgtttgtaattattgcaaaattcatttgctaacattactaagtacgctatattttctgttaaatttcgattaaaagaaaaatgtgtcaaaatgtttatgcacataccatgaagtaaacaatcttttgtcttattaagaattccacggccataaaactctcgagcttcttgttctcccaagtcgccataaaaaattaaggcctttacgctttggtaatatacaacgtagataatattcgcgtgcttttgttctcatctcatacgatggtttgtttcgcctgactttaaggtctaggccagttgatttcctcgagagaagatatccccgcattccaagacaattttccggttgccaaactcggtcatgttaaagcgtttacccgggcttcaactgaccgaagcgacaccaactgttttgggtctcgggagcgttgaatgcccaatggtcgtggatccctcattatgagtgacgatgggcaaggacacttttcagtgcactgccttctgatagggacattctgataacgacaatggcgaaacggattgcccctctcggtgggcggggcaggacaacaacccgtggagcggcacttatccggctgagattgctctcctcgagctgaatttatgaagccattgtctcctgctcaaccgcaactgttttgcagcgaagctgcagtaaatggtcaattaattatggtcactgccccttgaaccagccgccctcacatgctagcacatgctgcatctggaatgggttattctctagagatagtatagctgtgagatatcgaatgcaatatctcaaaggtattgttatcgtttgagttatttaaaagattgaaaacatcatgaaaaacaattagggaaaagcgtgctttatatatatatatatgaagtacctttagaaaagtgggcacaagtaaatatcactttcaataaaaaccaatttgtaccatgttccattgaccccttttgagagatttcaaagaccaagtaatttcggtggaagcaattctttgattcccagacttcaaggactggaccgttttaaattgaacctgagatccagacctaaagtgcaacgaaatatgcaatacaaaccagacaccacagctcaaggacgaggaagtgaggtagctccatgtgtagtagcaataaaattcattgatttttatacggttcgaatattggttgggcttgccatgagccatcagccatgagccatcagccatgagccatcagccatgagccatcagccatgagccatgtgccatccatatgccgtatgtgtgcgagccgccgatgtcgccgtgtgttatgcaaggacattggagtccgcagaggatggagcacaggacacggccgggaccaaggttgtgcaaacaaatggcgtcaaaagacaagggaaattggttttggtttcggttttgttattgttgctgcggctggctggaaaaaggttaagcgcctaaacaagtgagcaatgccaaacgaggaataggcacaaaatgagccatacaaacaacgataaaggaattgggccaaaaaaagggtttcagtgacccgtggagggggtgaaactttgaaatctactgattatccttgaagtggcatatgaaagttcatcagggaactttgcacacaaacgggctccgagattcgcagaagatactctacctttcaattgaaagggcagctaaatagaaaatttgtatgcagagttccattgaatgaaaataaatttcgccaagagattaaattagaatagattttcgtcttgtaattttccgcaccttaattaagtaaaaaggctacagggagatgggacacaagttgtagtagtagtagtagtagttgaatatgaatgcatcctttaagcaatagaataatttaacatacaaaggatttttgtgtatgaagaatatttgagatattcaaagcataagggccaaacagaaagcctacttcatggggccaaaaagataatcggaaaatacgaatgaccttaaggactcgaactacgagttgtaagtgaaattattgtccttgcatatgccaaatgaaaattgtgagtaaacaagccgaagaaagcagtggctgacaacacggccagacgaacagacagacagaggggggagataaggacgagtgtccttgttagccacacctcctgtcattggtcctagtcctgcaaactaagactgcggtcggcacgcccccggccaaaacgccaccacatgtcgaccactcgaaagttcgtcgctgctgtgtccttggcatttgcatttttatttcagactcggcttgcgtttcggttattactactgggaacgggttgcgtttgtgggtgggggttgggaaatctgcccggggagtgggtggtggccagctcatgacaactgcgagtgcatacgattctcagaagtttcagctgtttcagcagcaggcactcggctgccaaaaagcttacgtaaaattattaagcattcaaccaagactccccgactgggaaatggccggaaaatgtcctgcctgtcttaactggtccagttatacttatcttaaggttgcaggccaacaggaaaactgcttggttagttttctggaacccgttattctgggctctaacaagtgccgacaaacggaagaagtacggcttttgacagaatacatactatttacacataagtctgatttgttacgctatcaaagaaaatatacctactttgtattagactttagaatcattcccttgattattatattgtactgtgttttagtaagttaaattgatttgaaaataataatatgtaaaatttggacaagtaccactaagacctatgtatataattcaccaattatctgcacattaatcccaatggcttaccaaataaggattaaatttttaaaaatatattttccgagcctctcacgaatgcttgaaggttcttctacaattttaaaaaattgctaagccaataatcctggcactcgaatagcttagattgctggccatcacaaagaatggcctattacgagtattgttgttttcattgttgattccgacggatcataattggcccgaccattttgttttttgtgtgtgggtgtgggtgtgggggtgagtacgtggcaattgtaattgctcgccatattcaaattgtattttttcgagggactttaaagctcgttgaggaaaccacttaccacacacaaacacacagtggggacctttgacctctggaactgatggctctttggccgcatgcctcgttgaacgttggccaaaagtgcccgtgtaatttgtttgaaattcgtttcggtttttcagcttttttccacttttttccgcaattcctgtttcctactttaagtggctcgtgttagcaaacatttcaattttcgaattcgaatagactgtcaggtctgttatattctgctcagcatgggggaaaaagtggggaaagcaagcccaactggaagaaatccatagaaacaggcccatcggtatgctgacttgtttacattttggcttgactggccatggtgtttgccatgggatcaggggatcaggggatcagggaaccagggaatcaacgaaccaggggcgaggagttggccaaaaaggcccgcccttggccgtaaattcttgctaaaacaatcttattaatggccattcctgcccccaatctttctaataatgtttaactgtgatttttatatgcgatttcagcattctttttttttttttggtttgattttttgttgcttttgataaaatattaccgcctggatttcctgttgccgctgtgctggttgttgttgcctgccaattttagccatttagtttgatttcagcgttatctttatgcgaatgccgctgacgcttatcgtcgggtttgtccacatggaccttaatgggcttagcccgctggcacagggatgggcatcggagttgggagagtccggagattttgggcacattttggaggggagcacctctaggagccatggcaattgctattttggatatggccatagtcagggcattagaggagcattaatgtggtcacaggtatgtacaatagttaagtctaaaagggctcgagttgaaatgtctctctttctcaactgcagtttctgaatattccacaatcgtttctatttattagtaatctaatattaattatacccagacctatttttgtagcaagccaaagagtatttaagtctcactaccgattgaaatttccctactttttgcccacttatgactattacttcgatgtggactttgatatatgcgattcggagcgttgtgtgcatatactcaatatttatgtgtccatcgtaaatgtggcaaatacccgcattgagtgagtcagttactggaagattgccctcgattcgtgtgcatcgagagccaaatggaaataactctctaattagttgcagggcatataaatcatgtaaataaattaacccgccgcagctctcaatcgaatgagtatatatgtatatatatgagtatatatgtacgtacatactcatatgtgtatgaataattctcgaagcctacatttcaaaagtagctaagtgcaaagtggctgctaacaagtgaggcaaccaattaaagtgccagtgctatggcatcggaaaaaaagcgcaaaaaccagaaaaattcaggcaaaattttaattaaattccgcgtcatcaatcgatccatgacactgacgcagacattgaacacatgctcccaacggcctgtgtctgttcatctgtctgtgggacctctaatatcttgagtaatttcctaggcggcgagcaaactttattctttttgcagctctttgaagcgaaactaacgccaacttgtccgcaaactttgtaattgattatcacagaaatagccatgttaattagtgcaaaaagctcggcattgatcaccggccactccggccaatcgttagtggagttggtggcaaatcccgtggcctgctaatggcatagtttccatctgcttttccggtgtggctcgtactgcaggttcagccgaaagtttccgtgaaaatatgctcaataaatagctaatggcgacacgcaaacgagcttaatcaactttattcctggaaagagactgaaaaatatatatatataatatatctagttggttggtaaaagattcggatgcttagtggtttaactcaactaaatttatcatatgttttcaatttaaatccattaatattcgaatatttcctgatagatagcgtttgctttgcaattaaacaaatggtgtttgattgttttccgattgctatctggcctgtatcgcatttattgtttttgttcaagcttttgtcagttgactgtttttagggaagtctgtgaaaaggatgtatttataataaataagtcagtgtgtttaataacctgagaaacaataaaccgtatgatgtagcttatatatttccgagcaaactgtcttccttaagtggagtcacccacaagatatttaatttgcttttcatttaattccgtccggatcgtcggttgccgtaaatgggaaatcaaaaggtctttgggcgcataaaaggacccagaggatgtcctgtccgctcgccttttttagcactgtgttttggctatcctgcgcacccataaacatcctgacagtccattgagatacactttaactgcatctttaagcccgaagcgatggcgaattcattaatggctctgccctctggaggtcgcatgcaccttgtcgccataaaactccccaagcgcctataagtaggccatatactagcacttaaggaggagtcgaacagtttgatgtggatgcggatgcggatgttcctgatattgcgaaagcaaaaaaaacaccattgaagtgagcgtttgttctctccctggccttgtttcattatgtcacgctcggctcagtacacagaaaagaatttagctaaacaactaaaaatgtgtaagccacaaacatgctgtttaataacaagaatctgcaagaatgccgataatggtgcttaaacataaatattacttgtttactccattacacatatatattaaacacatttatttcggccctgatcagcttttcgcgcagtgtagctcataaaagcgcacaaaaatggtgacaaatgcatcaaaattaaaattacgaagtgtcgcagatcacggaaaggaccgccaagatgacacactcaacctgccttgttagtaatgataatgggagaagtgcggcgcgtgagtcctgcagaaggacaatggaggcgagagaaaaggggcaggtcgcagaatccaggatgaacgcgatgatgatgccgacgacactcgggacttgccaatgccggctgctggtaatgattgtgatggagtttatgggccacgccaggcaatccctggataaatgcgttcataaaaagaatgtcaaaacaaaaagttgttaactggcaatttttcttgtttccacgttgttgttatccccaggacacaatatccggcattcaaggctccctcaacctgctcctgttttctattaatttatcaaaatgattatactgccgccgtttgccccgcggctcaaaattccatggacattcctcttgttaaccggattgcaaaacatccgggctgtgagatactttccgtaatatctggagtaattttttagcaatttctcctgtccaccttgtctttgatggttttttttttgttaatggatacataatggtaataaataaggaaaaccttgagcttgattagatttattattgtttttcattttcaatgattaatgtttcaagtttgattgaccaccatctataatggttaaatgtctataaggtggcatatttaaatcgcaaatttcatgggttcttttgtttgttttcctttggggcttttgagaagctttcaattagttttgcaaactttgccgtaaaaagttttactccttaggttgtcaaaaggatttctgcggcatactgcacaaactttttcctccttctaatgacacaatggtctcgagttctaattaagttttgccatctgcaaaatactcgccctttcgtgtcgactatattgaccttgttatctgtgacccgggggtgttcgtcatgtgttcattaagcgcaggaattcaatttgcaaccttgtaaagtacccccgaaattgcccggagatcgtgattatccgggttttggaccgaatattggacgacttaacaaacaggtttttgttggagtcgcctacatgtgcatgtgcacacctgcatgttggccaaaacttttccggaacgttgttagatgaatccaattaaatttgcatttagttgctgtacgtgatcagaagccgtcagccatcggcatatttgcatcgatggcttttggttgctcgcttggttgccaaaacgttcgaccttcggggaagcaataaaattcccagaacttcctgctattgaaaacataagattaaatgccgcccacaatgaagtgtacaatggagagcttaccaattgttttgggtatctggcaattaccaattgttccgattggttgcagctcctaattgctggccattgtggcgagtgggcttcttgggtaatgggttactgataatctccttcgactgctggccaggatctgcttctaattgtgaaaagctttccacagagggaatgcggctttgttgaatgcggcttagaatctttagcttcagtttactgtatcctctagacagcacatacaatgttttggaattaaagtaaagtaaactataaaatacaggataggcctttaaatccttaatcaagcagtcttaaagtatggaaaaaaatgtgtatgccacgagttacttacttttcaacatatttctaattgatttcaaaacatatagtgcttctgaatgattaaaactagtttctttgcaaagaaaacaatctttgggggaattagtatgcaactcatctcagtcttaagctgtccgaatagcggttggtgtcggggtctcaagacttcattcttaatgcccagttagagacagcaactgtcacattggcattgtttttaataaactcagtgccccgaatctggaagcccagctcgaagctggaagctggaagctgggagccgagcaagcgtgtcctgacagcaaccaaaagtagaagctagtcggggcaacaacttaatcccttttggccaaaaagcagacaaacaaagggcagaactgaaaaagtgagagcaaagtttttggggtgggaataatgttgcggggcgggaatgtgatgtaccagcgggaaacttagtttttaagtccgtttaagacgaattccctgctgaaaactttgaaataaattgagttgagttttacacggttgtaaggcacttactatcatcgattttattgacgaacttcgagggcaatctccaatgcctaatgatgcagatgtaatgatattttagccacttgttctttaatagtttcggttaaacatggcttgaaacatttatattaaactgtacaatgttattccaactgaaactttctacatttgtatgcactttcagaactcaacggctcagtcaattagcgatgagcggaatatcgcacacggctctctaagcagccaagtgcttttcggccaggccatccatcgggtaaggagctcagttccgccggcgacggaaatggccgcttaagtggtgcgcatccgaaccggaaccaccggcagcaagtcgagcacacaaccaccactcaactcattagccccgggagccgtaaagatggccaacttaagctggctgagcaccatcaccaccacctcctcctccatcagcaccagccagctgccattggtcagcacaaccaactggagcctaacgtcgccgggaactactagcgctatcttggcggatgtggctgcatcggatgaggataggagcggcgggatcattcacaaccagttcgtgcaaatcttcttctacgtcctgtacgccacggtctttgtcctgggtgtcttcggaaatgtcctggtttgctacgtagttctgaggaatcgggccatgcagactgtgaccaatatattcatcacgaatctggccctgtcggacatattgctctgcgtcctggcggtgccatttactccgctttacacgttcatgggtcgctgggccttcggcaggagtctgtgccatctggtgtcctttgcccagggatgcagcatctacatatccacgctgaccctcacctcgattgccatcgatcggtacttcgttatcatataccccttccatccgcgcatgaagctctccacctgcatcgggatcatagtgagcatctgggtgatagccctgctggccaccgttccctacggcatgtacatgaagatgaccaacgagctggtgaacggaacgcagacaggcaacgagaccctggtggaggccactctaatgctaaacggaagctttgtggcccagggatcaggattcatcgaggcgccggactctacctcggccacccaggcctatatgcaggtgatgaccgccggatcaacgggaccggagatgccctatgtgcgggtgtactgcgaggagaactggccatcggagcagtaccggaaggtgttcggtgccatcacaaccactctgcagtttgtgctgcccttcttcatcatctcgatttgctacgtgtggatatcggtgaagctaaaccagcgggccagggccaagccgggatcgaaatcctcgagacgggaggaggcggatcgggatcgcaagaagcgcaccaaccgcatgctcatcgccatggtggcggtattcggactcagctggctgcccatcaatgtggtcaacatattcgatgacttcgatgacaagtccaacgagtggcgcttctacatcctattcttctttgtggcccactctattgccatgagctccacctgctacaatcccttcctgtacgcctggctgaacgagaacttccgcaaggagttcaagcacgtgctgccctgctttaatccctcgaacaacaacatcatcaacatcaccaggggctataatcggagtgatcggaacacctgtggtccgcgactgcatcatggcaagggggatggtggcatgggcggtggcagtctggacgccgacgaccaggacgagaacggcatcacccaggagacctgtctgcccaaggagaagctgctgattatccccagggagccgacttacggcaatggcacgggtgccgtgtcgccaatccttagcgggcgcggcattaacgccgccctggtgcacggtggcgaccatcagatgcaccagctgcagccgtcacaccatcaacaggtggagctgacgaggcgaatccgccggcggacagacgagacggacggggattacctggactccggcgacgagcagaccgtggaggtgcgcttcagcgagacgccgttcgtcagcacggataataccaccgggatcagcattctggagacgagtacgagtcactgccaggactcggatgtgatggtcgagctgggcgaggcaatcggcgccggtggtggggcagagctggggaggcgaatcaactgagatagggtaagtaacttggaggcagggactctatatagtaacaaaaagaaaaataaatgtgtaaggatgtgtcgggtgtgttggtgtgtttccctcatcagccaaactagaatgccgaatttcagttaacctttaatcaaaaaaaaagcgatttggtttggccaccctacttaagtcacatgtatgtatgcattgctttttacaccacattagtgtaagcttaataaatccctgttgaaggaaaatcagtcgcattcagccaacgacaggaggagttgcatttatcaatatcaccgaaaaatcctcatatgccacatccttgcagtcgaaaggagggcgtcgagcggattgcaagctcatcggttgattgcgattgtgcaagatggaaaattgcttaccgaatcacagagaattttgacgaaggactcattccctttccttcgggacaaagagcagcccattagtgggagcgaaatcagaatgcgagcaagccagcatgaatttaaaataaaataaaatgtgcagtggaagcacaacgaactcgagcactttccacgtacccaaaccctcctgcctttggaggccacaaaggccatcatctggcagcagattttcctcccagtgtttcgggccaaaatttcatttgtcgagctgcagtctgtgggccaggccagaacacttacctgcatagtaccattacccattacccattcccgtgcaccggtgagagcagtaaatcaactgccatgagtcagccaaaagttgcttcctgtcagcgcacaaatctcgacctcctggcggccctccgctcttccagacggtaataaaaagcatgtattttggaggttaccaactgctgtaacttggttaccagtacaacatttctgacagttttgatactctgctgaaatttatggggaaaagtacacgataattgcattttaagtagcttcagctgcagtgcaaatatgtaagacttgacaggatctccgattttaat

SEQ ID NO: 41471 - DNA, 2504 bp, DROSOPHILA
cgacggacgcgaaaatcggcagaaaaatccgaaagaaaaacccaaacaagactttcaaacagaggaaaaattttcttcggcggaaggcaaaggaaacatattttcattgtgcggtaaagaactgatagcgaaagtgggagcgaggcagtgaaagggagaccaaacaagtgccgaaacgtgctcgagtgcctccatccttgcggtttttggtttttgtgttccgagccgtttctcccctccctgtatttatatacatttcgtatacgcggtgttgacacgtcggcggtcgacagctttcggtttttatttataccccctgtttagtactttttcccgtggccagccgggccaaaacttttcgcctttccgctgtttgtctcaatgcccaacaataataattaacggccagagtgcgagttaaagattaacttactggaagccagtttgaaattaaatcattaaattaaagcatcccgcagtgtgggaactcaacggctcagtcaattagcgatgagcggaatatcgcacacggctctctaagcagccaagtgcttttcggccaggccatccatcgggtaaggagctcagttccgccggcgacggaaatggccgcttaagtggtgcgcatccgaaccggaaccaccggcagcaagtcgagcacacaaccaccactcaactcattagccccgggagccgtaaagatggccaacttaagctggctgagcaccatcaccaccacctcctcctccatcagcaccagccagctgccattggtcagcacaaccaactggagcctaacgtcgccgggaactactagcgctatcttggcggatgtggctgcatcggatgaggataggagcggcgggatcattcacaaccagttcgtgcaaatcttcttctacgtcctgtacgccacggtctttgtcctgggtgtcttcggaaatgtcctggtttgctacgtagttctgaggaatcgggccatgcagactgtgaccaatatattcatcacgaatctggccctgtcggacatattgctctgcgtcctggcggtgccatttactccgctttacacgttcatgggtcgctgggccttcggcaggagtctgtgccatctggtgtcctttgcccagggatgcagcatctacatatccacgctgaccctcacctcgattgccatcgatcggtacttcgttatcatataccccttccatccgcgcatgaagctctccacctgcatcgggatcatagtgagcatctgggtgatagccctgctggccaccgttccctacggcatgtacatgaagatgaccaacgagctggtgaacggaacgcagacaggcaacgagaccctggtggaggccactctaatgctaaacggaagctttgtggcccagggatcaggattcatcgaggcgccggactctacctcggccacccaggcctatatgcaggtgatgaccgccggatcaacgggaccggagatgccctatgtgcgggtgtactgcgaggagaactggccatcggagcagtaccggaaggtgttcggtgccatcacaaccactctgcagtttgtgctgcccttcttcatcatctcgatttgctacgtgtggatatcggtgaagctaaaccagcgggccagggccaagccgggatcgaaatcctcgagacgggaggaggcggatcgggatcgcaagaagcgcaccaaccgcatgctcatcgccatggtggcggtattcggactcagctggctgcccatcaatgtggtcaacatattcgatgacttcgatgacaagtccaacgagtggcgcttctacatcctattcttctttgtggcccactctattgccatgagctccacctgctacaatcccttcctgtacgcctggctgaacgagaacttccgcaaggagttcaagcacgtgctgccctgctttaatccctcgaacaacaacatcatcaacatcaccaggggctataatcggagtgatcggaacacctgtggtccgcgactgcatcatggcaagggggatggtggcatgggcggtggcagtctggacgccgacgaccaggacgagaacggcatcacccaggagacctgtctgcccaaggagaagctgctgattatccccagggagccgacttacggcaatggcacgggtgccgtgtcgccaatccttagcgggcgcggcattaacgccgccctggtgcacggtggcgaccatcagatgcaccagctgcagccgtcacaccatcaacaggtggagctgacgaggcgaatccgccggcggacagacgagacggacggggattacctggactccggcgacgagcagaccgtggaggtgcgcttcagcgagacgccgttcgtcagcacggataataccaccgggatcagcattctggagacgagtacgagtcactgccaggactcggatgtgatggtcgagctgggcgaggcaatcggcgccggtggtggggcagagctggggaggcgaatcaactga

SEQ ID NO: 41472 - protein, 600 aa, DROSOPHILA
MANLSWLSTITTTSSSISTSQLPLVSTTNWSLTSPGTTSAILADVAASDEDRSGGIIHNQFVQIFFYVLYATVFVLGVFGNVLVCYVVLRNRAMQTVTNIFITNLALSDILLCVLAVPFTPLYTFMGRWAFGRSLCHLVSFAQGCSIYISTLTLTSIAIDRYFVIIYPFHPRMKLSTCIGIIVSIWVIALLATVPYGMYMKMTNELVNGTQTGNETLVEATLMLNGSFVAQGSGFIEAPDSTSATQAYMQVMTAGSTGPEMPYVRVYCEENWPSEQYRKVFGAITTTLQFVLPFFIISICYVWISVKLNQRARAKPGSKSSRREEADRDRKKRTNRMLIAMVAVFGLSWLPINVVNIFDDFDDKSNEWRFYILFFFVAHSIAMSSTCYNPFLYAWLNENFRKEFKHVLPCFNPSNNNIINITRGYNRSDRNTCGPRLHHGKGDGGMGGGSLDADDQDENGITQETCLPKEKLLIIPREPTYGNGTGAVSPILSGRGINAALVHGGDHQMHQLQPSHHQQVELTRRIRRRTDETDGDYLDSGDEQTVEVRFSETPFVSTDNTTGISILETSTSHCQDSDVMVELGEAIGAGGGAELGRRIN

SEQ ID NO: 41473 - DNA, 11647 bp, DROSOPHILA
tcgtagactactttacgattcttattgaaaatcgcagtggtattaatacttttttcacttcacttaacttatttgtaacatttaccggtagtatcaaagtcgaataagttctcgaatcgatcaaaagaaaagcaaaagtgcctcttatcagagccgcattttgccccctttattttaccccctgtaaacggcactagactccggccaaaggccgttgagattaggtggtggattccaggcgaatgtaataaagaaatataagcatatgcatataaactctattcttagcctcttgggcgctgtaagggggtgtgtagggtttagggggtgtagggtgctcaataaattttgcgatagataagccacgaatgccatccattatgccaccagtcccttccatcggtgtgtcaaccaaatttgcatggattgctcgtctatttggccgagtaattaacagttagccagcagccaaacatggcggcaacatggcaaaatggcaattaacactctaatacagatgcaactgtggagtttgcggagcttgtggagttggcagcaccacaacaacagcaacaaaaacaacaacacacacggtgcggtttgttatctggcaccggaaatgcaataaataattgagaacagccccgagcatttggtaattgtaatgagcaattgtgttcaatgacaaattatcattggtatttcttgtacaccgttacacacgaccaaaaattgtggaccatggcggcgataaagataacggggtcgaaagcgtaacacttccgtttccggttgaaaaatatagcgaacggagaaattttcgagtattatcgcatgggattttcccattaagtctgcattaccataaatgtgtaagatttagctaataaataaacaaagcaggcgctaaactagaccaaaagaattaaatgaatttaaggaacattttgattatgctcttgttgcgtcacatacttatgcatttatactctatattacaggtacaacactgaccaaggagcgatggaccagcaattctgcttgcgctggaacaatcatcccacaaatttgaccggcgtgctaacctcactgctgcagcgggaggcgctatgcgacgtcacgctcgcctgcgagggcgaaacagtcaaggtgcgtccatgagatacacttaaagatatagatatacatatctgacattatttcatattcattctattgcaggctcaccagaccatcctgtcagcctgcagtccgtacttcgagacgattttcctacagaaccagcatccacatcccatcatctacttgaaagatgtcagatactcagagatgcgatctctgctcgacttcatgtacaagggcgaggtcaacgtgggccagagttcgctgcccatgtttctcaagacggccgagagcctgcaggtgtgtgcaaatcagggatctattttaagggacacgactttaggacatccttttttgcttgtatttaaggcataaagaatatcagagtcattcacaagctttaaagtatggcgaagaaatatgttgtcggcttactttaaattagttattattaagcgagtcttgcgaaacaaagtgtgccagaccacatgtaataaatagtcttgcttatcaaactggggaattcccgaatttgtgtccgctaccccaacaacaacaatttaatatgaacttataataatatgtacgttatttgggacttttccaggtgcgtggtctcacagataacaacaatctgaactaccgctccgactgcgacaagctgcgcgattcggcggccagttcgccgaccggacgtgggccgagtaattacactggcggcctgggcggcgctgggggcgtggccgatgcgatgcgcgaatcccgcgactccctgcgctcccgctgcgaacgggatctgcgcgacgagctgacgcagcgcagcagcagcagcatgagcgaacgcagctcggcggcagcagcggcggcggcggcagcagcagcggtagcggccgctggcggcaatgtgaatgcggctgccgtcgccctgggcctgaccacgcccaccggcggcgaacgatctccgagcgtgggcagcgccagtgcagcggcggcagctgcagcggtagcggctgcggtggcagcggccgccaatcgaagtgccagcgccgatggatgcagcgatcggggaagcgaacgcggtacgctcgagcggacggatagtcgcgatgatctattgcagctggattatagcaacaaggataacaacaatagcaacagcagtagtaccggcggcaacaacaacaacaataataataacaacaacaatagcagcagcaacaataacaacagcagcagcaatagggagcgcaacaacagcggcgaacgtgagcgggagcgagaaagagagcgtgagcgggacagggacagggagctgtccaccacgccggtggagcagctgagtagtagtaagcgcagacgtaagaactcatcatccaactgtgataactcgctgtcctcgagccaccaggacaggcactacccgcaggactctcaggtgagcacacattacgtatacataatattcataatatggggcattacgtatacgcacagtggtgcgcaaatagttttgaattgggttggaattgggaaaaatttgcagggcgttgtattttaaacaaaaaacaggtttatttgtatttaagccatgcagttccttagaattccaagcctaattttattaagtttcgttttgttttattatccaaatcagaattaaagccgtaaataatggcttacatatatgcgggcttctgcataaaaaatgagctaaggtccccgaagttagccttccgtgtttatttaattgttttattggccagctctttgccctcgcaattaaattacctctgtttctggttttttgttttcccacaaacatacctaaacaatttgccagttccgtcggtcagtgagtcagttattcagccagcaattccgcatttaaatgtcgttttttttttgtggtgtatactttaattgcctgacaattaaaattaattagaaattatctcacattcaaacaggcgtcaaatgcttattagttacatacattataattatgttataaatactgtatactactttttaacgcagtttttacaatgtattttaaatttaatttttatttggcttcaattgatttaaattcttttttaaaaacggaaagcaagaatacattgtatttatatttaatacatctagttaaactatttatcaataaccccctttttttctgttcttaaggatttacaagctgcaatagctaaaagtcttatctttagaagcccataaaatgggattccatactaggaataaagatttgctcaagtgccatttggggttttagcgcatattaacaacaaaaatccgaaaaaaaaacccggttaaagagttgatggcatatcttagacatatgtatctttatttggcgtaccacccactgggtcgaccttcgtgccgcaatgccataagcttgccaaacttttcactatcgctcggcggatggataaatggaggggcaggcaggcgggcgggcaggcaaacaaacaaacaaacaatatcaacatttatgtttggcatgtgcgatacgaggggcacacgctccactcgctcacatgactgcggtatcaactatggccgctgatctgcgatcaaatagggcgacgctgctgttttgccagctatttcgggtttcgcgttgttatcagtgggcatgaagttttgtgggctaggcacgtgccgctctccctttcaatggcagactctctcgctttcaaccaggtggcacgcgtgctatgttgttgctgatttttagataacctataaacctataattggataaatatttggattaagttctcttacaactaaaaggtaacttattttaaagtactcaacttgtttgcaggccaacttcaagtcgagtcccgtgcccaaaacgggcggcagcacatcggaatcggaggacgccggcggtcgccacgactcgccgctgtcgatgaccacaagcgttcatctgggcggcggtggtggcaatgtgggcgcggccagcgcccttagcggtctgagccagtcgctgagcatcaagcaggagctgatggacgcccagcagcagcagcagcatcgggaacaccacgtggccctgcccccagattacttgccggtaagtgtgatcagtcagttcagaatagtcgattgaatatacagtgcatctcgatttttgattgaattatgattttgttgctgcatcgtttagtttgttaaggttttttctttttgaaccggtgcgatggttccagccactgtacagaacattcttgtaaagcctttttgtttaaatcagctatacagtttacctctaagctagccaattgcaaaatgcttcccaaaaacgtgagacaaccgtagacaaactctaaaaaattgtattcttttaaaatttaagtaaatcgaagcgaatctagcaaaatgggagcagaacgaaggattggtgaatgattgcgtttaattgaattttccaaattcgaagcggaatatcggccaaagaaaaagaaaaaatctcaacaatgctgcgcctcaagcaaaagtaaagtaaaagtaaaagcaaaagtaaagtaaagtaaagaccagaaaatccttccttctatcagatccatgttttgccaaccacattttctcaatcctgtgtgcaggtgaaaaagtcagaagcgtttttaggcagcactggcaacaagtccatgcatcaaatgctcctccaccaggcagtggaggctcagttgaagagctttcagctgcattatcagaacgagggcttggattctgccatgcacagattgctggcacagcagcaacaacaccaggagcagcaacaacagcatcaacagcagccacaccattcgctgggaaaatcccaaagcccagcgataccatcgggctctgcgggaggaagctcccggaaaagtggtcgatttagggccaactggctgtatcagttcgagtggctgcaatacgacgagcgggccaacaccatgttctgccgccattgtcgcaaatggagcggcgagctggccgacatacgcacctccttcgttgagggcaactccaactttcgcctggagatcgtcaaccaccacaacaaatgcaaatcgcatcgcatgtgctacgagcgtgagctccaggagcagcagcaacatcccatgcccagtggaagtgcaggaggcagctccaagcgacgttcccccgaaattatcaccataaatgtgggcaagaacagcgcatagagacaggtccttgaaagaggacccaacacaccgctcaggattagccataggcattagcattaagttttcgttatcaattaaatgtccgaaaagtaaaatatatttagtaacctaagaacttggcagctactatgaacaaaagcaaacagcatttgcattggcgaaaattgaacaataaactgagaagcattaataaaagaatataattattttgaaattactgcagcattttgcaattggtgagcaaagaagtagaaaggctttacaattttgtagtatttactgaggttatttatagttaaaactaaaataataagagaaaaaactatcagaatacaattttttggtgaaaagttagcattagcagcacgtgaagctgaatttcatttttcctaatgaaaatgggatgtattataaaaaaaaattgctagatatactatatcccctttatcctctctcccaatttcttgctgcaaccaaagagcgccgctctaaagctgcacgcggaggatatgtcaacgctgctcacgcagcatgctttgcaagcagcagatgcgcgggacgagcacaacgacgccaaacaactgcagctggaccagacggacaatatcgacggtgagtagatgaacgctaagcattgccatttagccatgtagccttagccagaaccgagctagcaccactacaactacaactactacaagtaaaccacacacaaaagaatcttcttctctctgagcttttgaatacctaacgcactcgaaaaccgaaagaatatcttaccttatgtatctaaatattgcgtatgtaatttgttattagcttttggttcatatacaacttttttttccccttcctaccaactttgtttccaccacgcgttcaagaaaagcgagaaaacccttccaaaaaaatatatatattgataaactgtaaagaaaattgtagaaaatttgtagcttaattctgtacctttcctgctacggcccacttaaatatctaactcgaaagggaaaactattctaatatatatatgataagtagaataaacccctggagatttccctcagttatttagaaaatacatttataaattggagaagaatggctgagcaccaagtacatattgtaaagtattaaagttaatgaaatattcccataaagctccaacttataactatattttctgataaatcctgcatgcattaaatgataccctatcttcctcatctttccaaaccccgagacaagtaatacccttttttgtatgcttttgtaagtgcagtacctttagttgccctatgtatttatggatattctccgaatgatagttcctaagagaagttagactcaaagtgctagctagagcaacagatcaacacctctcctaccagaatatctctacatgcatatctttattatttcgttgtttgtcgtatcttatggtattctataatatattgataaatatacctaaatctagcttttaggacgagtttcccatttgggctgggactagatcgcgatttcgaatgcggttctagtcttttgtcgtatgtttgccgcatgttgcatgttttatgacgcctttacatagacatagacacaaacacacacccacttaccttcgatactctcccacaccatcacatacacacatacgattatcatttaagtatcgatttattttaattttaaatgtattatttaaaacttatcaattgatttcaccctcttcatgctgccgccataactagtgctaagtcagatcgaaaattcccaattagtttttagaacaaaatgcctccgttttcatacaaaaaatccgaacaaataattagctcaattggcgtacacaacaagaaaaactaaacacttataaataataaaaaaaataatcacccaataaaacatgtaacaaatttcaaattcaaaataatttcatcagatacacttgtagttattttccaagcgctttcgtttgaacttaccccactttgttttcataacttattccttcttcgttttattctacattttcaaaactgtgctgaaaaaataaatgcaatttcgaaaacgtataccttttaaaacttttccaaatctcttttcgtctttaatgttgcaacttattgtctaagaaatggatacgaaaccaaaaagcaagaaacataataaatataaattactttcagtgtgaatacgaaaaattttaaaacaaccagcttccaaaagtcgatgtgttctattttttgtttaatccacacacacgcaaacactatcccacccacacacacacacacacacacacacacacactcaaatacactcgcccacacacagatacagactgtacttttcctattttggatatttctactaacattgctgcatttatgatttgatgtgaagaatccgttgaaccatattttgtcacactgttttttaacgagataactgtaactgactgtgttttttcaattggtttttctgccaagctaactaagtgtattccaactatctttcttttgcctactctctttctatctctatctcactctctctgtcgctctctctctgtacttaactgtctgtgtgtgtgtatgcttgtgtctgtgtgtgttgcacatattctttaaaagttttaacgagagctgccgccaaaataacggtaaagtgtaaaggagagcgacaaaattcgcacattggctccagattgcgcacaaaaaaaaatccatcaaactgaatacaaacaaattttgagtgaaattaaatcgaaatttaaatttaaattgaaattgaaattgaagttaccttacagctaaaagaaaatgaaaaatcccgcacccagcgtccaaaacaaccttcaaaaaccaacaaaaacccaataaagaaaaagaactggaatttgaatatacatataacaaaaaagtgttatactataataaaacaaaaaaatatatatattatatatacttactaccaatcaaaactatagctaaaaaaatctgttgcaacattgaagtactaaaacgaaaactatcccagaaaaccaaacaagaaaaaccgatatattgtgtatgagatctgtattatatagaaccgaaaataccagacattaagataagcccaatcaaaaaaaaaaatattgtcgatgccacaaaatgacacgaaaccaaagttgtttacattgattttgatttacttatgattttacccactccgtttcacactgttcacactgttgattgattgattgatttgctttgatgcaaagtatacttaatttagctgaattgttttcttagtgctataaagtcctgccgatccgaaacgatgccgccttagctttaagtccagccttgatttgatttgttttgttattccacagactctgcaaactgtatgattaagactcttgatttgatttgattacaccttgaacccttcacccacgatcgatttgtatattatgatttccaggcttcgcagttgcctctgcctaaaatcccagccccattgtccttgccgatcacttttcttgtttttgctcttcgttatatacatacatagtacatatatatttttggccaccacacgcattcaaacaccaagtttgttccgaatcgaaacgaaatggaaatgtcccgaatccaatccacacatttaaatccagtttcgtagctgtcttttgatcgactgttctgcataatcgagaaaataaatgacgtcatatggaatactctaacaaaataaccagcattacagttagttattttttataagacaaaaaataaaaatttgcaagaacatttgccaattgggccaagatttgatccctattccaaaatctggtaatatcattctcttaaataaattttcttttgattattcactttaaaatttaacataagtaaaatgacaaaatagattttttagaattttaatttttaatgcaacttcctagagcagttttggtccaccctaatcgggatttacttgtaggccccacactatacttctaaaacacccgttacaccagtttttttttttttttgccttccttctcctcctcatgtggctacttagttaaactagacaccattcacacccaccgtacaccgtacccgaataccattggcctgtttagcccactgtgcgcatggaatgcaagagaagcgcgatcgagtccctcttcgtcttctcatctctatatccaccccttgagctcccacccccacagtgatgacgcctaatatgaaccaagcaaatgtttgcaggtcgcgtcaagtgttttaacattaagcacgaccgtcatccggatcgggaactggatcgaaatcatcgggagcacgacgacgatccaggcgttatcgaggaggtcgttgtggatcacgttcgtgagatggaagcggggaatgagcacgatccggaggagatgaaggaggcagcctaccatgccacaccgcccaagtacagacgggcggtggtttatgctcctccgcatccggatgaagaggcggcctccggatcgggatcggatatctatgtggatggcggctacaattgcgagtacaagtgcaaggagctcaacatgcgcgccatacgatgcagtcgccagcagcacatgatgtcccactattcgccgcatcatccgcaccaccgatccctcatagattgccccgccgaggcggcttactcaccgcccgtggccaacaatcaggcctacctggccagcaatggagcggtgcagcagttggatttgagcacttaccatggccacgcaaaccaccaactccaccagcatccgccatcagccacacatcccagtcactcgcagagctcaccccattatccaagcgcctctggtgcaggtgcgggcgcgggttcagtctcggtttcaatagcaggatctgcatcgggatcagccacatctgcaccagcttcggtggccacgtcagcggtctcgccgcagccgagctccagttccactggatccacatcgtcggcggcggcggttgcagcggcagctgctgcggctgccaatcggcgggatcacaacattgactactccaccctgtttgtccagctatcgggcacgttgcccactctataccgatgcgttagttgcaacaagatcgtgtccaatcgctggcaccatgccaatatccatcgaccgcagagtcatgagtgccccgtttgcgggcagaaattcactcgcagggacaatatgaaggcgcactgtaagatcaagcatgcggacatcaaggatcgattctttagccactatgtacatatgtgatcacttctctaggcaggcagcaaaacaaatcaaatcaaaaaatcagtaacagatcgaatggttttcacagctaagtaaccaagaatcaagcaaacgtatacgtaatccagagtgaggagccaacagccatcagttggatgtacatctatatctatatctatacatttataaaccctatcagaaaacagaaaaaaaaaacaacaaaaaaaggaaaaaacaaaacctatgctacacgtagttgatttcaagactttgaactatttattgttaaatcgtcttaacctctagatgctttttcgtaggacactagccaatcaaatggattattatatcgatatagaaataccgcgaccagtactcagtggaggaactttgacaagtattatatgtagaattccaatcgatatccgcgtcagttattattattatttttactaacttaacatgtgctgtagtgaatgttgactaattatttttgttcgtgtcattttgtgccatattagctaaactctcttctagtccataggccctaaggtcgcaaaaacagatagttgaataatacaatataaattgcaacagaaagcaacgagtgaggaaattaaaagcgatatttaaaccagagtcaagaattatatcgggattaaatatttttctatctctattacgctatcacacgattttgtctcacttctgatcgaattcgcaatgaaattcagatagcgtccaatttcaagccgtttggccagagccccagagataaatatcgacttactgaagttggacgctctgctgatctatatctttggcaaaacacccaccgaagttgattggagttgataatactataaatagtttattaaatgaaccgctgaaaatcagtgctttgctaaagaacaaattctgatcagattttatcgaaagatgtacttaaacattagctatagtcaccaatcaagcaatgaatccaattaattaacacttaaatacagatatacataca

SEQ ID NO: 41474 - DNA, 2544 bp, DROSOPHILA
ggtacaacactgaccaaggagcgatggaccagcaattctgcttgcgctggaacaatcatcccacaaatttgaccggcgtgctaacctcactgctgcagcgggaggcgctatgcgacgtcacgctcgcctgcgagggcgaaacagtcaaggctcaccagaccatcctgtcagcctgcagtccgtacttcgagacgattttcctacagaaccagcatccacatcccatcatctacttgaaagatgtcagatactcagagatgcgatctctgctcgacttcatgtacaagggcgaggtcaacgtgggccagagttcgctgcccatgtttctcaagacggccgagagcctgcaggtgcgtggtctcacagataacaacaatctgaactaccgctccgactgcgacaagctgcgcgattcggcggccagttcgccgaccggacgtgggccgagtaattacactggcggcctgggcggcgctgggggcgtggccgatgcgatgcgcgaatcccgcgactccctgcgctcccgctgcgaacgggatctgcgcgacgagctgacgcagcgcagcagcagcagcatgagcgaacgcagctcggcggcagcagcggcggcggcggcagcagcagcggtagcggccgctggcggcaatgtgaatgcggctgccgtcgccctgggcctgaccacgcccaccggcggcgaacgatctccgagcgtgggcagcgccagtgcagcggcggcagctgcagcggtagcggctgcggtggcagcggccgccaatcgaagtgccagcgccgatggatgcagcgatcggggaagcgaacgcggtacgctcgagcggacggatagtcgcgatgatctattgcagctggattatagcaacaaggataacaacaatagcaacagcagtagtaccggcggcaacaacaacaacaataataataacaacaacaatagcagcagcaacaataacaacagcagcagcaatagggagcgcaacaacagcggcgaacgtgagcgggagcgagaaagagagcgtgagcgggacagggacagggagctgtccaccacgccggtggagcagctgagtagtagtaagcgcagacgtaagaactcatcatccaactgtgataactcgctgtcctcgagccaccaggacaggcactacccgcaggactctcaggccaacttcaagtcgagtcccgtgcccaaaacgggcggcagcacatcggaatcggaggacgccggcggtcgccacgactcgccgctgtcgatgaccacaagcgttcatctgggcggcggtggtggcaatgtgggcgcggccagcgcccttagcggtctgagccagtcgctgagcatcaagcaggagctgatggacgcccagcagcagcagcagcatcgggaacaccacgtggccctgcccccagattacttgccgagcgccgctctaaagctgcacgcggaggatatgtcaacgctgctcacgcagcatgctttgcaagcagcagatgcgcgggacgagcacaacgacgccaaacaactgcagctggaccagacggacaatatcgacggtcgcgtcaagtgttttaacattaagcacgaccgtcatccggatcgggaactggatcgaaatcatcgggagcacgacgacgatccaggcgttatcgaggaggtcgttgtggatcacgttcgtgagatggaagcggggaatgagcacgatccggaggagatgaaggaggcagcctaccatgccacaccgcccaaaggcggcctccggatcgggatcggatatctatgtggatggcggctacaattgcgagtacaagtgcaaggagctcaacatgcgcgccatacgatgcagtcgccagcagcacatgatgtcccactattcgccgcatcatccgcaccaccgatccctcatagattgccccgccgaggcggcttactcaccgcccgtggccaacaatcaggcctacctggccagcaatggagcggtgcagcagttggatttgagcacttaccatggccacgcaaaccaccaactccaccagcatccgccatcagccacacatcccagtcactcgcagagctcaccccattatccaagcgcctctggtgcaggtgcgggcgcgggttcagtctcggtttcaatagcaggatctgcatcgggatcagccacatctgcaccagcttcggtggccacgtcagcggtctcgccgcagccgagctccagttccactggatccacatcgtcggcggcggcggttgcagcggcagctgctgcggctgccaatcggcgggatcacaacattgactactccaccctgtttgtccagctatcgggcacgttgcccactctataccgatgcgttagttgcaacaagatcgtgtccaatcgctggcaccatgccaatatccatcgaccgcagagtcatgagtgccccgtttgcgggcagaaattcactcgcagggacaatatgaaggcgcactgtaagatcaagcatgcggacatcaaggatcgattctttagccactatgtacatatgtga

SEQ ID NO: 41475 - protein, 761 aa, DROSOPHILA
MDQQFCLRWNNHPTNLTGVLTSLLQREALCDVTLACEGETVKAHQTILSACSPYFETIFLQNQHPHPIIYLKDVRYSEMRSLLDFMYKGEVNVGQSSLPMFLKTAESLQVRGLTDNNNLNYRSDCDKLRDSAASSPTGRGPSNYTGGLGGAGGVADAMRESRDSLRSRCERDLRDELTQRSSSSMSERSSAAAAAAAAAAAVAAAGGNVNAAAVALGLTTPTGGERSPSVGSASAAAAAAAVAAAVAAAANRSASADGCSDRGSERGTLERTDSRDDLLQLDYSNKDNNNSNSSSTGGNNNNNNNNNNNSSSNNNNSSSNRERNNSGERERERERERERDRDRELSTTPVEQLSSSKRRRKNSSSNCDNSLSSSHQDRHYPQDSQANFKSSPVPKTGGSTSESEDAGGRHDSPLSMTTSVHLGGGGGNVGAASALSGLSQSLSIKQELMDAQQQQQHREHHVALPPDYLPSAALKLHAEDMSTLLTQHALQAADARDEHNDAKQLQLDQTDNIDGRVKCFNIKHDRHPDRELDRNHREHDDDPGVIEEVVVDHVREMEAGNEHDPEEMKEAAYHATPPKGGLRIGIGYLCGWRLQLRVQVQGAQHARHTMQSPAAHDVPLFAASSAPPIPHRLPRRGGLLTARGQQSGLPGQQWSGAAVGFEHLPWPRKPPTPPASAISHTSQSLAELTPLSKRLWCRCGRGFSLGFNSRICIGISHICTSFGGHVSGLAAAELQFHWIHIVGGGGCSGSCCGCQSAGSQH

SEQ ID NO: 41476 - DNA, 15843 bp, DROSOPHILA
aaatgacagcatacttggatgtaagagattaaacgaaatgtacgcattccaggcattccaggcattatcccaatttttaaagagatgtgagtaatgaacgtcttaactttatatttccaaaaatactcatttaaatattgaaaatggcttgcataatcagaatcattgctggaatcacctaatcgtcctcgcctataactgcttatgcaatgccgagtaagtcaagcgtagcggaggcctctggaaatgcgacgcgaatgttcgttgtacattatacattgcacattgtaagggtgctaatgggcgagcgatcaggaaatttcacatgctgccgcgtagacatttgcatatgaaaatagtcggcgtggcggcgacacaatgaccagactttcccaaaaaaagcgatcgctgcagatagcgcatccatgtaattgagtaattagcagtggcgaaacaattgtaagcgaaaccgccaataagtgcaggtcacccgagtgagatcatcccattaatcccactagcatcatatttgaagtgcattcttatattatcaatttgatcaattatattgcaataggtgcggaacgcaaagaggaaaatatttatttccgtatcgttatctgcattaacagccgtccatgtccttttagtttttattcaaataatattattttaaaataatgaagcagagcagttctgtaaaataacattcaaaaatagaaacattaagagatgtgataatcatgttagaatgtttctcatttggtagtgttttcgttcaaatcgcagactccaatctaaacttgacccacacccacacacagcataggtgaatccagcaataacaataacagggaatggattctaattggagatcagctgcatcgaggctgctctcgcgactttgggcttgcgtcgcaacagcacacacagtgctgttagtggcgccctcccgctctcgcattcgcacgcttctcagtctgtacacgtcgctcgatcgcattcgtcatttttgctgcgttgcgcgtgtctaccgacaagaaaacggggagcatataagtgaaataaggcgatatctttttttgtgaatcaaaacagtctgtgctccatgtgacacatttaattaagccttccgcgcccccctgcaagctgtcgcgtgagtcgaaagaaacggtgctgcatgcgcccactgttagtagtgttgcgtccctctcccgcactctcgggaactgtttgtgccgctgttgttgttgtaacgtgattgtcgcctgtttttcctattctgctgccgtctctcacctgtccacatctccgttgttgtcattgttgccgttgtcgctcccacccactcaattccaccgcaccccgatcctcccatctcccggttcgcaattcaatcaattcattttgctaacaacctgccccgataactgcttgtttagtcgtgtttcgaacttccgacgcagcaatcagaagttactccgtgcgatcccacatctcgttcccgtgttccggagaaagtgtctagcgcaatagcatttctgtagtgcaatagcatctcttcttggccggtggcagtcagtcacatgtgtacatacatacgtatgcagcgcatagtctggaccacgttatcgattttctaacgggctgaagaaactagcccgcaactcttcagaattcttcgtcaggcggcgtcggacattccaagagtctctccggcagttctgctgaatgaattcccgtcttctttcaatgccacttgcagtgaaaactggttaagacgtagtttaacaagaagaacgctattaatggtcggtgtttcagaaatcttagtgaacgaatggtattttttaatctcaaattaattagttaacatctacatgtgcatattagttatttgacatttattttcttaaccttctctttgcaacgaaaatttatgtattgagaccattttactctttacgagtatccactgtgtaattattattcgcctggagctgagttggctccatagcaaaacttacatacatacatatgtatgcgtttgtatgctcagccttttgacgtcttttagagttctttccaaaaatcaaataaagcgaagagggccaccgagtgctgtcaatgacccacgtcgcttgactgcgattttcgatttaatatttccttatcagattcgccgaccgaacgcttttcagccgcttgagagtactaaaaacaggcagcgattgctgacaatgagaactgccactaggtgtcgcggaactgggcgatctccacggctgtagtcccggaaccattcgtttcacaaagctccaccgacgatctaagctcacgtatcatgtgcggaggggtatttgtggcaggcaaactttagtattcatgattccacctcgttcgtgaccgagcaggtagaacacgctcccacctggcccagaatcgattggcgtgcatcccgaatgcggagtggcgagagggtcggaaggtatctactcccgcgctaataataagaattcgtcccatcgccgccgctttctctgttccaccaaaatgatagtcatcaatgcctctgacgtaagtggtccccactaacttgtatatgtacctatttccatttgtgagcacatatgtttgggttggaggtggcggttttttttaggtatatgttcatcggtcctttggcgtatgtctgtactgtctagtatctgtctaatgtctagtacttatgacttcgagatcctcttcttccagaagccgtgaaagatgcttagagctaggcgcactataagtattttcattgaggaacaggtacagaggcttttaagtattataagtctcccatttaaaagtgtaaaggctgctgcagcttgaaacggggaattcaaacagtcgtagttgaagttctgtttaaaactttgcattgctaatctaacccgatttgtttaagtttatagcccgagccctgggtgcaaattagctaagtgtggcttttgtaatgcttatcccccttccaccacgtgaggtctatccggtttcctgggcaggtactgctagtactaagcgattaactggcttagatatacggctaacgcgggagctactaactattgacttttgacggtattcaaccatttcccattagatttttgggcaccaaatgtttgatcgcgaaagcttctcatctaatatgccaatcacgtttcgcaactatttttcatagttttttttttttaaaccagtgctgcttttaagttccacttcacaaatttaactttcaaaaagcatgaagtcttagcgaggtgtggtattccgtatccgaatacacatccaaaataaaaaactggagggacaatgaaaaggaaagaagatagtttcggaaaacgtgtatatagccttgcagaatttatatactaaagaaacggtttgcatgcaggagaggattctgatcaaaatgaacttcttttctattatttataataatttttccggctgttctatgttgtatctgaatgcaaagctttaattaatgaaatactagtttgcttctacgccctgacggacaaacagatggacaggactaaaacgactatgatgttgacactgatcaagcatatagatactttagatggtcgcaaatatctcctttactgtgttgcaaaataaatataccattttctagaatatagtaagaaatggcagggaaaattaaaagatttatggataatgttcatacggatggatagacatacggaaatagccagatcaactattgatcctgatcaagaatttatgtgccttatatggtcagaaacgctgttttatacattgctaaggggaaaattatcagttttttatttaaatgatgcacaagctgtgtaaaaatagcaaaacacattctattttggatgtagcttatataggtcaacacaaaaacgctacttctaccacttcttaaacctcttttgcgggaaaaaagctataagtagatttatttggttaaggggttattatgcattgcatgcattactatgaattattttttaaagttatcaaggaacaaaagcagtttctattactcggactaactattcttaaactatcttaattatctatgttaacgctattttgaaaaagttccatatgagtgaactttagatggtgtatttataatcgcattaaaaaaaatttcgtcacagaacttgatatcaaattttagtatgttgaagatgcgattgcctctagttttttcctcgttgggcggtgcttttttatggaagtttgatggatggtttaataatgtttcaaaattgatattaagatttaaaaaaattctgatgtcaaacgaacttacatgtatagttgtgataacagcatgttgttggctactgattttcatgacaaaaataaatagaaattgctataattcgctgcccaaaattggtggtcgaaagtgggtcctttcacgttgggagtttcttttaaattaagcaattacattttaaatatttttttgttaagtatttaatagtcctattttctttccgcagacgggccttaccctcacacctgaaatgctgttgtccacctcggaatcatcgacccacagtgcctccgaggtcgccggacgactgcaggtcgacgtgcgtaccggcctcaaatggacagaggccaagtatcgtgccaagatcatcgggcataacgagctgctgctcgtggcggaggatccgacatggaaaaagtacattgagcagtttaggaacccgctaattctgctgcttcttggttctgctctggtgtccgtaatcatgaagcagtttgacgacgccgtgagcataaccattgccatcctaattgtggtcacggtggcctttatccaggagtaccgctccgagaagagtctggaggagcttaagaagctggtgccccctgaatgccactgcctgcgggaaggtcgtctagacacattcctggcacgcgaactggttcccggggacatagtgcacctcaacgtgggcgaccgggtgccggccgacgtgcgtcttttcgaagctgtggacctatctatcgacgagagcagttttaccggcgaaacagagccggcgcgcaaaattactgatgttttgcttaacaatacgaacgtaaaggaccacagcaacatgaagaacattgccttcatgggcactctggtgcgatgtggcaacgggaagggcatagttgtcagcactggggagcgcagtgagttcggtgaggtcttcaaaatgatgcaggcagaggaggctccgaagacgccactgcagaagtcgatggacattctaggcgctcagttgagcttctactccttcctgattatcggtgtcatcatgctgctgggctggctacaaggtaagccgctttcggaaatgttcaatatcagcgtttcactggccgttgcggccatccccgagggccttcctatcgtggtaactgtgactctagcgcttggcgtaatgcggatggctaaacgaaattcaatcgttaaaaagctgcctactgttgagactttgggctgcgttaacgttatctgctctgataagaccggaactttgaccaagaacgagatgacggccacgatcatcatcacttccgacggatacatggcggacgttaccggtgccggttacaatgatcagggtgaaatccacatacggcattgcaacaacgtggagatggctaagaccaatattacaaacctccttgaaatcggggcggtctgcaataacgcttacatacaaaatggcaccctcctaggacaacccactgaaggagcccttgtggcggtagccatgaagaacggaatgtacgccacagctgagaactacgttcgcatccaggagtatcccttcagctcggagcagaagatgatggctgtaaagtgcatccacaagtacaacaacaacaaggaagagattttcttcgccaagggggctctagagaccctgttaccgcagtgcaccaagtatcagtttggtacccagacggtaccacttaccaagcagaacgaggcagagttcctagccgaggcgtacgagatcgggcgcaagggccttcgcgtgttggccctggcaaagggccggtccatgcaagatctgatctactgcggcctagtcggcatcactgacccaccaaggccccttgttcgagagtctattgaaatgttgatgcagagcggagtgcgtgttaaaatggtgactggagatgcccaggaaacggccttggccattggtaagtaattaagatctttcgttagataggttttttaaatttgtgctctcatttagtcgcatttaataaatttgtatgcgggataaattatataagttcaagtcaaaagcagatttttgctcgcaaaaattcttgtttatatctattgtcttgagctaggcgaaactttattttgtaaacaaacatgtcctaggctctcaacattcccctaacaaaccaattttgtatttgatgagaattcgcacataatcgaggatacgggagtgtatgaggacctctgctcaagggagtgtggtctacttcattgtaaactgaattaattgaatatgagccggtggctagacacgccagctttttgcctgaagaagtttttttttgggatattttccttaaatcatttacataagtgtgagttaatttctgaaggtatgcacccaaagctctagttgaaacatcgtaagtcatctcgtaaggtattgggtaatttacaaaatatttttcctgcccgaaaagctcacaaatacacagctagtttgccaaattgcaaaagctagcgcgtacagagcacaaaagaaaccgtcaaaatggaaaagctaaaaagaaaaccaaccctaggtagctgttctattggggttccttggcaaaaaggggcgttccatatcaaatagcttgcaaaacagaaaataataggagagagcatcgacgtcgtcgtcagcagtcagaaataattaactgtggacctcatctccgcattcccctgaacttatcacagacccagcatcgtctgcatcctagccatcatatgcgcatctgcggcgggcaggactttgtccctgtctcttacatttttgtttttgatatattgaagcttgattgaagcttcaatattgaatcacttccattgctttgccatttacttttcttgtctgtttctgtcccctgtcatcgtgcaagctgtgttgtttagtaactaaatggaacatgtttttttacttttcacaatctattcagatatagctcagaaacggttttagtctgactttatatatgacttttaaaaaggactgtggtttttaagaaatccttggagctggaatattatccacaccattgtccaattagagccttcagaaaccaataatcacgtataaatatattgtataatatacaatataatgtatgtacgtataaatctattttaaaatcaaacaaagccaaattatgtttggtacccttcatatacatcgatttgctcgctaaccgttactcgtagattaagaggtatactagattggttgaaaagtatgtaacaggtagaagaaagcgtttccgaccatataaagtatatatattcttgattacgattaaaagccgagtcgatctggctatgaccgtttgtccgtatgaacgtcgagatctcaggaaaaataagagctagaagatgaagcatacagatttaagagataaagatgcagcgcaaatttgttaacccatgctaccacgcccactctaatgttctaaaaccgcccaaaactgccacgcccacatttttaaccatttttcgatattttttcataattttattagtcttgtaaatttctatcaattagccaaacaaatttttgccacgtccactctaaccgcccaaaactaccacgcccacacttttgcaaaatgttttcatattattaattttttctcattttattccccaatatctatcgatatcccagaaaaatgatgaaatttcgcgttcgcattcacactagctgggtaacgggtatctaatagtcgaggaactcaactatagcattatgcattgcattatacattttcatgaatgcagaccattcatttcatttattcattttgaatcttattttcctttaaaacaaggtaaaacatatttgtaatcgtgtgtatgctcgcattaatcagtctaaatttccatagcattgcaaacttcctcgcaattagcgaagtgcgtttgaaagtgcagtatggactcagggaaataaccctgcatgttgattgcgtgtttttttcacccagtacttataatggccattttcatggaaacacagtctgcaagcagccgaatgaagtcgtcacgtataaaaactcgctgaacaatttggagtgatttggagaatttgctcctccagcttccaaaaactatacatatgtggaagtaaaaatgcaaacgactctgacaaagaaaacttcgtactgtttcgtgagccatacgatggcttaagctaccaaatatgggctagtgtatttactcgggagtgcatgcttgttttatcaaaatattggacacaatttcgctttgattttggctccaactctactccgaaccccttttcatcccaatgccgtgagaagttttcttgtggatggctgttaaagggtgaacaaaaagcttgttgcacaattttatgcgcttgaaattttcataaactttgcagcaacttttgcatccggttgcacccacgattctgtcaatcgcggttgcggttatgctgcgctttttgtatcaacattcttaatgcttgcactctctatctatagttagtattttatgctattcacaacctcacttttacttaaaacacctatgtaaaggtagactccagaaaagaacccgaaatggggctctatttgctttcacaaagcatactatatcctattaataatctcatttaacattatctcattagtcattgtctatagcttatccaagtcggtttcaatgtcggcaggtattgttcagtcaaggttcgagtacagagtccggcgctataattatgcattgttttattatttattcatattagtctgagttctgctactttccgaggttgaagttacttataaatgcttccgagtggcgtagtcaccgagttaataatataaattagatattgtatagggatcacagtttgccttgacgtattcgtcaggtaaacatggaaaggtacattgatgcagttctacatcaatgtacctgaattgatatattttataatgcattgttatttatggcccgtattttgttattctgttgtccttgtccgatctgagcgagtaatagaaactaaagggatttatgcaaggcattgaaatgattgcaagggtacaagaaaaaattttaaaacagatgctgaagttatggaaaatgttatgtacctttataactgttttagcccaccgagaggtgatttattttgattttacaaaacctgtaagaacgaaaatccacatgatcgtatttgtttaaaatgtatctacttacgtttcatatggcattaacgtaaatcaaaggcaatgtgtgtgaatgcactgtaaggcaatgtaagaccaaaccttgtcatatctattgctcctataaactggcaaaattttcgatgcttaatgcagacggatatggctgagagactagtataaagaataacaattgcgttgctatacttattttaccagtccagtgaaacacaatatggagaagataaggacgcactttgaaaggcaccaaggcgcggtctgcatgctaccgactcctttacggctcgggcattagggcaaaaggatgtaaagagaccaggagacaaactgctcctgcaagttttaaacagtcctgcggagaattgaaaaaggggaaaatggtgagaagacggctacctcctggccacctcaggacggcggcggtctgcttttaattgttgggagacgggcgaatgggattcaagtcgctgaatgcgttttaattacgcatccctttgctcattttaccgcgcatctttgcgttgggcacaccctgttgcttttgttacagattgttattatttacttcagtgcactctggataaaattttgcacaaacacgacaagcactgggatgggaaaggcaaggagctcggttctgggcaggacaaatacgccggcgccataatgaaaaatggcggtgcgacttttcgcagaagttctgctgatgctattgttgttcctgtctcctacagctgccacccattgagcgcacttcatatatgcgctcgagtgcaaaaggaatggaggcgggaaatggtattggcataaagggtgtggggaagtaggtcgttccttcttaagtttttcaactttattgcttgggcttcaattgaattttcgaggagcaaacaactcgctgcctgcatacccaacaaattaacaattgtttttgaactcttctgggattaagatccaagtcgacggcttcaagctgtgccgacacacgcgattcctgcctggccaacggcaggaggggtaccactttgcagcgcttcagcctgttgctcgacaaattgcttggaaaatgcaatgaaagagatttacttgactgccttggcacaacagggcctgcctttagtgacaggtaagaagtggtgccagtcattagaactgggttcaaggacaaagggaagtgtttcgtaatttgtgagtcatgttcgctcacctctacagtctgccctaacacagttttgttttgtttatgcactccgtattaactctgcattagtctgcgcttttaacaagatttctttttaactcctcagcgaatctcatcggtatcgatacaatccatcaccagacgctttccggtcaggaaatggatcaaatgaacgagcaccaactggacaaggtagccaacaacgtgagcgtattctaccgcgtatcgccacgccacaaactggagatagtcaagtccttgcagcgcagtggcaacatagtcggcatgacgggcgacggggtgaacgacggagtggccctgaagaaggcggacatcggcatagccatgggaaagaacgggacagatgtgtgtaaggaggcggctgatatgatcctggtcaatgatgatttccacaccataatgtaagcggattacttaatcagttgagttttgcctaactttcttttcatgcagcgccgccatcgaggagggcaagggcatattctacaacattcgaaacttcgtgcgctttcagcttagcacatcaatagctgccctggccctgattgccctggccactctgatggacattgctaacccgctaaatgccatgcagattttgtggatcaacatcataatggacggtccgcccgcacagtctctgggcgtggagcccgtcgaccacgatgtgctcaaacagaaaccacggaacgtgaaacagccaatgatcacaaagtcagtggtggtgaacgttctgcttagtgccagtataattgtactgggcacgctgtgggtgttccagcgcgaaatggccgacgggacgctgggaaagaccaaacgggacacaacgatgacctttacttgtttcgtgtttttcgacatgtttaacgccctgtcttgccgctcgcagacaaagagtgtctttaccatcggactcactaccaatcgaatgttcttgctggccgtcgctttttcgatcattggtcaaatgctcgttgtctactttccgccgctgcaaatggttttccagacggaagctcttacgccgtatgacatattcttcctggtctccctaacctcatctgtgctggttgtttcagagataaagaaatggttcgagcgtaccatggagcgcaagatgtacagcacccgctccgagctggattttgtatgacaaaacgcaagcgctagagaagatttgcaccccaaaaccgagtaaattaaataactaacaaaaaaatccattaaaaaagtaaaactatgccaaaacaagcgaggagcgcggagaagtgcagttcgaaagaaaagccgaaaataagagcgacggaccaaggatgtgtgtgtttaattttacatttgacttgaccaattaagaatgatttaattgttattgtgggttttcaaccagattgcacagcagggattttcatagatttgaagtaagcttccaggtttgttctgtgcgctttaatttttgcattgttttataaatggcaaagagtttggttttattttaatgtgtttattatctaaataccctgtgtagtactattattttttgtgatccatttattcaaacatgctcacatatataaacgaaatcgttaagcgcatacaatttatttgttctacaatgggctgcaaagctttttttatttaacttttattttcattttatctctaagtgcttctctagtttctaatgctcaccgcgcaatttgagtcaatatgaagtgtttaataatctacaatgtcggcaaaaactgtttaatgtgatattattttaagcacataaaccagatcataccactagtgtgcagaatgcaaatttttaatttatgtttatttgcatctcaacttgtggaacaaattatttcaattttgaaaaataaaacttaaactgtaaagaaattgtaacaattaatttatgattttgattttcatagatcctactcgttcttccccacagagaagcaaccggattataaacaagtgaccacttactataatccgagtatgttcaccgggaaagtgcattaccactgggtcacagtcaacatacataaaaataaaacggatgcgagacaaaaaaggcatgaaatggacaaagctaagcgaggcgtagtaacgtaaaacatggcttttttttggtattattgataaataatttattcggtatttgaaagcaagcattcaatttgtgtaaaattgaggcaaatcaaaactctagcgtgctatcaaaataaaacaatttttgacgaactcatcccaaatcaactttaaaaggagagttcagatcaacaaaagatttttgtatgtaatcaaaaatgctataatttcagcatactttgtgggcgttgatgtgatgctttgataattaagttcatgattaatgggcttaccaaaacgaagtaatgcacgaagcaaatgagaaatacgaagcaatcagcaccgcgtttactcgaatgtaaagaaattttcgctcatatacttaaataaaaaataaattcataggaaagcatggttctttgtactattctgttgtttgttgtttaaattgaactttgatgcaatagattactaaacggcaaaagaaatttacaactaaagcttatccagattgtagtcaaaagtatacatctcaataaaaaattaatgaattttgaaaaaataaacaaattctatagattaccaatacttgggtaccccttataaattaacttaaatatcattgacataaaattcatatcataccaactcagagttcactgttgcactggaagcatatcacaatttgtccatgtttttatacccgttattaaaaaagtaaaaggcaattctgtattcgtagaaatgtaaaccctatcaaagaatatatattgttgctcactctgtccgtccgtatgtctatccgtataaatgtagaaatcttggcagctataaaagctagaggttaggcatgtaattttccagaccaccacaagcgcggcccataactgccacggcttcattttctagaaatgattttatatttttaagttataagtcttgtcaattcccaatgatatatccaagtttttttttttaattttgatatttttttttataaattttatcgataattaaaaacaattttgaaatacttccctggcactcccactagtcgagtaacgggtatttatagtcgagatattggactttagcgttttcatttttttatttgaatgagcttgtattcaacatttttcacaaaatttcaacttggttatagcaatttatgcgcaccctgcagatcgcatttaaaggaccaatcgttaaatacttcatttgatcacacacattaagatcagcttacgctcaacaaaaacgcactcatatcatggcaaaaaaaaaaaaatgaaaaaacttaaaaatacaaaaaaaaaagaagaaaaacatggaaaagtaattgatgagagctcgttcaacagatcaagcaattgaaggttcataatgatatcagcgcataaaagctcactaaaagtacataagcagaaaaccagagacacacaggcccacacacgttcagtcacgtctcatccacaatggtaacaataattagaaaaataagggtatcaatatagaataaaaaatatgaatgtctggaggattaaataaaatgcaccaaattaaataaatatgttagccaaagcaggtatacattatggaatttaaactgaactctactcaatgttatgtgtaagcaaagtccgaaattcgacttataatgaatgatggtactaaacgaattcttaaccacagaaatattattgatcgtctattaatatatatgtaagtttaaatgtctaactagaccgcctagtttaagagctccgaaaaatatgttgcctaaattcaccatttactaaaatagtttagtttggtgcaaagaaatgtacaattgatgacaatggtacgagttcttaaaatccatttttaaaaacgcttaacctataaaaattaactataactatctgtgctattaaacttaagctataaaatatagataaataccaagagtaattcaaaatacattcataaatacttcgagaataataagaaccatgagaaatggcataaagtaaattgaaccatcatcgttttgttttactaaatctatcctctacaagtgtatatcattttataagtttaacaatattgggacaagatcttaggcataaaatgaattttccaatggcaaccatacatttaatattaatctgcggaatatcgtgaaacaagtatgtatttaccgaatataataaactttatgtagtacagtattttggaggtcattgtctttaatattttttttaaaatggtgttgagggccttttcaataaaaaataaaactggtggtggtttcggtaaatgtgtcagttttggcattatttgtaatgtcaaaagcgcatttgttaaaatttgcgggggcaagcatgccatcccatcgctgctgtagctgaagaaacgtactttaaattttgcaaaggtattaagaaatttaaaattaaactttttagtcggaagttctgcgaccatataaagtaccaagtcgagtagcctgcccatatagcgcaaagccatcagttttaaagcagttttaatttaatcaaaatcggacaaccaaaatattaattaaaaataatatttatgaaatcctagtttagtttttttttcacaatttgtagacctgttactcgtaaagtaaagtgtgtaacaggtagctgagtaacgggtatgtgatagttgcgaagagttgataagaagagaagagaagagaaaagaagagaagagaagagaaaagaaaaaaagagaaaagaagagaagtagataagtagaaacagtagaaggaagtgctttcgactccataatgtacatatgtatatattgcccaactgagcaatctcgaaaagagtcttctgttgtttatttttgggatatcttcatatcatcactagttgagtaacgcataactaataataactaataatgttttttttctatcttcctctctctttaattttgattgggttagatttgtctttccaaag

SEQ ID NO: 41477 - DNA, 3566 bp, DROSOPHILA
cattcgtcatttttgctgcgttgcgcgtgtctaccgacaagaaaacggggagcatataagtgaaataaggcgatatctttttttgtgaatcaaaacagtctgtgctccatgtgacacatttaattaagccttccgcgcccccctgcaagctgtcgcacgggccttaccctcacacctgaaatgctgttgtccacctcggaatcatcgacccacagtgcctccgaggtcgccggacgactgcaggtcgacgtgcgtaccggcctcaaatggacagaggccaagtatcgtgccaagatcatcgggcataacgagctgctgctcgtggcggaggatccgacatggaaaaagtacattgagcagtttaggaacccgctaattctgctgcttcttggttctgctctggtgtccgtaatcatgaagcagtttgacgacgccgtgagcataaccattgccatcctaattgtggtcacggtggcctttatccaggagtaccgctccgagaagagtctggaggagcttaagaagctggtgccccctgaatgccactgcctgcgggaaggtcgtctagacacattcctggcacgcgaactggttcccggggacatagtgcacctcaacgtgggcgaccgggtgccggccgacgtgcgtcttttcgaagctgtggacctatctatcgacgagagcagttttaccggcgaaacagagccggcgcgcaaaattactgatgttttgcttaacaatacgaacgtaaaggaccacagcaacatgaagaacattgccttcatgggcactctggtgcgatgtggcaacgggaagggcatagttgtcagcactggggagcgcagtgagttcggtgaggtcttcaaaatgatgcaggcagaggaggctccgaagacgccactgcagaagtcgatggacattctaggcgctcagttgagcttctactccttcctgattatcggtgtcatcatgctgctgggctggctacaaggtaagccgctttcggaaatgttcaatatcagcgtttcactggccgttgcggccatccccgagggccttcctatcgtggtaactgtgactctagcgcttggcgtaatgcggatggctaaacgaaattcaatcgttaaaaagctgcctactgttgagactttgggctgcgttaacgttatctgctctgataagaccggaactttgaccaagaacgagatgacggccacgatcatcatcacttccgacggatacatggcggacgttaccggtgccggttacaatgatcagggtgaaatccacatacggcattgcaacaacgtggagatggctaagaccaatattacaaacctccttgaaatcggggcggtctgcaataacgcttacatacaaaatggcaccctcctaggacaacccactgaaggagcccttgtggcggtagccatgaagaacggaatgtacgccacagctgagaactacgttcgcatccaggagtatcccttcagctcggagcagaagatgatggctgtaaagtgcatccacaagtacaacaacaacaaggaagagattttcttcgccaagggggctctagagaccctgttaccgcagtgcaccaagtatcagtttggtacccagacggtaccacttaccaagcagaacgaggcagagttcctagccgaggcgtacgagatcgggcgcaagggccttcgcgtgttggccctggcaaagggccggtccatgcaagatctgatctactgcggcctagtcggcatcactgacccaccaaggccccttgttcgagagtctattgaaatgttgatgcagagcggagtgcgtgttaaaatggtgactggagatgcccaggaaacggccttggccattgcgaatctcatcggtatcgatacaatccatcaccagacgctttccggtcaggaaatggatcaaatgaacgagcaccaactggacaaggtagccaacaacgtgagcgtattctaccgcgtatcgccacgccacaaactggagatagtcaagtccttgcagcgcagtggcaacatagtcggcatgacgggcgacggggtgaacgacggagtggccctgaagaaggcggacatcggcatagccatgggaaagaacgggacagatgtgtgtaaggaggcggctgatatgatcctggtcaatgatgatttccacaccataatcgccgccatcgaggagggcaagggcatattctacaacattcgaaacttcgtgcgctttcagcttagcacatcaatagctgccctggccctgattgccctggccactctgatggacattgctaacccgctaaatgccatgcagattttgtggatcaacatcataatggacggtccgcccgcacagtctctgggcgtggagcccgtcgaccacgatgtgctcaaacagaaaccacggaacgtgaaacagccaatgatcacaaagtcagtggtggtgaacgttctgcttagtgccagtataattgtactgggcacgctgtgggtgttccagcgcgaaatggccgacgggacgctgggaaagaccaaacgggacacaacgatgacctttacttgtttcgtgtttttcgacatgtttaacgccctgtcttgccgctcgcagacaaagagtgtctttaccatcggactcactaccaatcgaatgttcttgctggccgtcgctttttcgatcattggtcaaatgctcgttgtctactttccgccgctgcaaatggttttccagacggaagctcttacgccgtatgacatattcttcctggtctccctaacctcatctgtgctggttgtttcagagataaagaaatggttcgagcgtaccatggagcgcaagatgtacagcacccgctccgagctggattttgtatgacaaaacgcaagcgctagagaagatttgcaccccaaaaccgaatgagagctcgttcaacagatcaagcaattgaaggttcataatgatatcagcgcataaaagctcactaaaagtacataagcagaaaaccagagacacacaggcccacacacgttcagtcacgtctcatccacaatggtaacaataattagaaaaataagggtatcaatatagaataaaaaatatgaatgtctggaggattaaataaaatgcaccaaattaaataaatatgttagccaaagcaggtatacattatggaatttaaactgaactctactcaatgttatgtgtaagcaaagtccgaaattcgacttataatgaatgatggtactaaacgaattcttaaccacagaaatattattgatcgtctattaatatatatgtaagtttaaatgtctaactagaccgcctagtttaagagctccgaaaaatatgttgcctaaattcaccatttactaaaatagtttagtttggtgcaaagaaatgtacaattgatgacaatggtacgagttcttaaaatccatttttaaaaacgcttaacctataaaaattaactataactatctgtgctattaaacttaagctataaaatatagataaataccaagagtaattcaaaatacattcataaatacttcgag

SEQ ID NO: 41478 - protein, 901 aa, DROSOPHILA
MLLSTSESSTHSASEVAGRLQVDVRTGLKWTEAKYRAKIIGHNELLLVAEDPTWKKYIEQFRNPLILLLLGSALVSVIMKQFDDAVSITIAILIVVTVAFIQEYRSEKSLEELKKLVPPECHCLREGRLDTFLARELVPGDIVHLNVGDRVPADVRLFEAVDLSIDESSFTGETEPARKITDVLLNNTNVKDHSNMKNIAFMGTLVRCGNGKGIVVSTGERSEFGEVFKMMQAEEAPKTPLQKSMDILGAQLSFYSFLIIGVIMLLGWLQGKPLSEMFNISVSLAVAAIPEGLPIVVTVTLALGVMRMAKRNSIVKKLPTVETLGCVNVICSDKTGTLTKNEMTATIIITSDGYMADVTGAGYNDQGEIHIRHCNNVEMAKTNITNLLEIGAVCNNAYIQNGTLLGQPTEGALVAVAMKNGMYATAENYVRIQEYPFSSEQKMMAVKCIHKYNNNKEEIFFAKGALETLLPQCTKYQFGTQTVPLTKQNEAEFLAEAYEIGRKGLRVLALAKGRSMQDLIYCGLVGITDPPRPLVRESIEMLMQSGVRVKMVTGDAQETALAIANLIGIDTIHHQTLSGQEMDQMNEHQLDKVANNVSVFYRVSPRHKLEIVKSLQRSGNIVGMTGDGVNDGVALKKADIGIAMGKNGTDVCKEAADMILVNDDFHTIIAAIEEGKGIFYNIRNFVRFQLSTSIAALALIALATLMDIANPLNAMQILWINIIMDGPPAQSLGVEPVDHDVLKQKPRNVKQPMITKSVVVNVLLSASIIVLGTLWVFQREMADGTLGKTKRDTTMTFTCFVFFDMFNALSCRSQTKSVFTIGLTTNRMFLLAVAFSIIGQMLVVYFPPLQMVFQTEALTPYDIFFLVSLTSSVLVVSEIKKWFERTMERKMYSTRSELDFV

SEQ ID NO: 41479 - DNA, 2663 bp, DROSOPHILA
gagtgtacagggaaaatgttcatttgatcatacaagaattgttgcccacatttgtgctataaaataattacttttacaagcatctacacatatgcgtcgattgtgactaataattttatttgtataaaactatataataatgatacatatacgaagccgaaagaaatgacattgcaggaacaaacaacggaggcatttcataagttaatttgtaaccgaacagtgcctgggataagtaagttacattgcaaaaaggataatttcaaaaagtgttgcctacttatcgcgcgcactgttcgaatattttacaaacgcttagttttagcaaacgagctcgcatttatattcttcacatatatctctaaatttaatttatgatctatactattaaaagagtaatataatatttcatttgcacgctgaaatatgtgaggaggagacgcagaaacgatcgaaatatcccctgtgttagtcactcatttatgtatattttccgttgacctaagttgcttgattgtagttagtgacgtttgtttgttttaaggactacctaatttttgtgtactttcttcttagttgttctagtttagttttgatattttttcattatgccgcataagtatatttgtttttagctcacaaaaacgaactctacctatctctgtctcgccctctttctctgtctgtctctctctcacacactcactagtacaccacctacccaccacccactatctctttctctctccctcgctctctctctgactattatacgaaaaaaaaaaccaatccaaatccaaacaaaaaattgaaaaaacaaaaaacaaaacaatcaaagaaatctatttctctgggctgattttcgtcccgctcgacgggctgttgtgtgttctgttcttctctttctcgttctcgaaccgcaggcagcagcgcccgccaccacctgtcgacccccctgtcgacctcgtcgtcggcctcgcccccgccgccccctttcgggatgcacctgtcggcggccctgaaacgcgagtaccatcctctgcactatatggccgccggcaacggtcacaacggcccatcggcgcttggttatggcaatcagggatcgggcaatgcgccgaatagtgccggaggagctggatcggttgcgggcggagtgggagccggcggaggagccggcggagcaactggagcagctggccataattcgcatcacaccatgtcgtaccacaacatgttcacgccgtcccgcgatccgggcaccatgtggcggtgccgctcctgcggcaaggaggtgaccaatcgctggcaccactttcactcccacaccgcccagcggtccatgtgtccctactgcccggccacctacagcaggatcgatacgctgcgctcccatttgcgggtgaagcatccggatcgcctgctcaagctgaactcatccatttaagggcgtggccggggcccaagtgcagcccatcaccgccagctttaccagcagcagcaacagccgcatcataagcagaagcagaagcagcagcagcaggagcagcaacagcagcagcagcatcagccgcatcagcagcaacagcaaccagcttactacgtcagcaactatagcaactacagcaataatagatacagctacagcgatagtttattgtaaatcgctgcagttctaggtggatttttcttgcatttagtcgtcgtccagtcgtgtacattacccactagctatccaagcaataaccataacccaaactagtagaaaaccgaagatgctatgctatggcaaaacgtaaagcgttaaacacaagtatattgataatcttaactaaacttattgataaactttgacacaatcgtcccatcaatttataaatgtgtataactaaggaagattaggaaaaggtttcagttgcgagtcgaggagaaggatatgcccagcatagagggccagtggaggcggaaaaaaagttttccaaagccacaacaaaccgtttcgaaggtttctaaatgttgtttcctaaaaactataaagtaataactacactaatactagagagagaaagtcgaggagaatcgttttgagccgattcagcaaattggggtcactaccacatcacgcggggtcaccagcagcagcagcagcagcagcaaaaggaggatgcggatgcgaatgcggatgcggatgaggatcaggatgaggatcagccagcacagcaacagtcacccacaaatactactcatacgaaggtcacattaggttttagtttactttaatttgtaatgtctagattttagtgttaaccgatatgttctgcggagtaggaaacggatgagggctactcaaccaactacaaagaaattttcatatacctcaaatgcatttcagttttattgttgattgctttaattttagtctacgtagtcagttagcacttatacataaagtaccacatacatatatgttattttttaatcggttccaatttgaatcggcgagatagccaatagtttaccaatgttttcctctgttttttagtgtgtgtggtgtgttccctatcactatcacacttttgattttgtcctatgcgttaagttgaagattttaggattagctcgaaccacttgaaccacctcacttttttttgttaagcttgttt

SEQ ID NO: 41480 - DNA, 579 bp, DROSOPHILA
atgcacctgtcggcggccctgaaacgcgagtaccatcctctgcactatatggccgccggcaacggtcacaacggcccatcggcgcttggttatggcaatcagggatcgggcaatgcgccgaatagtgccggaggagctggatcggttgcgggcggagtgggagccggcggaggagccggcggagcaactggagcagctggccataattcgcatcacaccatgtcgtaccacaacatgttcacgccgtcccgcgatccgggcaccatgtggcggtgccgctcctgcggcaaggaggtgaccaatcgctggcaccactttcactcccacaccgcccagcggtccatgtgtccctactgcccggccacctacagcaggatcgatacgctgcgctcccatttgcggctttaccagcagcagcaacagccgcatcataagcagaagcagaagcagcagcagcaggagcagcaacagcagcagcagcatcagccgcatcagcagcaacagcaaccagcttactacgtcagcaactatagcaactacagcaataatagatacagctacagcgatagtttattgtaa

SEQ ID NO: 41481 - protein, 192 aa, DROSOPHILA
MHLSAALKREYHPLHYMAAGNGHNGPSALGYGNQGSGNAPNSAGGAGSVAGGVGAGGGAGGATGAAGHNSHHTMSYHNMFTPSRDPGTMWRCRSCGKEVTNRWHHFHSHTAQRSMCPYCPATYSRIDTLRSHLRLYQQQQQPHHKQKQKQQQQEQQQQQQHQPHQQQQQPAYYVSNYSNYSNNRYSYSDSLL

SEQ ID NO: 41482 - DNA, 6984 bp, DROSOPHILA
acgtacgctaagtaatacttaatcagagggctttgtgggtgtgtgtgatttagattttaggctggttagattaatgcgtctgtgcggatgatgtataaattcattggggtacttaaaacataaattgcttgagacacgctacgattacagtgcttgctctacgatgtttactttatatcatgtgcgcaaatcacaaatcttttcatcaattacaaataaatagcatggagtgtttgtataaaataagagaggtctgtaaaatcagcatatatataaatacgcatatatataaatatatagatatatatatattcggattatgtatattattgcactgatgagattttgctttcagtttgggacgaattacaaaaatgcgatgatcaaagatacaaaatacgaacaaaaaggggaataaataaatacatgtacaaaaaatgaagggacgaagggactggacatacatataatatatataggacgtggtaggtgtgactccacttaagctaagtgctgatgctgctggtggttctaagaaactttctctcgtacaagtacacatagatatagttaggctacagatctaacggcaaagcgtataatacaatttctgcagtttgcgtttcgagcgacactgatgatgatgatgatggtggtgcgagtggtgatgtgagtggtgttggtggtggtgatgcctgtgtgatgttgccggatggtgatgatggcgcgcctgtggcggctgctgcgtctgctgttgttgcatatggctgtggtgatgactatttacaaggctcgcggacgaggcgctcagagccaccgccgacgagatcagggccgcagccaggcgcgatgaggaggccagcgcgagctccggggcggcagccagcagctgctggtggtgctggcgcagctgcgccacctgctgacgcttgagggcggcggtacccttgcgcatcgcatgcaagcgacgcctgtggtgatgcggatgcagttgcagctgtcactttgcctcctcgccggcttccaatagattgttgctcccattgttggtggcggccaccgccgccgaagactgctcactgatgccgacaccctgctgctgctgcatttgctgttgctgctggttgagcgcgtggacgtgctggcaaaatgcctgcagcacctcgaagtgggtcatcagattcgctggctggttgtcgtagtgcaagtgccgggtgatcggcgcattcagcctacgtagcatctccgtaaacaacttctcctcctttctaatccagggtcggcgatcatcctgcacctggtagggcgtcaggtggacatggatgttcatgcctgcttaaagactcccactcgttagttgactcaacttggcatttactctctctccacttacccatccgcgttagtgtttccagcaagctacgggacgtgatccaagtgttcttttggcccccatggccgccatccagccagtacatgtctgaaatccgggagagaaggcggcacatgctgctgtcgtcgggcgtgagcgtcttaagatagtggaactcgtagatgaactataaacaaaaaagaaagtgcagataagtatggtcagttgggtatgggccacaatcctcagataccgattcagcgtttagatttatactctacacgctccatcgacacttctgcataggattgaagctggcgtattggcgagtggatcaactaggtaacgaaccaaacgcgactcacttgattgagcacgacgcagcccttgctaaagccaatcagcaccagcttggatttgtccagattgaggttctcccgccaccacagcggattgctatcgctgcttgccgttgatgtggaggtgcccgttgccgaggctgttgttgcagaggcagcggaagcctgcctcgtaccacaatcgttgttgtagtgctccacattgttggtggcatttatcgccgttgtgggagaagtcatcttgatggctgccgccgtttgctgctgctgctggagctgctggttgttcacttgctcttggtggttgtttacactatcatcgttaccgccaccaccgatgttgccattattcccggatacattgttcactgcctctggcacttcgttgccaactatcggaaatattactgccccatccgcgtccactgtgatattctcctgcacctgcaatatatcaatgtccatctcctggctgctgtcgttggccggtgccgattgtgagttggactccgaggtgaccgtggcgttggatagcgttaaagctgcggccgcagcagcagcagccactgccgccgcagcagccgctgcctgggcggcctgatccagaatttcgttctctggtatggagatcaggcgctgcgatagattctgaagcagtctgtggggataaacaattgttattaataagagctttcttgaattgtacactatgaacttacttttctagatgctggagggcatggttcatgggcgtgtgatccggaactccagcgttgttgccccgaacaaaattgtcaaagcaactgaatgtcttgaactccatgctgcaaatgaaaatgcgtttatattatttataaattattattaaaatatgcaaaaactaaccgcacgggccggatgacgatgatgtgtgaccggggaaaggcctcgcgcagaaggatggccgagttttcgaggttgtacttcatgtagccccgactgtcacggttcgtctccatgctctccgggaagtcctgcacgtccccaccaaaatagattatggccgtggagtcctccggcacgtgcaccgagtgctggcgcacgatcggcgggcagtagacgatgtcattggcccggttctggaatccggccacggaaaagatgcggaatgggccggccgaagtgcttggcgtgcacagacgctccccgctgccgccgccaagcatgccctcgaagttacggatccgctcttgcagttgcaggaattgatcaatggtgagctgcgggatcgaatcggttcatgggggattactttacttggtgggcattaaccaatcacagcatcattttcacagcttcacacacaaacgctcttttttgaaaactttcacaaatcaatatactttcgaaagttctgaatagaataactgatgatatagaccacttctgttacagaactataaccctaaagctaaatacgatcttcttataatacacttgctttttctttagttccatcagaatagaaccatttcggattagtgatgaaatataaatctaaataagggacgtccttgtttgaaacccctcctaacaacctcttcttatcctagtagtaatcatcctcgtacgcgtccctaggattcccgcaacagccaacgaatcgcagcctggtgtcctccatgcaaagtttggcgtcctcgcgcatctcgcgtgcctttaggcgcacctcttcgcgcatcaggttgcgacacatggccaccagacccatgcccagcagcatgtagacaaaattgatggccaatttggagtgctgatcggcggccacggactgtagctgggccagctcggcaggatcggctgaaatgtcctcctgcaacttttgcgtcgctgcattcacatccgcactggtagtcagcgaggcaccgggcacaaagtcgccaaatccaatcttgcacagcgaggtcatgcagaagtaaaagctgttcagtaagctccacttctcccaattggcaaacatcacggtgccggtgagaacgtaaaagaaaatgacccacaggcaagcggtcgacggcacaatgacctttttgcgtgtcatgccaacaccaccctcaagggcgtccattcgatccaggcgcgggtgctcctgggtgcagtcgtgcagtgatcggtagaggaacttaaacgatctggccagcactctgcccatgttgaggaagtacaggatgtagagcggtatgccaaaggtggcatagatcacggtgaatcccttgccccacggagttcgtggcaccatgttgccgtagccaatcatggttatcaccgacaggcagaacattagggcagccggaaagctccagatctgctctggacttctgcccacatagccgtgtttgacaactccggctatttgcgactggtactccctcagtacatcgttcgtggcctccgtccagcgtcgacgatcgattatgttgtgctgctccgtgatgctccacagctgctgggagcagttctgacgcagctccatcacatggccagccgtctcgtccacaaactggcgctcgatgtgcatgaaggcgaatgctccacagatggcatagatcacgatcagagcgcccacgcccacctgggtgcacataaaggtgacgaagttgcggcagcagcgtttcacccttttcctcggctggttgctcggcgtagaggaaacactcgatggcccccctcccatgcctacagttccgccgggagatggtttcctctgaaatttgctggccattttagtcgcacatggattatataaccgattccacagattccggatatctcccttctggtcgaatggcctttgagcccgacgatgtgcaattaattggacagttatcgattctcaatctgatttagagcacggcggcgagtgtggaaatcagcaagttgtctaaaaatagacccacgcctttgcacggcacattttccacaagatcaaacgtgagattttcccgactgcacaaccgatcagcgcgggcgccaaaattcaactggtggaaatctgtttcgagggaaaatctaccaagactcggagagcaaacgagcggaaaagccagtggaaagccgaatgaatctatggaaaacaaatattgcggctcagatatttatgccagcaagtgcccgcggttctaaatcaggccatttacgtcaaatttatggacggggcaattaagacatcactgtggtacaggtgcaatatgcaacaatatacaataatctgtactgaaaaatagttacgattaagcatcttattatcatatagtacttcaattaattgataacgattttgtagaaatttcattgaaataactattgatatgttaggatgtcataataactaatgagtaatcattaggtttttatcattttagtacagtgagtacagtacagagagtattgaattggagaaaactatttaatgtagctattcgtatggtcctaaatcaagatttaaccgattttatcttggcaaaactaattctgcaaagttatctgcttggaataaaagtgctgatacacatattcccctgacaatttcctgcaattaagcaaatccgaaagatacagcctggtagtgttggtcataaaatttcggcactttgattgacgacgggtgtgtgtggtggagcagacggcgcgagagcttttgggaatctcggaattgaaaacggaatcagaattgggcgctatttttacggcgcggcgataaatcaaaacgggaaagagcatccgccatcgggtaacaacaataaaacggggccccccaaacaaactatacgtaaatataaacaaagaattaaaaaacgaaagcagagaacgcactcacacacacagactcatacacgcacgcacgcataggcggctgtgctgatagagaagaagaggaagaaagatcaaatacgcaaaaacggggggtgaaaatgcgtagcgaagagatagattttttcaacaccagcgcactcgcattcacacacacagacacacacgcacgctaactcgctgctgctgctgcacactcacacaaacacagttgaaatttcacaaaaagtttatgcaaaattttccggcgcattgcactctgcaattaccgttgcaattcacctgcacttttccgctacttacgctgtttattctcgttaatcgttgcgcgtgaaaattttggcgttctggctgctcttcccgcgtatttcccgtattccctcttcgtctgtttttcttttatcttgcgtctgtgttttcgcgactagagcagccagaactatcgatggcactatcggtgttttgtatctgtcgatagttgcggctatatggtggggagcgcataaccaacaccttatctatttcttggcctttcttttttgcacatatgtacagtatttttaaaaagttttaaatttaaatttgttcttaagcgcctaatatgtataaaattgctacttatcgataaatcagtacacaaatcaataggtggtcactctgactacggaaaagcgattgttagtgtgcccagtcatcgcgatttgtataatcgatgagttgcatataaggtggcaactccaaatattggcgggctcgacttaaatattcaaaaatagagacacatcgaaactatcaaggaaatgtgtatttaacattaagatatcgaattattgcgacattaaaagttttcacttaacttaatttatttcctttttctttttaaaatattaaattgctacatttcctaccacattattgttaatctatatttgcttctcaagttgcaaataaatgaaatgaaaataattaaatctatatatcaaaacttgaagttacttctgtcattaaatagttgtttgatttaagcgcccgattcaatattttacagctatgaaatccttatactcctctatactagaaaataattgtggtataattttagttttaaaacaaaaccaataacttcttttagttcgcttaatagttaaagttagtcaaaaataaattgtatgttttattttgtaagaaaaacaattttgagtgcaataaatgttactttattttcctttatttcattttatattgtaaaaggcaatgcttgttgtaagtaaatcttaaacctataaattttttttagatttttaaagcgcgttctttcattggagttgctcctttgattcactacatcgatgctaagacatcgaagtaaatgtacttctacctgcaaaaccaaacaatagctattga

SEQ ID NO: 41483 - DNA, 1733 bp, DROSOPHILA
caagataaaagaaaaacagacgaagagggaatacgggaaatacgcgggaagagcagccagaacgccaaaattttcacgcgcaacgattaacgagaataaacagcctcaccattgatcaattcctgcaactgcaagagcggatccgtaacttcgagggcatgcttggcggcggcagcggggagcgtctgtgcacgccaagcacttcggccggcccattccgcatcttttccgtggccggattccagaaccgggccaatgacatcgtctactgcccgccgatcgtgcgccagcactcggtgcacgtgccggaggactccacggccataatctattttggtggggacgtgcaggacttcccggagagcatggagacgaaccgtgacagtcggggctacatgaagtacaacctcgaaaactcggccatccttctgcgcgaggcctttccccggtcacacatcatcgtcatccggcccgtgcgcatggagttcaagacattcagttgctttgacaattttgttcggggcaacaacgctggagttccggatcacacgcccatgaaccatgccctccagcatctagaaaaactgcttcagaatctatcgcagcgcctgatctccataccagagaacgaaattctggatcaggccgcccaggcagcggctgctgcggcggcagtggctgctgctgctgcggccgcagctttaacgctatccaacgccacggtcacctcggagtccaactcacaatcggcaccggccaacgacagcagccaggagatggacattgatatattgcaggtgcaggagaatatcacagtggacgcggatggggcagtaatatttccgatagttggcaacgaagtgccagaggcagtgaacaatgtatccgggaataatggcaacatcggtggtggcggtaacgatgatagtgtaaacaaccaccaagagcaagtgaacaaccagcagctccagcagcagcagcaaacggcggcagccatcaagatgacttctcccacaacggcgataaatgccaccaacaatgtggagcactacaacaacgattgtggtacgaggcaggcttccgctgcctctgcaacaacagcctcggcaacgggcacctccacatcaacggcaagcagcgatagcaatccgctgtggtggcgggagaacctcaatctggacaaatccaagctggtgctgattggctttagcaagggctgcgtcgtgctcaatcaattcatctacgagttccactatcttaagacgctcacgcccgacgacagcagcatgtgccgccttctctcccggatttcagacatgtactggctggatggcggccatgggggccaaaagaacacttggatcacgtcccgtagcttgctggaaacactaacgcggatgggcatgaacatccatgtccacctgacgccctaccaggtgcaggatgatcgccgaccctggattagaaaggaggagaagttgtttacggagatgctacgtaggctgaatgcgccgatcacccggcacttgcactacgacaaccagccagcgaatctgatgacccacttcgaggtgctgcaggcattttgccagcacgtccacgcgctcaaccagcagcaacagcaaatgcagcagcagcagggtgtcggcatcagtgagcagtcttcggcggcggtggccgccaccaacaatgggagcaacaatctattggaagccggcgaggaggcaaagtga

SEQ ID NO: 41484 - protein, 524 aa, DROSOPHILA
MLGGGSGERLCTPSTSAGPFRIFSVAGFQNRANDIVYCPPIVRQHSVHVPEDSTAIIYFGGDVQDFPESMETNRDSRGYMKYNLENSAILLREAFPRSHIIVIRPVRMEFKTFSCFDNFVRGNNAGVPDHTPMNHALQHLEKLLQNLSQRLISIPENEILDQAAQAAAAAAAVAAAAAAAALTLSNATVTSESNSQSAPANDSSQEMDIDILQVQENITVDADGAVIFPIVGNEVPEAVNNVSGNNGNIGGGGNDDSVNNHQEQVNNQQLQQQQQTAAAIKMTSPTTAINATNNVEHYNNDCGTRQASAASATTASATGTSTSTASSDSNPLWWRENLNLDKSKLVLIGFSKGCVVLNQFIYEFHYLKTLTPDDSSMCRLLSRISDMYWLDGGHGGQKNTWITSRSLLETLTRMGMNIHVHLTPYQVQDDRRPWIRKEEKLFTEMLRRLNAPITRHLHYDNQPANLMTHFEVLQAFCQHVHALNQQQQQMQQQQGVGISEQSSAAVAATNNGSNNLLEAGEEAK

SEQ ID NO: 41485 - DNA, 7416 bp, DROSOPHILA
agagctctcgatcggcaaatgattaatcacgcattattcgccagcaggttattatacatatatatgaataatcttccatttaattgcctgatcggagcagttcgaaaatggaactttctctggcacccacacatcacttacgtttcgatttcccatcgaataagcgacagtgtgcgtgagttgtcaatgcttttatatacctatgtagattgccctaatgctgattaggtcgacgacatataaacacacactcatgggcataaaatatacaaatgtacatatgtgtataccccgagtgagtaggccgctcaatttggtatcgaacgtggcccggtcgtttttcctaaaacattttaatgctaatgagccgcaagctgtagacctactttagcctaggtgtgggccgattcagcgtcaaacagcctggcggagaacagaaaagacaaatggacatggacggacagatagatagatatacatcccatgtctcaatgacagcctgagagttgagttccctgccccggctggcacatgtgagtcgagcggaaaggaaacgactcgaatcgaatcgaatcgaatcgtattgaactgaaatcggtggggggaaataaaagaagttgtaccaaattagtgcgatgtgactgagtgacgtcgtcggggcttacgcttaagtaatgtgtgttttatgtgtgggccgtaaaactgggtaaccgtcgccatctgactccgtatccgactccgacactgacttcgattccgattccgagtccaactgagggccctgtcaggtcgacatccatgtcgattcgatgccaattgaactgttcccattgccgatgcacttggcaaactacgtgcgcaaatgtcgaacgtgccgattaaccatgcgaatttcctttccatctcgtttgcttgtacacggagaaaaaactccatcaaaatagcaagtacactttaagttgaaattactaaccgacgtcttcttttcctctctgtacagctacgaccatctgccacgtaatggccgcagttactgctccaactccggctgctcaggtggcagccccacctgtgcaaaagtttcacctgacgccccacgatctgcagatactcgagggcaccgacaccctcctgcgctgcgaggtatcgaaccgggcgggcaaagtccagtggaccaaggatggctttgcgctgggattctcggccgtaattcccggattcccacgctattctgtgctggtggatgccaaacagaatgcctacaatctgcagatcaagaacgccacgctggaggacgatgccgaataccaatgccaggtgggtcctgctgctggaaatcccgccattcgtgccaatgccaagttgagcatagtggctgctccgagtagcatcgttatcgagggctatgcccggaatgcccgagtggaggtggaggagcgccagaatcttacgctgcactgtatcgccgagaacgccaatccggcggcggagattgtctggttccagggcgaagttccagtctccacgggtgagtttaagtcatataataataatttaaagtatataagcattaaaacaatatcaaatttatgacaaattttgtgcctattttctcgccgtgtagcccccatcgtgacggtgaatcaaactgccccgaagcgattcacaactagctccactttgcacctgcagccgcgcgccgaagacgattacaaggagttctcctgcgaggcgcgtcacaaggctctgccccccgatgtaccgatgcgcgcccaggtgcagctctccgtactctgtaagtatacgccggattgtcgtcctttgtgtgtgtgtgtgtgcgccggcagagttcctaatccaaaatccctttgtcaaacccacagatccgcccggcgctccgttctttgagggctacagccagggtgagaccctgcatcgcggccaggaagttcaaatcgcctgtcgaagccgcggcggcaatcccccggcccaattgacttggtaccgaaatggcgtggccatcagttccccacaacgcacctcgggccgtctgtcggagaacgtttacaagttcaccgccgccgccgaggacaatggggctaatttggtgtgcgaggccaaaaatctgctggcgacaactcctctgcgcgccgaactcaatttgactgtcctgtgtaagttttcctaacaaagcaaagccataagccatatttacttttacggggattatatagaagggaaatctagttagaaatacagaacatatgcattaaagctctatattaaatgatttcttggcacaataggcatgtgataaacgttgtaatatgttcaatatttcgattgattaacatatcaaaatctttttcggtgcagatgctcccaaggatgtttatctgagcggcgccaatcaggccaaggtcggcgattccgtgcaactaagctgcgtgacagcgccttcgaatccccaggcccgaattagctggtccataaatggcagaccgctggacaatagcacctataagacgaccagtagctccgacggtggctgggtcagtagttccaacatcagcttgactatagattcgcagagcaggactttcatcgccgtttgccacgccctcaacacggaactcactcagaatgtggtgggatcacacaccgtgaatgtgctttgtaagttttctcagccctaacaccagttaactaccatgagatcttatcaagaaactatttcagcagcacttgagagatgtaattaaattataatttaattattttttccattcatccccttttcagatcccccttcgccacccttgttgacgggctataatgatggtgatatccttatctcgggatcgattttgaaacttcagtgcagttctgctggcggaaatcctccaccgacattgcagtggtacaaaaacgataagatcattaatgctccctccaaactggtggacagtaaaatcacctctgagctctcacttttggtaaacgcctccgataacaatgccatctataagtgcaaggttcaaaatgcagctattgacataccactatttgccaccaaaactttgggagttcattgtaagtagtggttatctatctatagaaataagaaattaagaggttatttcccatcttagttcctcccgaaacggttaagatcagtgtcgtgcccaagaatctagtgcctggcattcgagccaagctgatctgtgactccagctctagtaatccaccggcgaagataagctggtggaaagatggcattcccgtcgaaggtcttaacttggccaataggcccggtctctggggcggttcggtgtccacgcttgagatgtacgttaacataacccaggatctggatggcattgtctatacctgtcagagtcacaacgaggttctgcagcgcagtgttcacgaaacaattagcttggatatactttgtgagtaatgctgatagttcatatattttggggaggtcaaataaccatgccttaaacacctaattccccctagatccccccaaattcgagacgccacagagcaccaccttcgtgggcgttgagggagcgccgttccatgtggagctgctggccagcggaaaccccatggtaattacctatacctggaccaaggacggcctgcccattagcagcaatagtctgagcgggcagcgtttgatctccgacggacctcgtctcaatatcagtcgtctgagtcgcaatgatgcgggtgtctacatatgcgaggcgctcaatagccagggcaccgcgctgctggagattcaagtggccgtggaatgtgagtactaacttggctccaaagctgacccccaaaactggagctgactctttttttgtttcgcctcaattcatagatgcccccacaattacggcggttagcgagggtcgcagttttgtggccggcgaaccggcggtcttggcctgccacattcaggcccgcccgctagaggccgctcatgtgcgctggtcccgcgacggttatgatctggccacgcgcaccatatcgagttttgaaaatggaaccgccctgctgcagatcgccagtgtggagcgcagtgatattggcaactttacctgcattgtggacaaccaaagaggagctcccgccgcgcaaaacgtacttctggtggtgcaaagtaagtggttttaccaaggcttaattataagttctaaataataaaaaacaaatggtttgctaattataattttgtatatatttttgaacattttagctgcccctgaaattgaccactcacccggtttcacccgctatgctgcccgtttgggagttcgtgcccagctcatttgcagatctctggcctcgccgcagcccagtttcatctggcgtcgtcatggcaaggatctcaagatgcaacggcgcaacaaattcaaaagcgtggaacgccaggtggatgccctgaactttgagtcggctctgctaatcgaaaacacttcgcccgatgattatggtcagtacgagtgtgtggtgcgaaattcgctgggacaggcgagtaccaccctggagtttagcaaaccctctcgcccggatgctccgctgcagctgagggtgggcaatgtgagtgatacgggtgtggatctgaactggactcccggcttcgatggtggcatgcagacatatttccgtctgcggctcaaacagcacggcgaggataagtacaagtacgtggacgccaagcccggacatcagaatatatcccttgatggcctgaagccaggagcaacctactacttctccgtgatggccgccaatgaagcgggaggcagtaaattcatgcccgatatcaagttgaccctcagcaagggatcgcagccccattcggcggagtacaccgaaaaagacgaactgcccaatgtgatgatcattggaatcacctcagcagccatggttttgttggttctgaacgctgccctggtggcctggttcgtgatccgccggcagaacaaatctcagagcgaagcggagccgagcaacgatgatgtgtactccaaggatgacagtcagtctgtctacaaggtaagtgattcgctcgattaacccactaatcaaatctaaccaattatattccgaaatcctaaccagctgcccatcactgctttgcaggcggatgttcagaagaaagcagccgcctccacatatctcgtggagaacgtggacattatccagtcgacggcgtatccgccgaaatatcaggagagctccatgtgcaccccgccctatccgctctgcaatccggacttcacccggaccctgccgaatcccaagcggcacagtcagcggaacagtgccacgggcatgatcgagggcatgcagatgcgctccaaggacgatcatatgctgatctccaacggactgtacataccatcaccgtcgccggcctcctccctggtgatcaagggtagctacatatcctcaccatcgccagcgccgccagcagatggatcatactttaatatgagcgacaaatatatgtcctatccgccggtggtaagttgaaaacttgaaacaatttcctctagataccccaaccaacacttttttttgttgggataattataacgagatatttcgaaatttattctgtttcccataatgatccagatcaatctcgagattttcccactcctcaatcattaacagcttgttagaaacaacctgtatttatcgcatttctaacaatctctccacctgcccgcttctttcctctcatccacagacttactaagccgtgctgagcatcaatgacagccagaaactacccaacccagccaaatccagctagactgattgacatacatcattcataatcaccatcggaaacacgaaacacgaagaacttgactgtcatttcgttaggattggttgtcgttggccattgctgttgctgtttggttttattgaatgtttttatttttattttatgcttgtaattattactatatgacgttgattattacggagcgcaaatggagaaaccatgttgagtgtgttttgagaaaagacatttgcatgcggcgctcgaaggctgtgataagtacctgtgcccaaagctctggagacgttggcaccagcaccaccgcaactcgcagatggaaacacgcaggccaaacgtttgccacaagaccaattcgttcgcagacccctcaccacagaaaaaccgaaagatacacccattcaattgggtgtagaagaggggcacggaatatggaatattggtctggccacggggcaggtgcgcaacccgttctacagaaatgcctgccctccacccacttttagtccaccacaacacctgaatccgaacaacggcagaagcagcagcattttagtagacaccacaaaataaaaaaaaaaaaaaaaaaccaaaaaaatattaaaggatggggaatcgaacgaacaacagaacactctcaaaatattaattcgtagtaaggtctctcgatattaagtagtaggaattacgcattttagcatttagcataaatatatggcgagtctgtcgagtcgtgactcaatctcattagcagttgttcatgtttaagctataggacataccaatatttatcaacatacgtactaaaaggataaaaataaatgaatatacaatatacacacaccaggtcccaaaaaaaaagaaaagcgtttgactctcaacgaagaccgtaacgattcgaaatcagcaaaacgaaaatagcgacgactttaattatataaatatttttaagtgtgacttttgagctaaagctaaggatcgagacgtagagtatattcaaaatacatatttacagcattcagcgacattctttttatcatgcatgacaataattatatacatggtaaagaagttaatgcatgcacgcgtgagcgccaaaaattatgctaaagaattctataaatacaaattcaatgaaaatgttaattataaattagactccagctgcatttgcatttgaattagagaaagcgagtagcagcgagctaagtatgtgtgtaaaaagaagttcattaaataaagtaaagtatgtaatatctaaaacaattaatgcaaacagcgctaaatatacagaaaaaaaaacaacaaatttttgtatcttcaaaacaaaaaaacatatttgaataaaattacaaatttttcaaattaaaatgtggcattttcttggtaagaaagaagtgggaaataataattaacataattatagcttagatacatttcactttgaagtacataatccccaatgctatttaactcaaattcctcgtgcccccgcagaatctccccaaagattcacccgggagagaagaatgtccagtgtcatcaatcagtgcgctgacttcagtcatcagtcttcactcttttcgccc

SEQ ID NO: 41486 - DNA, 4305 bp, DROSOPHILA
ctacgaccatctgccacgtaatggccgcagttactgctccaactccggctgctcaggtggcagccccacctgtgcaaaagtttcacctgacgccccacgatctgcagatactcgagggcaccgacaccctcctgcgctgcgaggtatcgaaccgggcgggcaaagtccagtggaccaaggatggctttgcgctgggattctcggccgtaattcccggattcccacgctattctgtgctggtggatgccaaacagaatgcctacaatctgcagatcaagaacgccacgctggaggacgatgccgaataccaatgccaggtgggtcctgctgctggaaatcccgccattcgtgccaatgccaagttgagcatagtggctgctccgagtagcatcgttatcgagggctatgcccggaatgcccgagtggaggtggaggagcgccagaatcttacgctgcactgtatcgccgagaacgccaatccggcggcggagattgtctggttccagggcgaagttccagtctccacggcccccatcgtgacggtgaatcaaactgccccgaagcgattcacaactagctccactttgcacctgcagccgcgcgccgaagacgattacaaggagttctcctgcgaggcgcgtcacaaggctctgccccccgatgtaccgatgcgcgcccaggtgcagctctccgtactctatccgcccggcgctccgttctttgagggctacagccagggtgagaccctgcatcgcggccaggaagttcaaatcgcctgtcgaagccgcggcggcaatcccccggcccaattgacttggtaccgaaatggcgtggccatcagttccccacaacgcacctcgggccgtctgtcggagaacgtttacaagttcaccgccgccgccgaggacaatggggctaatttggtgtgcgaggccaaaaatctgctggcgacaactcctctgcgcgccgaactcaatttgactgtcctgtatgctcccaaggatgtttatctgagcggcgccaatcaggccaaggtcggcgattccgtgcaactaagctgcgtgacagcgccttcgaatccccaggcccgaattagctggtccataaatggcagaccgctggacaatagcacctataagacgaccagtagctccgacggtggctgggtcagtagttccaacatcagcttgactatagattcgcagagcaggactttcatcgccgtttgccacgccctcaacacggaactcactcagaatgtggtgggatcacacaccgtgaatgtgctttatcccccttcgccacccttgttgacgggctataatgatggtgatatccttatctcgggatcgattttgaaacttcagtgcagttctgctggcggaaatcctccaccgacattgcagtggtacaaaaacgataagatcattaatgctccctccaaactggtggacagtaaaatcacctctgagctctcacttttggtaaacgcctccgataacaatgccatctataagtgcaaggttcaaaatgcagctattgacataccactatttgccaccaaaactttgggagttcattttcctcccgaaacggttaagatcagtgtcgtgcccaagaatctagtgcctggcattcgagccaagctgatctgtgactccagctctagtaatccaccggcgaagataagctggtggaaagatggcattcccgtcgaaggtcttaacttggccaataggcccggtctctggggcggttcggtgtccacgcttgagatgtacgttaacataacccaggatctggatggcattgtctatacctgtcagagtcacaacgaggttctgcagcgcagtgttcacgaaacaattagcttggatatactttatccccccaaattcgagacgccacagagcaccaccttcgtgggcgttgagggagcgccgttccatgtggagctgctggccagcggaaaccccatggtaattacctatacctggaccaaggacggcctgcccattagcagcaatagtctgagcgggcagcgtttgatctccgacggacctcgtctcaatatcagtcgtctgagtcgcaatgatgcgggtgtctacatatgcgaggcgctcaatagccagggcaccgcgctgctggagattcaagtggccgtggaatatgcccccacaattacggcggttagcgagggtcgcagttttgtggccggcgaaccggcggtcttggcctgccacattcaggcccgcccgctagaggccgctcatgtgcgctggtcccgcgacggttatgatctggccacgcgcaccatatcgagttttgaaaatggaaccgccctgctgcagatcgccagtgtggagcgcagtgatattggcaactttacctgcattgtggacaaccaaagaggagctcccgccgcgcaaaacgtacttctggtggtgcaaactgcccctgaaattgaccactcacccggtttcacccgctatgctgcccgtttgggagttcgtgcccagctcatttgcagatctctggcctcgccgcagcccagtttcatctggcgtcgtcatggcaaggatctcaagatgcaacggcgcaacaaattcaaaagcgtggaacgccaggtggatgccctgaactttgagtcggctctgctaatcgaaaacacttcgcccgatgattatggtcagtacgagtgtgtggtgcgaaattcgctgggacaggcgagtaccaccctggagtttagcaaaccctctcgcccggatgctccgctgcagctgagggtgggcaatgtgagtgatacgggtgtggatctgaactggactcccggcttcgatggtggcatgcagacatatttccgtctgcggctcaaacagcacggcgaggataagtacaagtacgtggacgccaagcccggacatcagaatatatcccttgatggcctgaagccaggagcaacctactacttctccgtgatggccgccaatgaagcgggaggcagtaaattcatgcccgatatcaagttgaccctcagcaagggatcgcagccccattcggcggagtacaccgaaaaagacgaactgcccaatgtgatgatcattggaatcacctcagcagccatggttttgttggttctgaacgctgccctggtggcctggttcgtgatccgccggcagaacaaatctcagagcgaagcggagccgagcaacgatgatgtgtactccaaggatgacagtcagtctgtctacaagctgcccatcactgctttgcaggcggatgttcagaagaaagcagccgcctccacatatctcgtggagaacgtggacattatccagtcgacggcgtatccgccgaaatatcaggagagctccatgtgcaccccgccctatccgctctgcaatccggacttcacccggaccctgccgaatcccaagcggcacagtcagcggaacagtgccacgggcatgatcgagggcatgcagatgcgctccaaggacgatcatatgctgatctccaacggactgtacataccatcaccgtcgccggcctcctccctggtgatcaagggtagctacatatcctcaccatcgccagcgccgccagcagatggatcatactttaatatgagcgacaaatatatgtcctatccgccggtgacttactaagccgtgctgagcatcaatgacagccagaaactacccaacccagccaaatccagctagactgattgacatacatcattcataatcaccatcggaaacacgaaacacgaagaacttgactgtcatttcgttaggattggttgtcgttggccattgctgttgctgtttggttttattgaatgtttttatttttattttatgcttgtaattattactatatgacgttgattattacggagcgcaaatggagaaaccatgttgagtgtgttttgagaaaagacatttgcatgcggcgctcgaaggctgtgataagtacctgtgcccaaagctctggagacgttggcaccagcaccaccgcaactcgcagatggaaacacgcaggccaaacgtttgccacaagaccaattcgttcgcagacccctcaccacagaaaaaccgaaagatacacccattcaattgggtgtagaagaggggcacggaatatggaatattggtctggccacggggcaggtgcgcaacccgttctacagaaatgcctgccctccacccacttttagtccaccacaacacctgaatccgaacaacggcagaagcagcagcattttagtagacaccacaaaataaaaaaaaaaaaaaaaaa

SEQ ID NO: 41487 - protein, 1215 aa, DROSOPHILA
MAAVTAPTPAAQVAAPPVQKFHLTPHDLQILEGTDTLLRCEVSNRAGKVQWTKDGFALGFSAVIPGFPRYSVLVDAKQNAYNLQIKNATLEDDAEYQCQVGPAAGNPAIRANAKLSIVAAPSSIVIEGYARNARVEVEERQNLTLHCIAENANPAAEIVWFQGEVPVSTAPIVTVNQTAPKRFTTSSTLHLQPRAEDDYKEFSCEARHKALPPDVPMRAQVQLSVLYPPGAPFFEGYSQGETLHRGQEVQIACRSRGGNPPAQLTWYRNGVAISSPQRTSGRLSENVYKFTAAAEDNGANLVCEAKNLLATTPLRAELNLTVLYAPKDVYLSGANQAKVGDSVQLSCVTAPSNPQARISWSINGRPLDNSTYKTTSSSDGGWVSSSNISLTIDSQSRTFIAVCHALNTELTQNVVGSHTVNVLYPPSPPLLTGYNDGDILISGSILKLQCSSAGGNPPPTLQWYKNDKIINAPSKLVDSKITSELSLLVNASDNNAIYKCKVQNAAIDIPLFATKTLGVHFPPETVKISVVPKNLVPGIRAKLICDSSSSNPPAKISWWKDGIPVEGLNLANRPGLWGGSVSTLEMYVNITQDLDGIVYTCQSHNEVLQRSVHETISLDILYPPKFETPQSTTFVGVEGAPFHVELLASGNPMVITYTWTKDGLPISSNSLSGQRLISDGPRLNISRLSRNDAGVYICEALNSQGTALLEIQVAVEYAPTITAVSEGRSFVAGEPAVLACHIQARPLEAAHVRWSRDGYDLATRTISSFENGTALLQIASVERSDIGNFTCIVDNQRGAPAAQNVLLVVQTAPEIDHSPGFTRYAARLGVRAQLICRSLASPQPSFIWRRHGKDLKMQRRNKFKSVERQVDALNFESALLIENTSPDDYGQYECVVRNSLGQASTTLEFSKPSRPDAPLQLRVGNVSDTGVDLNWTPGFDGGMQTYFRLRLKQHGEDKYKYVDAKPGHQNISLDGLKPGATYYFSVMAANEAGGSKFMPDIKLTLSKGSQPHSAEYTEKDELPNVMIIGITSAAMVLLVLNAALVAWFVIRRQNKSQSEAEPSNDDVYSKDDSQSVYKLPITALQADVQKKAAASTYLVENVDIIQSTAYPPKYQESSMCTPPYPLCNPDFTRTLPNPKRHSQRNSATGMIEGMQMRSKDDHMLISNGLYIPSPSPASSLVIKGSYISSPSPAPPADGSYFNMSDKYMSYPPVTY

SEQ ID NO: 41488 - DNA, 4404 bp, DROSOPHILA
atgcctgaggcaataagcagcaacacgatgaacacgcaagtgtaatgggactccacataaaatatgtacatcgatttggctggagaaacatatgtgggcttgtttgtttgaatggaggtgtattgaatcgccaggcaccactacacgtgccacattatataatgcgactcccatgggagtgtcctacctttcgatggcttcatggtcgttcagattgggaactccagacttggcagtgccggttttcttgttgcgacggcgacctaggaagtgatgaaatgatgagtttctttcataattcagttggggcgcaatggggattcttacgctcacggactttcttcttgtactcgggatcgctgcggcgcttcttgtcgaagtagatgcagtatccaataaacagagttccagctactcccgctgcaatgccgattgcagttttgttcatttcaatcatattactacggaaatcctctgtattaacttggtcttattttacattccgcatgtgccatcgatttacataaaacaaaaatcgatatcgcctacaactactgttgtttcatgtttttcacttgtttcgcactaatttgaaacggcggactggaacactgttttcttttttaaattttgctaagggatatttatttaattttaagtaagagatttaaatgtatttttttttagtttattcagaaatactgtgggatcaagttataatacgctaagaaataatcgtaagctcacttcttgtattatatttatttaacttgcattattcgcttaaaatccctatcctccaaaactaatgtttttaattttctttttttattttttttacttttattttgtaattacttaaataaaaaattgttcgcatatatgcatatcttccgttgtgtgaaacagctgacgacttaattcagtttttttttttaattttaaatttaccactttttgaagatattttgttgataactccagagtagattttattatggcataatgcatgttgagaatttggtcaaggcctattgttcgttaaaatatttgttataattttgttttgaaaaataagatatgcttaatgtggaaaaagaaaatatatagaaaatgctaatactatgatatataatcttcatttcaataggagaccatggagccccgcagagcaaaatatggtttggtttttttttcaactttcgtttactttcactgcagaatatgtaattgacgcagaaccatgatgattccaaaagttaaattgataaaatccgaactgggagaatgtggttgtgcttaagaatatggataggtgtatatgcccgcatacataaaagcctctatgtttgtattctgtaaatatatacgttttctttattaactaagtattagtggccagcaacgagccctcctattgagcaattccttcacttaaccccggagcactcaaatcgacggtaaccatgcggagcttgtggctaaatacgttgaccaagcagagtaagctaatgaaaatccttaagctccagcgaatctggaactgattgggtatccttgtaggtctatataggctgagtaccaagaggtactccaccaacgttgagcccaaggagcctgtagtgaaaaccaaatcgatacctggccccaaatcgattgagcttaagaagcaactggattctgttcaggtgagtttcttcggccttatctgggttgtgagggttatattgtactttcgccacaagcacattaatatgtatatttattgcacttttcgttctcaaatcagaccatatgccatatgcccacttagagatagccccctagtgtcttacttttcaactattcattattaatcaaaacgaattgcatttttataggccaccggaacgatccaattcttcgctgactacgagaagtccattggaaactacatctacgacgtggatggcaacattctactagatgtctacacccagatttcctcagttccattgggttacaaccatccgaggctctacaaggtctttaacaatgagcaaaacctgaaaagtaagaagttatatcatatactacatacatatatgtagttgaagaaccctaagatattgttttatcttagccacataactcccatgttgaataatgtgactatatccttgactatttccagcattgattaaccgacctgcacttggtgtcttccctggcaaggaatggccggaaaaactgcactcagttctcttgaacatagctccgaaaggactcaataaaatcacaaccatgatgtgtggttcatgctcgaatgaaaatgcctacaagagcatcttcatatggtgagtactaaagtctttagttttagtcattcttcagcctttttaagtattaaagttaaaccctgttggaatgctgtaacgtgctgcaaatatttcgttttcaggtaccagaacaaacttcgtggtaatgcacctcttaccgagcaggagaagaactcctgcatgattaacattcccccaggagccccgaaactcagtattctctcattcaagggagccttccatgggcgaacattgggagccctgtccaccacacattcgaagtacatccataagttggacgttccatctttcgactggcccattgcctcgtttcccgagtatcgatatcccctggacgaaaacgtggcgcacaacaagaaggaggacgaaaagtgccttagcgaagtgcaggatctcattcagcagtacgccagcaagaatccggttgccggaatcgtcgttgaaccgattcagagcgaaggaggcgacaacgaggcatcgcccgagttctttcggagcctccaggctatttgcaagaagaatggcatcgcccttctgatcgatgaggtccaaaccggtggaggtagcactggaaaattctgggcccacgagcacttcgagttggagagtcctcccgatgtggtgaccttcagcaagaagctgcagttgggtggctacttccacaacgacgacttcattccgaatgagccgtacaggatcttcaacacctggatgggcgatccgggcaaggtcctcctgctcgaggaagtcgtgaaggtcatccaggaggagaagctcctggccaatgtcgacgtggccggcaaggttctgaagaacggtttgctgagcctggagaaggaattcccgcatatcttgaactccacccgcggtcgtggaaccttcttggcagtcaactgcaccaacaccaaggtgcgagatcaaattatcggcgcactcaagttgcacggcattcagaccggtggctgtggggaaatttccattagattccgcccagctttgatatttaaggaataccatgccaacatcgtcctcgatcgcttccgcaaggttcttcaaggtatttaagaagaaaaagatacgaaaaagatttaatgattgtgctctgaaaattgcaatgcgtgcaatataaaccatatgttatcgaaatgaataataaagtaaattaattttatccctctgttagccatggcgtatgtttatcgatttctgttcaaggttgggacaccatcaagcgtttagcttattttttcacatatgatagagcactcataataaatttatgatataaccaacaaaaaatatattagcttccttagagaaaaaaagataggctaatcttatcgaaatgcagagtattagatatatagaactggttataatgctgcaataaaattttattgttgagtgctttttctcctctttattggaacgtatgctccatgattcctctactctgctagttagctttgtataattaaatacaaaatatgtttaatggtctcacatggaagaccataatacttatatatataatacttactccatatggttttcaataaattgtgtgacagaaacgctttgtttatgatcattttattatgaaaattttaaaacctcaacatgggtgttttggaacggtcataatagatattgtttaatattataattaaatattataagaattgtttattattagaaagaaatatacataatggccatactgaaacaaaacaatttaattcgcaattactctatacacgtttaaatgattattgcttgcttttcaatagtaattaagttaatgagactgtggatcacactgtaataatcgtactattgatggatcacttttggctccttctatgaactcttccaagcttaatttcccatccttgtttcgatccatttgacgaaaaatcttgtcggttcgtttctcaggagtactctcgtcctctggcattttcatcaccgagccgaccattttatatattgcctaagcaaagaaaaatgtggtaattgattagacttatatttttgatttgatctgagggaagcagaaacgtac

SEQ ID NO: 41489 - DNA, 1742 bp, DROSOPHILA
gcataatgcatgttgagaatttggtcaaggcctattaatatgtaattgacgcagaaccatgatgattccaaaagttaaattgataaaatccgaactgggagaatgtggttgtgcttaagaatatggataggtgtatatgcccgcatacataaaagcctctatgtttgtattctgtaaatatatacgttttctttattaactaagtattagtggccagcaacgagccctcctattgagcaattccttcacttaaccccggagcactcaaatcgacggtaaccatgcggagcttgtggctaaatacgttgaccaagcagagtctatataggctgagtaccaagaggtactccaccaacgttgagcccaaggagcctgtagtgaaaaccaaatcgatacctggccccaaatcgattgagcttaagaagcaactggattctgttcaggccaccggaacgatccaattcttcgctgactacgagaagtccattggaaactacatctacgacgtggatggcaacattctactagatgtctacacccagatttcctcagttccattgggttacaaccatccgaggctctacaaggtctttaacaatgagcaaaacctgaaaacattgattaaccgacctgcacttggtgtcttccctggcaaggaatggccggaaaaactgcactcagttctcttgaacatagctccgaaaggactcaataaaatcacaaccatgatgtgtggttcatgctcgaatgaaaatgcctacaagagcatcttcatatggtaccagaacaaacttcgtggtaatgcacctcttaccgagcaggagaagaactcctgcatgattaacattcccccaggagccccgaaactcagtattctctcattcaagggagccttccatgggcgaacattgggagccctgtccaccacacattcgaagtacatccataagttggacgttccatctttcgactggcccattgcctcgtttcccgagtatcgatatcccctggacgaaaacgtggcgcacaacaagaaggaggacgaaaagtgccttagcgaagtgcaggatctcattcagcagtacgccagcaagaatccggttgccggaatcgtcgttgaaccgattcagagcgaaggaggcgacaacgaggcatcgcccgagttctttcggagcctccaggctatttgcaagaagaatggcatcgcccttctgatcgatgaggtccaaaccggtggaggtagcactggaaaattctgggcccacgagcacttcgagttggagagtcctcccgatgtggtgaccttcagcaagaagctgcagttgggtggctacttccacaacgacgacttcattccgaatgagccgtacaggatcttcaacacctggatgggcgatccgggcaaggtcctcctgctcgaggaagtcgtgaaggtcatccaggaggagaagctcctggccaatgtcgacgtggccggcaaggttctgaagaacggtttgctgagcctggagaaggaattcccgcatatcttgaactccacccgcggtcgtggaaccttcttggcagtcaactgcaccaacaccaaggtgcgagatcaaattatcggcgcactcaagttgcacggcattcagaccggtggctgtggggaaatttccattagattccgcccagctttgatatttaaggaataccatgccaacatcgtcctcgatcgcttccgcaaggttcttcaaggtatttaa

SEQ ID NO: 41490 - protein, 486 aa, DROSOPHILA
MRSLWLNTLTKQSLYRLSTKRYSTNVEPKEPVVKTKSIPGPKSIELKKQLDSVQATGTIQFFADYEKSIGNYIYDVDGNILLDVYTQISSVPLGYNHPRLYKVFNNEQNLKTLINRPALGVFPGKEWPEKLHSVLLNIAPKGLNKITTMMCGSCSNENAYKSIFIWYQNKLRGNAPLTEQEKNSCMINIPPGAPKLSILSFKGAFHGRTLGALSTTHSKYIHKLDVPSFDWPIASFPEYRYPLDENVAHNKKEDEKCLSEVQDLIQQYASKNPVAGIVVEPIQSEGGDNEASPEFFRSLQAICKKNGIALLIDEVQTGGGSTGKFWAHEHFELESPPDVVTFSKKLQLGGYFHNDDFIPNEPYRIFNTWMGDPGKVLLLEEVVKVIQEEKLLANVDVAGKVLKNGLLSLEKEFPHILNSTRGRGTFLAVNCTNTKVRDQIIGALKLHGIQTGGCGEISIRFRPALIFKEYHANIVLDRFRKVLQGI

SEQ ID NO: 41491 - DNA, 3629 bp, DROSOPHILA
tacatatgtacgcaggtgcgtatgtacatatgtacgcacatgcagtgtatatgcacgcaaaatgggctaaagtgtgtatgtagctcgattcacacgggattttcgccgcctcggcgggaggtgggtgcggttattacctgaacgaaaatgacacattgattttaggcacatttctgctacccgctaggctaaacaaaatcacttttcgcaaatgcaataaacttattcgaccaaaacacaatcaatacaacaaatttaggggtggcttaaatcgaggcgatatatatacgagcgccttatcgatgtgtgctgctggttttcgcttttgatgtatcgataagttagggcgattgttttcacgccgtttaaacaaaattgtttttaaattaatttcggggcttttaagaaaattataagcatgtatttaagcaagaataccaatacggttagagtattagttagatcgtagatataacctatataaataaatttatgaagtgttccactttcgtcgttcccgtgatagagtaacggttcctttttaaataattaaaattcttattggattcatgatgaaaccaaaaaaattttaaaataacaaatttaacaattacggtgcggatttcttatgtgaacatttatcaactaggattcataatctttaggcttattctggaaaaagttaacaagtgttgtaactatttaaaattaagtccgtataaatgagcaaattgttgaaatcgatcaaattgagcttaaaagatttatttgactacttaaatttgaatctgcttactaactttttcattgttccggaacttttgatgctgaaatgtgaaactatttagtacataggtgttaatagcgtttcggccaattaaatttagtatgtgagtacgcatgccaacctttgtatatagatgttgcttctcgatatatttagattaagttttctaagtgcatttgtttcgagcagcagttcgatcatttagtcttttttcctttatatcagtataaacactatagtaaaggtacggtccctaatttttcagtggacccaatgtcctagttttagctgctagaaaatcaatgtgaatcccttgaacgtctattaataagtctatgataaaaagtcctttggaaagataacagtgatatgagtggtttaagagatgaatctatacaattcaatcgatgaatgatgtaactcattatatgtagattataatgcattgaaccatttaaatcgtcctgaattcgaaaggtctaagaacgccagctatttgggcgtcctgaattccaaacatttccgatcaactgcgaaaaaggttgttttaagaacaaaattgaaatttaggttgtgttgcaatgttatgcaacgttaaaaggccaacgtttataaaaaataagaagacagtgaatttgttaaagtatcttattgtgatataataatatgatgatggcttacgttacctagagatcgaatattgaaagtgaatctgtctatgatagatatataataatattgaaaggattccgtttcagtaatatggcagacgaagaagatccatggggtttcgacgacggcggcgaggaggagaaggcggcatccacccaggcgggcactccggccccaccctcaaaagcaccgagtgtggcatccgatcacaaggctgatagcgtcgtggctggcactccggccaacgaggaggctgctccggaagaggtagaagaaatcaaagcaccgccgcctccgccagaagacgatggttacaggaaaccggtgcagctctaccgccactgggtcaggttggtcctccactgtactgtacagcactgtaccgtactgtatcttatgcaatctgcacttttcaggccgaagtttctgcaatacaaatacatgtacaactacagaaccaactattacgatgatgtaattgactatatcgacaaaaaacaaactggagtggcccgggaaataccaagaccacagacgtgggcggaacgtgtcctgcgcacacggaatatcaggtggagtagctaatccggtttgtgtaaatatagtagttgttaatatttgttatccacctcagtggcagtgacattgattcgtatgcaccggcaaagagggacaaacaactaattcaaacactggcggcctcgataagaacttataattaccacaccaaggcatatatcaaccaaaggtatgccagtgtcctttagtaagcgcacctaaatgtaccaatagaaccgtcggacgaacggatgagcactcgtagttatataaagggtaaccacccattgtcaaaagatccatacgtacatatgtgtatagtcagtcagtaagcgtttgcatatctgcgcatctcaaaactctgtatcctgaatctgccttatggagtggagacctttcaagaaaacgaatattgtatattttttcttacatgcgtaatttctgttaatatattgccatatgtacttattcatatatattaacacaacttacctctcaatacatggtatttttaaggttatttacttcatttttagcaaagtgagtaaataaaacaaacctatttatattgtaaagcttaaaataaaaactgtgcaataaataaaactaaataaacattgatgtttttcctattcaaatatgacggcaggtatgaggtattcaaaaactagtgcttaaagaaatccccatgggcatttaaaaactttaacttcatagtcaagcgcatgagaaatccattttttattataatttaaaacaagatgaacgaaacgttaaaacccactttggtggactgactggtgagtactgccctccatgaacgagtaaggaaaatcagagtagtccaaagtccccataaagtgtctatttgcataaatcacaagtgcaacccctctaataacacacaatagggtaaattaggctattgtgtgcgtttgaattagtacaagtacattttagagtgaactaatcgcaaactaaattaaattatattattaaatcacaaaagaactcaaaatagaaaaggatcacgatcatgaaaaatactttaaatatattctgttttttcaatattttgtgtacttatgttatacttactggctcaccctaatacatatatcttatatgggcgccacgatttttctttttatttaaatttcgacctcaaccagaagcacagcgcaatgataaaactgaaaccggccacttttcttattttactagtttttcttttcgaaaccgggtgcacggaaaattggttagtgtagtgcagatttatgagtacttttatttattggattttatttcagtctgagcaacgatattcatgcattaattttggccaggggaggcagcaaaggcatcaagctgaaaaacctggctgaaattggtggctcatcgcttttggcccgcacaattatgaccatcaaaaattcgacttgctttcgacatatttgggtttccacagatgacaaacgaattgccattgaggcacaaaagtgtgagcattaaatattattatagtgaatatatcttttaaactcttgagcactttagatggtgccataatacatcatcggcctgagaaattcgccagagacgacactccttc

SEQ ID NO: 41492 - DNA, 983 bp, DROSOPHILA
cctttatatcagtataaacactatagtaaagatggcagacgaagaagatccatggggtttcgacgacggcggcgaggaggagaaggcggcatccacccaggcgggcactccggccccaccctcaaaagcaccgagtgtggcatccgatcacaaggctgatagcgtcgtggctggcactccggccaacgaggaggctgctccggaagaggtagaagaaatcaaagcaccgccgcctccgccagaagacgatggttacaggaaaccggtgcagctctaccgccactgggtcaggccgaagtttctgcaatacaaatacatgtacaactacagaaccaactattacgatgatgtaattgactatatcgacaaaaaacaaactggagtggcccgggaaataccaagaccacagacgtgggcggaacgtgtcctgcgcacacggaatatcagtggcagtgacattgattcgtatgcaccggcaaagagggacaaacaactaattcaaacactggcggcctcgataagaacttataattaccacaccaaggcatatatcaaccaaaggtatgccagtgtcctttagtaagcgcacctaaatgtaccaatagaaccgtcggacgaacggatgagcactcgtagttatataaagggtaaccacccattgtcaaaagatccatacgtacatatgtgtatagtcagtcagtaagcgtttgcatatctgcgcatctcaaaactctgtatcctgaatctgccttatggagtggagacctttcaagaaaacgaatattgtatattttttcttacatgcgtaatttctgttaatatattgccatatgtacttattcatatatattaacacaacttacctctcaatacatggtatttttaaggttatttacttcatttttagcaaagtgagtaaataaaacaaacctatttatattgtaaagcttaaaataaaaactgtgcaataaataaaactaaat

SEQ ID NO: 41493 - protein, 182 aa, DROSOPHILA
MADEEDPWGFDDGGEEEKAASTQAGTPAPPSKAPSVASDHKADSVVAGTPANEEAAPEEVEEIKAPPPPPEDDGYRKPVQLYRHWVRPKFLQYKYMYNYRTNYYDDVIDYIDKKQTGVAREIPRPQTWAERVLRTRNISGSDIDSYAPAKRDKQLIQTLAASIRTYNYHTKAYINQRYASVL

SEQ ID NO: 41494 - DNA, 4772 bp, DROSOPHILA
aggaagactccaaaactgaggtcccacctgaggaagatgaccaagtgacagcatacattgagaaatcagtggcccaattggtaagttaagaaaggaaacatttttagttaaaatttatatacattttgatattattgtagggctccgaaaatgatcaccgtaccgcgctggtcgatgaaaagaagaaggagttggatgtcctgattgccgagaagtacaccactttgaacgacttaacccatgtcaccaattcccagaatcttgtggacgacatccactttctgcatacgaagaacgccaagatcctggagagcctcaatcaggcggtcaccgccaagagaaacgtctcccaggcctacgatgaccattgcaagaaggcgctcaaggtcaaggccgagatgcaggagcagacgaaatgcttcgatgagttcaccgtgatggtatgtaatctcctcaagaaaccagtaatcttgcaggtttgtaaaattctatccaaatattttctatttcagaactaccacgatctaaagaagaccatacttaacaccaagaaagaaacgcaagaaattcgcgctaagacggctttaaagaccgaggagctcaaaaagaagcgagaatttgttaacaccacccaaaagtcaatggctaatgatatccgtgttctaggccagatcgaacatgacctcatgtgagtaactattaggagttataaaaaaaccgtacaagaacatgtatcccaaatgtttgttttttccacagtgggataatcgaagacttaaaatccaaaatttctgcaatttaagtacaggaaaacaaataacacttgaacaatcgccaaaggtgcattggaaaatacggtcgtacctcatcttccaaaaaataatccttaatattgctgcgttttccaaataatttgacaaataaagtactttttattctgtaatgcttttttaattaaaccttcttcaaggagcgaatcacgatggctatcctgatggttctaatcatcttcgacgacgatcaaaatatccttaaagctgaatggcgtgaacggatatccgtttcccacatagaacttgctcatgaactccacccagtgcaagcgcaatgtgtgcaggaaggcggaaagaccctccatcatgaccatgatagcgatggtgaaaaactcccaaacggcaaagatgaaaaacagcccaatggcgcccacgtagccgttcatctgaagtcccatcgccagcaccatagtccacagcacctccgatagctctgaaataagatctgcatgaagtacaaattcaattactgacttagcagattcttacgggcatgagctaaggacaaggcccagagacgaagatatgaggccgtgtgtgagatggtactaaggatatactcgattgtgtggatggcctggtggatccagatttcgctcatcggctcgtcatcctcctcgctgtgtcctcccgactcatgcgcttcggctacctcagtgataatgatctccttgccagttgtcacctctatcttctctacgatctcgtccacttcctccactggtccagcaggctagaaggtatatagatatattattaggtaattgggcaattatgacagtcccaataatttaccctgtttcggcgttggtatttaatgtatagaggttttccaagcagaatccacggaatgcaaagaagggccaccaccaggaagatcatctccagattcttttgaatggggaacatattgacatcacagcctggcagggccgtctccgtcttgaaaagcaccatgtcgatgaacataatcaggactgagggcgcacatccaggagtgtcggcctccacgtctgttgttggactgtacttgacccacttgtagaacatcatgaagcacatgtagccgaacatgagaagcaggaagaggacctggggcacgaactgcaggatgatgtaggcgtatttcttaaagaatacaaaattctccaccgacatgcacacgccaaagaccatgtgcagcactccaaagatgatcgatagcttcatcttgtaggtgtttaggaaaatgatcttgttcgaggccgactgccaaatgggatcgatgcccattgggtaaacaccgcgtgtggctaccgaggggttcagctgcagcgtgggattggtcagcacagtggttcgattgtacacattgacccagcgagtgccaaaaacattaatcgacttggaaaagatgtcgttatagtggaatccagtgtacatagcgaacagacccatcagcatgataatgtaacgcccggcaaagaagatgttccagatctcgccacctcgcttcttggacagccgtttttcgtcgatcaccatccacagacccagaaggaagaggattgttccgtggcccatatctccgaacatcaccgcaaacaggaaggggaaagtgatgcaggtgtacagaccagggttcacctcccggtagccagcgattccataggcatcaatcaagttttggaaaccacgtgtaaacttattggtcctgaagtgggttggtggctccttcttggtgtccaatacgttgatgaacgaaggcacagtgctgcccacactggctgatcctgcagccagagcgacctcgaccagctccagctccctcttgggcacccaaccttcgccaatcaggcacttgctgcccagatccacgttgaaaaggttcagcgtgtggtagatgcccttcattttcttgaccatggcgctccaggtgggcagctgtttcaaggcagcctgcaggacgcaggtcctgtggtcactcgtctggttaatgataacctggaggtcctccaatcgggtcctcacattcttgaccatctcctggcgctcggagtgtgagctgggacagggatacatgtgggcatggaaaccagtgcacaccttgcggattctggcctgcaactggtcgccctggaagaagaccacgaagacgctcttgtgcagcacattgcccgtcttgggatccgttagggccacatcaacatcgcatcggcgaacaaagacattgccccgggaaatacgccacagcattcgctcgaaggcgtactccctctccctgctgatcacgccagccacaaatcccagatggccattggacttctctggatcgcggtgggtgcccatcttattcagatcgaagttgtgcgactcctggtccgaaaagaattgatcggtacgctccagcacttggatcatctcgctcagctccaagtagctggtctggaggttcacattgttggcagccagctccaagatctctgtctctgttttctccagatgcaactccaagtcaataatctcacgtggctgaggagccggtgggaagtcatccattagatcgagcaccttgtgaccctccttgttcaactcagcggttacgtagcggatccggcgctccagttcatcgcagcgtctcacctcgccaataaattttcgctgctgagcgtttattttcgcattcaactgtttgaaagatggtaaaagatttcagaatcataccgaggtcctcttttcaatttgaaaacgcatagctatcaaatttatattatccttgatggaaactttttattggcagcacttacatcacggaactgaacacatcccacctcgcccaaggcggcaatcgtatcgtaggctgcctccggctgcagatacatttgcaccaaggacatcacctcgctgcggaagatgctgttgctctcctgattggagccgcagctccaccacttggacatgatagctgatcctgttgatccttgctccttgggttaaaacaattccggagtgggctcctcactttcggagcacagctgacgaactgatcggtctggtcacttgacttggacgaggaaggttccgtgacaattgctggcccacgagcaactttaccggcttatcagtgcaggcgagttgcctcccctggataaatatttggggaacttggtgcccaatcgagccatccatcaatgtgatggaatggccgttacctcaattgcgattcccctcaccatgactcttccttatcggtagttactttgcctttggctgtaaagttcaactatttggacttaaaaacccattgtcagtcgcttacgaattaattaccttctcaatacatttacaaatatctgtatacacatcggaacttatgtaaataatacaagctataacaacaatatggtctatctgtatctgggcgtgctgtccacatttgtgaacatcccaaaagaatgctacaaaaaaattaaatttattaatgtgcaatctgtattgtgagaacatgtagggtagataagctgtggggtttgagttttcaatgaattccaacaagtcttcgttctcttctttgctgtatatttattacaattagtatttgtataattagttatttataacaatgaatatcaaattattgctttcgaaagggtttttgagaatactaggcacaactcaaaagaggaatactttgactacaaatggaatacacaacggaggatacaaaaatgtgggaagagcaccacaatactgacaatatccaaaaaattaaacaaaacaaaaacatttaacaaacaatcaaaatagttcgggctgggggtataattgtatacacgtttccctagtttgagcacatttggatgggtttactcctcctcttcgccatcgagaatggccttgaagctgaacggctggaaggcgtagcccattccctcgtagaacttgctcatgaactccacc

SEQ ID NO: 41495 - DNA, 2535 bp, DROSOPHILA
atgtccaagtggtggagctgcggctccaatcaggagagcaacagcatcttccgcagcgaggtgatgtccttggtgcaaatgtatctgcagccggaggcagcctacgatacgattgccgccttgggcgaggtgggatgtgttcagttccgtgatttgaatgcgaaaataaacgctcagcagcgaaaatttattggcgaggtgagacgctgcgatgaactggagcgccggatccgctacgtaaccgctgagttgaacaaggagggtcacaaggtgctcgatctaatggatgacttcccaccggctcctcagccacgtgagattattgacttggagttgcatctggagaaaacagagacagagatcttggagctggctgccaacaatgtgaacctccagaccagctacttggagctgagcgagatgatccaagtgctggagcgtaccgatcaattcttttcggaccaggagtcgcacaacttcgatctgaataagatgggcacccaccgcgatccagagaagtccaatggccatctgggatttgtggctggcgtgatcagcagggagagggagtacgccttcgagcgaatgctgtggcgtatttcccggggcaatgtctttgttcgccgatgcgatgttgatgtggccctaacggatcccaagacgggcaatgtgctgcacaagagcgtcttcgtggtcttcttccagggcgaccagttgcaggccagaatccgcaaggtgtgcactggtttccatgcccacatgtatccctgtcccagctcacactccgagcgccaggagatggtcaagaatgtgaggacccgattggaggacctccaggttatcattaaccagacgagtgaccacaggacctgcgtcctgcaggctgccttgaaacagctgcccacctggagcgccatggtcaagaaaatgaagggcatctaccacacgctgaaccttttcaacgtggatctgggcagcaagtgcctgattggcgaaggttgggtgcccaagagggagctggagctggtcgaggtcgctctggctgcaggatcagccagtgtgggcagcactgtgccttcgttcatcaacgtattggacaccaagaaggagccaccaacccacttcaggaccaataagtttacacgtggtttccaaaacttgattgatgcctatggaatcgctggctaccgggaggtgaaccctggtctgtacacctgcatcactttccccttcctgtttgcggtgatgttcggagatatgggccacggaacaatcctcttccttctgggtctgtggatggtgatcgacgaaaaacggctgtccaagaagcgaggtggcgagatctggaacatcttctttgccgggcgttacattatcatgctgatgggtctgttcgctatgtacactggattccactataacgacatcttttccaagtcgattaatgtttttggcactcgctgggtcaatgtgtacaatcgaaccactgtgctgaccaatcccacgctgcagctgaacccctcggtagccacacgcggtgtttacccaatgggcatcgatcccatttggcagtcggcctcgaacaagatcattttcctaaacacctacaagatgaagctatcgatcatctttggagtgctgcacatggtctttggcgtgtgcatgtcggtggagaattttgtattctttaagaaatacgcctacatcatcctgcagttcgtgccccaggtcctcttcctgcttctcatgttcggctacatgtgcttcatgatgttctacaagtgggtcaagtacagtccaacaacagacgtggaggccgacactcctggatgtgcgccctcagtcctgattatgttcatcgacatggtgcttttcaagacggagacggccctgccaggctgtgatgtcaatatgttccccattcaaaagaatctggagatgatcttcctggtggtggcccttctttgcattccgtggattctgcttggaaaacctctatacattaaataccaacgccgaaacaggcctgctggaccagtggaggaagtggacgagatcgtagagaagatagaggtgacaactggcaaggagatcattatcactgaggtagccgaagcgcatgagtcgggaggacacagcgaggaggatgacgagccgatgagcgaaatctggatccaccaggccatccacacaatcgagtatatccttagtaccatctcacacacggcctcatatcttcgtctctgggccttgtccttagctcatgcccagctatcggaggtgctgtggactatggtgctggcgatgggacttcagatgaacggctacgtgggcgccattgggctgtttttcatctttgccgtttgggagtttttcaccatcgctatcatggtcatgatggagggtctttccgccttcctgcacacattgcgcttgcactgggtggagttcatgagcaagttctatgtgggaaacggatatccgttcacgccattcagctttaaggatattttgatcgtcgtcgaagatgattag

SEQ ID NO: 41496 - protein, 844 aa, DROSOPHILA
MSKWWSCGSNQESNSIFRSEVMSLVQMYLQPEAAYDTIAALGEVGCVQFRDLNAKINAQQRKFIGEVRRCDELERRIRYVTAELNKEGHKVLDLMDDFPPAPQPREIIDLELHLEKTETEILELAANNVNLQTSYLELSEMIQVLERTDQFFSDQESHNFDLNKMGTHRDPEKSNGHLGFVAGVISREREYAFERMLWRISRGNVFVRRCDVDVALTDPKTGNVLHKSVFVVFFQGDQLQARIRKVCTGFHAHMYPCPSSHSERQEMVKNVRTRLEDLQVIINQTSDHRTCVLQAALKQLPTWSAMVKKMKGIYHTLNLFNVDLGSKCLIGEGWVPKRELELVEVALAAGSASVGSTVPSFINVLDTKKEPPTHFRTNKFTRGFQNLIDAYGIAGYREVNPGLYTCITFPFLFAVMFGDMGHGTILFLLGLWMVIDEKRLSKKRGGEIWNIFFAGRYIIMLMGLFAMYTGFHYNDIFSKSINVFGTRWVNVYNRTTVLTNPTLQLNPSVATRGVYPMGIDPIWQSASNKIIFLNTYKMKLSIIFGVLHMVFGVCMSVENFVFFKKYAYIILQFVPQVLFLLLMFGYMCFMMFYKWVKYSPTTDVEADTPGCAPSVLIMFIDMVLFKTETALPGCDVNMFPIQKNLEMIFLVVALLCIPWILLGKPLYIKYQRRNRPAGPVEEVDEIVEKIEVTTGKEIIITEVAEAHESGGHSEEDDEPMSEIWIHQAIHTIEYILSTISHTASYLRLWALSLAHAQLSEVLWTMVLAMGLQMNGYVGAIGLFFIFAVWEFFTIAIMVMMEGLSAFLHTLRLHWVEFMSKFYVGNGYPFTPFSFKDILIVVEDD

SEQ ID NO: 41497 - DNA, 10838 bp, DROSOPHILA
ttagatcgagcaccttgtgaccctccttgttcaactcagcggttacgtagcggatccggcgctccagttcatcgcagcgtctcacctcgccaataaattttcgctgctgagcgtttattttcgcattcaactgtttgaaagatggtaaaagatttcagaatcataccgaggtcctcttttcaatttgaaaacgcatagctatcaaatttatattatccttgatggaaactttttattggcagcacttacatcacggaactgaacacatcccacctcgcccaaggcggcaatcgtatcgtaggctgcctccggctgcagatacatttgcaccaaggacatcacctcgctgcggaagatgctgttgctctcctgattggagccgcagctccaccacttggacatgatagctgatcctgttgatccttgctccttgggttaaaacaattccggagtgggctcctcactttcggagcacagctgacgaactgatcggtctggtcacttgacttggacgaggaaggttccgtgacaattgctggcccacgagcaactttaccggcttatcagtgcaggcgagttgcctcccctggataaatatttggggaacttggtgcccaatcgagccatccatcaatgtgatggaatggccgttacctcaattgcgattcccctcaccatgactcttccttatcggtagttactttgcctttggctgtaaagttcaactatttggacttaaaaacccattgtcagtcgcttacgaattaattaccttctcaatacatttacaaatatctgtatacacatcggaacttatgtaaataatacaagctataacaacaatatggtctatctgtatctgggcgtgctgtccacatttgtgaacatcccaaaagaatgctacaaaaaaattaaatttattaatgtgcaatctgtattgtgagaacatgtagggtagataagctgtggggtttgagttttcaatgaattccaacaagtcttcgttctcttctttgctgtatatttattacaattagtatttgtataattagttatttataacaatgaatatcaaattattgctttcgaaagggtttttgagaatactaggcacaactcaaaagaggaatactttgactacaaatggaatacacaacggaggatacaaaaatgtgggaagagcaccacaatactgacaatatccaaaaaattaaacaaaacaaaaacatttaacaaacaatcaaaatagttcgggctgggggtataattgtatacacgtttccctagtttgagcacatttggatgggtttactcctcctcttcgccatcgagaatggccttgaagctgaacggctggaaggcgtagcccattccctcgtagaacttgctcatgaactccacccagtgcagacgcagagtgtgcaggaaggcggacagaccctccatgaggaccaggatagccagggtgaacaagcaccaggcgccgaagatgatgaacagaccaatggcaccgcccacgccggacatcttaaggcccagggacaacaccatttgccacagcacctcggagagctctgcaatttgtgagttattagttagttaatcacaaagaatagaatagaatagaatagaatagaatacttacgggcgtgagccagggacagagcccagagacgcagataggacgccgtgtgcgagatggtactgagcacatattcgatggtgtggatggcttgatggatgtagatttcgctcatgggctcatcgtcatggccatgggcacccccggcattctcctcgtttccagagaatcctgtgggcagaggagtctcgccttcggccagttcaatgttgccggtcaactgaccattgtgattggcctgcgagagaaaattggaaattaatactggaccaacttcaaataattaaatgataaacccacatgagccttgtttttgcgagtgaacttgatgtacaggggcttgcccagaagcatccaaggaatgcagcacagggcgatgagcacaaaggccttctgcaactggggctgtgactcgaacatgaactcgttgcaaccctttggtggctcagtgttcttgaacagcatcatgttgatgaacatgatcaacacggagggagcgcatccaggagtttctggctggaagctagtcctagcgttatagctgaaccacttgaagaacctgcacaaaaaagcactcgttagataaggaaaggagtgagctatttacaagtaaactcacatcatgaacaccatgtagccgaagagcagtagcaggaacagaatttggggcacgaactccaggaaaatggaggcataacgcttgaagtgggtgaagttaacgaccgacatgcacacgccgaagaccatgtgcagcactccgaagatgatcgagagcttcatcttgaaactgttgaggaagatgatcttgttatcagccaactgccacacgggatccattccgaagggatagacacccacggcggagctgttgggcggcaactgcagattcgggttggtcaggacagtcgttgtgttgtagttgttgaaccaacgtgatccaaacaggttcatcgacttggagaagacatcgttgtaaaccaaaccagtgtacatggcaaacagacccatcagcagaatgatatagcgaccgccgaagaagatgttccagatctcaccaccgttgcggatgcgagccagcttgcgctcgcacaaaaccatccaagctccaaacaaaaccagaataaggccgtgacccaaatcgccgaacatcacagcgaaaaggaaggggaaggtgatgcaggtgtacagggcgggattgcactctctgtacgaggccactccgtaggcatcaatcagattctggaagccacgggtaaacttgttagtcctgttaaaggtcggcggctgctcgttggtgtcgatcacgttcaggaacgagggtatggtgctgcccactgcagcagatccatcggacagagccttttggacaacgggcaaatcattggtgggcacccaacactcgccaatcaggcacttcttggtcacgtccatgttgaacagattcagcgtgtggtaaatggccttcatcttcttgaccatgatcgaccacgagggcagattcttggacacggtggccaggacgcggctacgatgatcctccgtctggctaaggaccagcttcagatcctccaggcgggtgcgcacattgcgaaccatttcctcgcgctcgttgtgcgagctgggacagggatacagcgaggcgtggaagccagtgcacaccttcttgatacggttcttcagttgctcgccctggaagaaggccacgaagacggtcttgtagatgggatgtccggtggccggatcgttcagcggctcgtccagatcggagcgcttgaggaagacattgcccctggagatgcgccacagcatacgctcaaaggcaaacactcgctcccggttaattacaccggcaacgaatccaagccggccacggtgttgagcagcagcatcgttgtctcctccagctcggttggaggagtccagattgagaacctcctggtcggagaagaagccctgcgtgttctccagcaccttgcgcagctcggtcagctccagatagttggacttcatgttcacctcgttctgggccagctcgatcatctccgactcggtcttctccagatgcgcctccagatcgatgatctcgcgtggattgggcgcacgcggaatgtcatcctggatgtcgggcaggacgatgccgtccttcttgatctccgtctcgatgtagcggatcttgcgctccagctcatcgcagcgacgcacctcggtgacgaacttgcgctggaaggcgttcacgttcacattcaactgttggtcaagatagatatattatctgattagtcgcggtatctcgcaaagacaatccgtacttacgtcgcggaactgcacgcagccggtttcgcccagctcagatacggaggtatacgcggcctccggctgaatgaacatctggcagagtgccatctcctcactacggaacatgtcccccatcttggcgactgcttacgttccctgtgggcgaaaggaggattttgggggtggaggtaagtttcggcattccgcagacgtgcaattaaaacagggaaaagctgcttcagccaacgacaacgttttgttttcgccctcagtgaatgttttgtctgggccacaatgtcgtatacgataaacaagtcgcagcactgagggaaatagtctcagaaagtgggacttttgctatgaaattatatgtttcaaacgaaattcagatctatctatctgttatttgttgaaaaataattgtaatataaaatgaaattatgtatcttttttactaattcttttttattaatttgattttctatagtttctcaaaaaatattcataaattttttttcagtgctacttcgcccgctattcaacccgacatatttatgtatatacgaattttgccggcttgctctgcaaatcattttatttatttgtctttcatttgttttcctctgctgcggaaaggcaatcactctattttcagctccatatggcgctcggacctggccgaaactcaacacatgttttggctttcagtgcgactagaggagagtcaattatttgaggatccaaatatgtatcggttgctcaattacaacaccttgtcacgttctaggcccctgagtttaactgctaaatcacgtaacttcaaacggatcgttaagtgcaaatgaatttcaaactcgtggcgactcttcaaggtcttttccaatcaaattgaagattgcatgaaatgctaaacaagggaaaagtaccgaaaagaatgagaaaacattttggtatacaaaaggagttaaacattttaagaaagcagcaggaagtgattcaatggttatcgcactttcaaaacgatatacggagtgggatccagaaagaaatcatcatattatgatggtatatagtaattaacgatctttgatatgaacaatcgttaagatattctatttttatggtctcattcattgctcacatatgtacatatgtctaggcgcaccaatttgggatagtaccagtttatcttgactcatttcttactgcgaggcgcatgttgtcccatgtccccaaaatgtcattccctggagttggtaatctagaagggtgagcactttgcaaggcctttttcatcgcaatcttaacttatttgcttgagttatctccatacccgctgcaaaagtgtttacggccgaataaaacagttcttatcgcccatgtcgaccgtaaatgcattatttctacactttccttctcaactcgaaaaatctggcaacataagcgcatatatgtatctgcagatgagctaatataaattatggttcagcaaattaactgataattgtaacattatcaagagcggacttctaccaaaaatcggtggatccagataatgccagttattactgtttttgatttaattgagcgggtggactggtacatctgtggttgggcgacatatggtgaccgcgggggagtggtggggcaggtcctgggaaggggcattggtccgtagtcaccagtcaccagtcaccattccggtgtctgcactcgagagcattccgccatttcgctgtgtacacacagaccacaaacaccaaggtttgttgtgacatcatcgggccaaacagtcaacgacacggcgacgtcagcctcgcacattatcgaactttaatgtctcccccggatccccgagatccctggatcccgtccaagtggccagtccctcaattcgcgacagcaggaaaattagcttttgctttttgcgggacacataaaacgaatgatgtgttattttatatgtgaacacatttatgcagaggtggcaggcattaagaacaaaacattgggcatttgttatcgaggaaagatatagttgaaaaatctctatagctcttaggctaatttttaatatagcagtttaatgtatttacattttttacttgttttttaaagaatctatcagtaaaaatggaatcgcatcattggtacattcccaagaatttccggaagattttgctgagattttacaagcgttgaattaccactttgtaagttttggcatcccacgttaatatgaatagtaaactcttgcgattgcacaaatacatcataatgttgaagaattgtaaagccccatatgtcatactatagaataaaacccttgggtggccgccaagacaattggacaggagccagtatggggacgtcattgatatccatcgacaaacccaacccatagctattggaggttcatcaatcatgtgaccaactaaagtcggatgggtggaaaagggggcttgaaacccgaattcctcgaggtttcagcgcgcaacttcgctggggattggaattgcatatgactccccaatccgatccgcgtctactctgaatacatatgcatatgctcctctatcgcctgttgcttcccatatctttcgaccagtttcagcgtttttgcttacattttatcagctcagtcagcatttatgtaggttgacactttgttgttctgctctgtcgttttataaccaagaatcgttggctgtcggcagtttgctaaaaatagcagagtcatgaaattcgcagcctaattgctcctattattaattaggaatatggcaagttctcagctcgttaaggctcattttagaatgtttgtcgggcaattgttttcaacatctttatggcattattaaattactattggcgtgcgccgaaacagcaggtgggggaaatccttatagagcgggtctctccaatttaaagcggctacttgttaaatttataatgcaatttggcggtgttaactattaacgaggttaagtggcgcaatttgaaaccacatttgaaggatttcccatggtttaatggtgtgcatttttaagcaccctagtgcacggcatttctagtacttggcttaataataaatgtaagaacaaacttatagaccaattaggttctagcaatttatcaaaacgttacgacgtgttgtattctttctaaggcgtagaaaatagcgaatgggaaagcttcttatttataattcattgtttgaggtaatttactattgaaggtttatcacttaaaagcggaaacagatatggctcagactttaacctaggcattatatgtagatatgaaacctatttacaagttttatatttctctctgaactcaaaatagaattaatatatagtattaaagatatactgctgtgcaatatataggaacaaaactaagcttccaattataataaatgcaataaattagtataaattcacatgaaacccttacctccgccgacgagaattacctccaaaactcgattggctttaaaaaaaaaaccggtaatagaattgtaactcgcctgctcaaatgttgtttaatgattcaacgagcgcactttcgtttataatgaattcaaccaaaagtccagtttccaattgcgatagcccaatatcgcaatatcacagttcacacgcacagctcgaacactaaaaaaacactgagccagctgagaggcaactgctaactgctaactgtaaaccagttcgacttcaaaacaacaactaagtgccgttcgctctcttcgccttctcttttctctcccgctttcttctctccacctcttcactgctttgctggtcaatctagccttgtgtgcgtgagtgtgggtgcgcctatcacgatgtacaggtaaacttttattattactaaatgtccagaagtctttaattaaaataattacttattgcgacaataagtaagaaggtgaaatgtaagacttcccaaattgcaataagaacaatagctgtgagagcaataataatcttcagcttttatcactgagcggagcgacataagcaagctgcactgtacttcagatgcaatgttgttgtttcagttgttgtagctgctccttggctttcacacgcgagttgtgggtgagccttaatcacatttattcgatggtgagtggagaaggaggtgctgagtgggcgagggagcggcgccgagagagcgaacgagcggttgacattgacaaccccccttttttgctgttgggagcgggcgcacgcccatgtgtgagtaggctaatatcgctacacttcgaagtttcgttgaatttgcgctctgttttgtttgcttctctctttatcgctctgcgctttggctctcccgttcgctatttgttgttaattcgaatacgaatataacttctagtttttatggtgcctttgcgctcggttttatgacaaaaccattttttttccactgcgggtaattaagaactcgctggcacgaataaccgaaccaattcaatgtgaatccacagtggaggcgatcgaggaacaaaaacagtccgcaccatcatttattaacgccaattgtcagttcaattcattttcttcaactgcttctgtgcgaagaaaccgtttcattgcgtcacaaagatgattatgctcatatattatcgaactaatggggggaattcaaaattatatagagctgtaaaacaggagccagctaataaatcggctagtatcaactccttataaatagcctctttacgcaatactattgaatacagaaaaataagccatcaaagtcagcattatttgcagtgtttgccgaccacttccccgataagccatacatatagagttacgtaactggagatcggcgactcgagtggccgggctttggctttatatagctaattaactggacgatcgaccaggagcacttgtgtgcaactcggcaaaatactatacttcagatgtgaaattgctagatttctagaatcgatcagattttccccattcataaactgggtctgcgactgtggctaatcagcgcaatactgattgatcgattggaagtgccattggacaatttatagagcgatccataaatcataatcgactggtatttattgtgcgctattcgcaactactcgagcccagcttttagggtttccgttccagctggagatctttgtggggacgcaaggcttctggaaaccgagaccccgagaaaaagatcacatgatagaacccccccatatgattatgatgattgcataaaactcgaaaactcgcgactttgcaaagagagcgcgactcacagatactctggagagtattatattcacatgacaagggttcgactaacacacacacacactgcgaacgtagtaggtgcgtacctgagtatctcagagatactcggggcttacgaaagagatagcgctacgcgtatctgccgctctgactttagctgcgacttctggcaggtgtttgcacaatgggtcccatgacaggtgtgccccgcagcccccagtaagctcacttttccgaccagtagctgtcagcagccagcatcacgtgccaaagtgcattcaaattgggcttaattgcacatactccctgctgccaaagcacgtgctttggatggctagtttacaggggatatgggatatatacgggtggataacccgtggcacagcttttacacctcgaacccgccgggtttttccagttgcttcgagttttttcgagtttttcgcttaccttcacagctccgaaaacgctttttatgtcaaagacacaccagattcgattccccgcgagtgcgagcgataaatttagaacttgtttgttgccgagcgagagtatctttattcgaatctgaatctgaatggagcgcagcacacgtctgctcaccgccagcgatcgactgcgtttaaatttggcactcgctgccgcgacttcggttcgaaaatctcgcgatcgcctcgaaatgcctcgcactctctgttactcagcacacacaccctgtgaattcaggcggctctctcggcgcgggcatgccaactatgtatgatcggtgaccgttatcgcaaatcagaaatcgacaaatacccgtactaaagtcaaaatcctcgagtgctacatgtgtctaccaaaaaaatggtcagtttccaaaaacctaatcactcttaggatcacccaattaatcaccattaatatgtgatatttttgcagtaactagatgtgcttgttgatagtgaggaagccaatctcaaaaaaaaaccaattgaactaacacttcttacaatttaaacttttaattagaatttagaatataaaataatattaagctaatttggtaacagtttcattttaaatttcaactgttttaagtgctgtaaagtgcataaagtgttaacaggtggctccacgcacaacgcgttagtaccttaccaaatagcgttttcactgcaccgctcaccacggccacactctgcctttgttttgttttgatattcccactgcatcgcatttaatttattaaaagctgttaccaaattatgtcctacgccggctatagccagctgcccagcggcagcgaccaggagcgcaggcaggcgcagctcgcggccagcacctacgacgtgctacagcggacgacggacagtatccagcgatccaaccagattgccatcgaaacggagaacatgggggcggaggtaattacccagatagtagccattaacagggctaactaatgctcgcttacgcatcaacaggtactcggcgaactgggcgagcagagggagtcgctgctacgcaccacgcgccgcctggaggacgccgatcaggatctgtccaaatcgagggtcatcattcggaagttgagcagggaggtgctctacaacaagatcatcctaatc

SEQ ID NO: 41498 - DNA, 2997 bp, DROSOPHILA
atcgctggcggtgagcagacgtgtgctgcgctccattcagattcagattcgaataaagatactctcgctcggcaacaaacaagttctaaatttatcgctcgcactcgcggggaatcgaatctggtgtgtctttgacataaaaagcgttttcggagctgtgaagggaacgtaagcagtcgccaagatgggggacatgttccgtagtgaggagatggcactctgccagatgttcattcagccggaggccgcgtatacctccgtatctgagctgggcgaaaccggctgcgtgcagttccgcgacttgaatgtgaacgtgaacgccttccagcgcaagttcgtcaccgaggtgcgtcgctgcgatgagctggagcgcaagatccgctacatcgagacggagatcaagaaggacggcatcgtcctgcccgacatccaggatgacattccgcgtgcgcccaatccacgcgagatcatcgatctggaggcgcatctggagaagaccgagtcggagatgatcgagctggcccagaacgaggtgaacatgaagtccaactatctggagctgaccgagctgcgcaaggtgctggagaacacgcagggcttcttctccgaccaggaggttctcaatctggactcctccaaccgagctggaggagacaacgatgctgctgctcaacaccgtggccggcttggattcgttgccggtgtaattaaccgggagcgagtgtttgcctttgagcgtatgctgtggcgcatctccaggggcaatgtcttcctcaagcgctccgatctggacgagccgctgaacgatccggccaccggacatcccatctacaagaccgtcttcgtggccttcttccagggcgagcaactgaagaaccgtatcaagaaggtgtgcactggcttccacgcctcgctgtatccctgtcccagctcgcacaacgagcgcgaggaaatggttcgcaatgtgcgcacccgcctggaggatctgaagctggtccttagccagacggaggatcatcgtagccgcgtcctggccaccgtgtccaagaatctgccctcgtggtcgatcatggtcaagaagatgaaggccatttaccacacgctgaatctgttcaacatggacgtgaccaagaagtgcctgattggcgagtgttgggtgcccaccaatgatttgcccgttgtccaaaaggctctgtccgatggatctgctgcagtgggcagcaccataccctcgttcctgaacgtgatcgacaccaacgagcagccgccgacctttaacaggactaacaagtttacccgtggcttccagaatctgattgatgcctacggagtggcctcgtacagagagtgcaatcccgccctgtacacctgcatcaccttccccttccttttcgctgtgatgttcggcgatttgggtcacggccttattctggttttgtttggagcttggatggttttgtgcgagcgcaagctggctcgcatccgcaacggtggtgagatctggaacatcttcttcggcggtcgctatatcattctgctgatgggtctgtttgccatgtacactggtttggtttacaacgatgtcttctccaagtcgatgaacctgtttggatcacgttggttcaacaactacaacacaacgactgtcctgaccaacccgaatctgcagttgccgcccaacagctccgccgtgggtgtctatcccttcggaatggatcccgtgtggcagttggctgataacaagatcatcttcctcaacagtttcaagatgaagctctcgatcatcttcggagtgctgcacatggtcttcggcgtgtgcatgtcggtcgttaacttcacccacttcaagcgttatgcctccattttcctggagttcgtgccccaaattctgttcctgctactgctcttcggctacatggtgttcatgatgttcttcaagtggttcagctataacgctaggactagcttccagccagaaactcctggatgcgctccctccgtgttgatcatgttcatcaacatgatgctgttcaagaacactgagccaccaaagggttgcaacgagttcatgttcgagtcacagccccagttgcagaaggcctttgtgctcatcgccctgtgctgcattccttggatgcttctgggcaagcccctgtacatcaagttcactcgcaaaaacaaggctcatgccaatcacaatggtcagttgaccggcaacattgaactggccgaaggcgagactcctctgcccacaggattctctggaaacgaggagaatgccgggggtgcccatggccatgacgatgagcccatgagcgaaatctacatccatcaagccatccacaccatcgaatatgtgctcagtaccatctcgcacacggcgtcctatctgcgtctctgggctctgtccctggctcacgcccagctctccgaggtgctgtggcaaatggtgttgtccctgggccttaagatgtccggcgtgggcggtgccattggtctgttcatcatcttcggcgcctggtgcttgttcaccctggctatcctggtcctcatggagggtctgtccgccttcctgcacactctgcgtctgcactgggtggagttcatgagcaagttctacgagggaatgggctacgccttccagccgttcagcttcaaggccattctcgatggcgaagaggaggagtaaacccatccaaatgtgctcaaactagggaaacgtgtatacaattatacccccagcccgaactattttgattgtttgttaaatgtttttgttttgtttaattttttggatattgtcagtattgtggtgctcttcccacatttttgtatcctccgttgtgtattccatttgtagtcaaagtattcctcttttgagttgtgcctagtattctcaaaaaccctttcgaaagcaataatttgatattcattgttataaataactaattatacaaatactaattgtaataaatatacagcaaagaagagaacgaa

SEQ ID NO: 41499 - protein, 834 aa, DROSOPHILA
MGDMFRSEEMALCQMFIQPEAAYTSVSELGETGCVQFRDLNVNVNAFQRKFVTEVRRCDELERKIRYIETEIKKDGIVLPDIQDDIPRAPNPREIIDLEAHLEKTESEMIELAQNEVNMKSNYLELTELRKVLENTQGFFSDQEVLNLDSSNRAGGDNDAAAQHRGRLGFVAGVINRERVFAFERMLWRISRGNVFLKRSDLDEPLNDPATGHPIYKTVFVAFFQGEQLKNRIKKVCTGFHASLYPCPSSHNEREEMVRNVRTRLEDLKLVLSQTEDHRSRVLATVSKNLPSWSIMVKKMKAIYHTLNLFNMDVTKKCLIGECWVPTNDLPVVQKALSDGSAAVGSTIPSFLNVIDTNEQPPTFNRTNKFTRGFQNLIDAYGVASYRECNPALYTCITFPFLFAVMFGDLGHGLILVLFGAWMVLCERKLARIRNGGEIWNIFFGGRYIILLMGLFAMYTGLVYNDVFSKSMNLFGSRWFNNYNTTTVLTNPNLQLPPNSSAVGVYPFGMDPVWQLADNKIIFLNSFKMKLSIIFGVLHMVFGVCMSVVNFTHFKRYASIFLEFVPQILFLLLLFGYMVFMMFFKWFSYNARTSFQPETPGCAPSVLIMFINMMLFKNTEPPKGCNEFMFESQPQLQKAFVLIALCCIPWMLLGKPLYIKFTRKNKAHANHNGQLTGNIELAEGETPLPTGFSGNEENAGGAHGHDDEPMSEIYIHQAIHTIEYVLSTISHTASYLRLWALSLAHAQLSEVLWQMVLSLGLKMSGVGGAIGLFIIFGAWCLFTLAILVLMEGLSAFLHTLRLHWVEFMSKFYEGMGYAFQPFSFKAILDGEEEE

SEQ ID NO: 41500 - DNA, 4144 bp, DROSOPHILA
cactgagggtgagctcgtggctctcggcatccaatttcatgcccaacacatttttgtatctcttgctcacctgggctttcagattgtcaaaactttggcttgcctcctccatcagaggagcacgctgctgtcgccggtagtgatccatgtgggcatgtagcaaggttttgaagagttcgttaaagtgctgcacctgctggtggtctgatacgtcttcgcagaaaacactgaacatggtgtcaaaaaacatcgccggatcctgtccattgcatagtctttttagggcgctgattgaggagcaggcgaaatttcgcttcagatatcggttctccttgtccagcatgtaaatctgatcatttatccttttaatggcatgtttgtccgccgcgcgtttcacctgcaacttatcgatcagacattgaagctccatcgactccttggttagtgcagcgttttctttgaccaacctacgattggcctccactatattctcgcatgaactaaaagaagactgttcctcctcattcaaactttcatcaaatttgcagcatacaacatctttgccgattgcgggattcggttttaggctcatttggtgaagagtgcgcaaatccaactggaaactgcccggccacgtaaatggataacccaacgatttgtgatcattgagttgtttatgaaggagcagtagcatatagtttctggaaaagcgttccttcggcgttgactgctggaagatgttgagccatcgggtgcatgtgggcacaatgttatctttatcgggcagcatgtccaccagtttcaccacactgacaacctcctgcacaaataggtcatctagcttctcctctgtcaaagaaaacggtttggccatgtctccaagatttgtttatatcaaactggcttgtgatttagaaatcagcctactatgacgtcagcattctttatcaaatattaaaatgtattcctgttttcttttagaccgcaaacatcgcgatccatgtcagctggagcggcagacaaatcaaagcgaccgcaacgcaagcccctccaatcccaatcttcgagcgccgctcctacgaacagtgcggactctcaggacaacatcacaattatccaagtgtcgaataccgccaacagtggccaggaacatccacccgaactgccgcccaagaacaccaccaccgctgaggtgtttcgattccctgaggttaagagcaagccccagactaatgccaagcagcagccaatccagacccatcacgagtataaaagcaacgtacaaatcattccgtccaacgccagtagcagtaccagtaccattcaagtccttggcaaacagtccagtagcagcaatccgtatacaacgcccgttaagcaaagctcgtccaatggctccagttcacaggtgtcgggcaccacgaaagtaaaggtgttgggtgacggagacgcaaccaccaaggtggctgtctacggcacctgctatccagcggccggaggaagtgcacccagttcttccgcagcctcttcctctgttaatcctgccaagccgcagacgcccagattaagtaaaaagataatactcagtgccaacacctcgggcattacgaatattagcgtgaatacagaacagggcagtgactccataatcagtggtaatatccactacgagaaggtcttcctttcctccagcattccgatcaccagcagaagcagtcccacaagagtggcaaacacgaataccacacagccagtgactaatggcagtccagctttgccacgtcgtcggttggcttcgccggcaacggcgcaaccagtgacccccaatgcagccggcagggcgacgccgcagttgacccgaggactaaccgaactggtcattagttcgcggccaagtagaagggatttccactacctaaagctgttgaacacgccactgaaaacgaagacatcgcacaagtcaaccagcgccgcgaataacaacattgaacaatccacgccttccagctccaatagtacccaagttacgccaacgcaaaggaataacacctcgattgtaaccggtgacagccaggagcagcggcgacgcagttcgtccacatccgatgcccaggctccacttcagcgggtccctcagcccgcaacgcagcgtaacgctaacaataacgagtttacgccatcccgaaacggagcctttcgtatgcagccaccgccacagggaacacctccgtcaagcaccaatcccgcccagcagtcgcccaacaagcgattgactttgcgggagcagcaagtgatgcagctgcgtcgcgagattatgcatcctggaggagtgcgactgaatctaaggcgcaaggactgcgtcggttccatcgcttgggtagaagccttcggtggcgtttggtaagttagagagaacttcgtatcatctccacggtgattgtatgtagaccgaattatatttggaaattgtataagcaattggtatgattcactaactagttgtgtttacaggattgcaggctggaagcagaaggaacaccctgtgctctacaatgccctacacatcggtgatcagctactgtccatagcaggtgtgagcattagcagtgcagctgaggccaacaagataataaggaacaccaatacgctatttgtaagttcggaaagatccttagttgcctgattttataatatctctggttctcttttcacacaggttgaggtcttgctgcgacgaatcccatttggtcgcgcctatgctatccgacgtgaccgcgagggtcagtgcctgggtctgattcgggatggaaacacttcgacaatcgtggatgtggtgccaaatagtttggctgcacgtcacggtcttccgcccaaggtacgtgacctggtgaccttctcaataaacactaacaaatgagttcattttagacgcaatcgtgtgacggaaattcacttaccttttggatgctcaccgagatcaatggtcgttcgctgaatctgttcttcaaggatttcgagatacgcgaccgcctgaactccgtgggacgcgatatatccattttggtgcaaccgtcggatttgataaccaagctgaaaaagcagctgaagtcgctgcgcggctacaaggattacttagtgcagtagtcactagctataacgaacgattccatataaccacaaataactctcaactgtaataagctgctatacgcgaggcaatttcgaatagctccgggccagtaatcattccatcttcgcgaaaaggtcaatgaacgcagccactatatagtcaactagaactggtagaaacatttcgctatattacgtactacacactacatatattaactatgatcgaaactacttaaaggacttaggtgtagcgttgaggaacatatacaaaagcaacctatatattttttgcaaaactttatataaactcgtacatatatatacaaattgaatagatatatatatatatatatatatagatctatatacaccatatgtatagctgacactttgaagggctccaaatttacacctcgaatttgtttagatgcggaaaagttatgagaaatttacaacatgaaattcaagtattttaggttaacatatacacgcgtaacccttacacacacaactgtgcaacttagtatccttatgcaatattggagtgcctctgattttgttcattgatgttgttttctttcatgttttcatttgtttcgtgcgaaaagacatacgcatctgtcgtaacatataagatgtgataaaaatgagtactcaaatttaggcaattttaaacgatacatatgtaaatgctttttgatttattttattaataagtttccgtgtgttatttcgataaacatattacttatgcgaaaaattcattaaagcaattccacgcaaatcactcacaaactgttcccctcttggccagcaatgtcgactgcctccagattcggaaattgtacttctccacatccagcttggagtacacaaagatgggcatggagttggacatcacccaaatgtatccctcctcgtcgatctaaaacaacaacgcacttaaccttcgttttcgtgttacaaatagaaagggatgagcttacggtcaaatcgctgggataaatcatct

SEQ ID NO: 41501 - DNA, 1917 bp, DROSOPHILA
atgtcagctggagcggcagacaaatcaaagcgaccgcaacgcaagcccctccaatcccaatcttcgagcgccgctcctacgaacagtgcggactctcaggacaacatcacaattatccaagtgtcgaataccgccaacagtggccaggaacatccacccgaactgccgcccaagaacaccaccaccgctgaggtgtttcgattccctgaggttaagagcaagccccagactaatgccaagcagcagccaatccagacccatcacgagtataaaagcaacgtacaaatcattccgtccaacgccagtagcagtaccagtaccattcaagtccttggcaaacagtccagtagcagcaatccgtatacaacgcccgttaagcaaagctcgtccaatggctccagttcacaggtgtcgggcaccacgaaagtaaaggtgttgggtgacggagacgcaaccaccaaggtggctgtctacggcacctgctatccagcggccggaggaagtgcacccagttcttccgcagcctcttcctctgttaatcctgccaagccgcagacgcccagattaagtaaaaagataatactcagtgccaacacctcgggcattacgaatattagcgtgaatacagaacagggcagtgactccataatcagtggtaatatccactacgagaaggtcttcctttcctccagcattccgatcaccagcagaagcagtcccacaagagtggcaaacacgaataccacacagccagtgactaatggcagtccagctttgccacgtcgtcggttggcttcgccggcaacggcgcaaccagtgacccccaatgcagccggcagggcgacgccgcagttgacccgaggactaaccgaactggtcattagttcgcggccaagtagaagggatttccactacctaaagctgttgaacacgccactgaaaacgaagacatcgcacaagtcaaccagcgccgcgaataacaacattgaacaatccacgccttccagctccaatagtacccaagttacgccaacgcaaaggaataacacctcgattgtaaccggtgacagccaggagcagcggcgacgcagttcgtccacatccgatgcccaggctccacttcagcgggtccctcagcccgcaacgcagcgtaacgctaacaataacgagtttacgccatcccgaaacggagcctttcgtatgcagccaccgccacagggaacacctccgtcaagcaccaatcccgcccagcagtcgcccaacaagcgattgactttgcgggagcagcaagtgatgcagctgcgtcgcgagattatgcatcctggaggagtgcgactgaatctaaggcgcaaggactgcgtcggttccatcgcttgggtagaagccttcggtggcgtttggattgcaggctggaagcagaaggaacaccctgtgctctacaatgccctacacatcggtgatcagctactgtccatagcaggtgtgagcattagcagtgcagctgaggccaacaagataataaggaacaccaatacgctatttgttgaggtcttgctgcgacgaatcccatttggtcgcgcctatgctatccgacgtgaccgcgagggtcagtgcctgggtctgattcgggatggaaacacttcgacaatcgtggatgtggtgccaaatagtttggctgcacgtcacggtcttccgcccaagacgcaatcgtgtgacggaaattcacttaccttttggatgctcaccgagatcaatggtcgttcgctgaatctgttcttcaaggatttcgagatacgcgaccgcctgaactccgtgggacgcgatatatccattttggtgcaaccgtcggatttgataaccaagctgaaaaagcagctgaagtcgctgcgcggctacaaggattacttagtgcagtag

SEQ ID NO: 41502 - protein, 638 aa, DROSOPHILA
MSAGAADKSKRPQRKPLQSQSSSAAPTNSADSQDNITIIQVSNTANSGQEHPPELPPKNTTTAEVFRFPEVKSKPQTNAKQQPIQTHHEYKSNVQIIPSNASSSTSTIQVLGKQSSSSNPYTTPVKQSSSNGSSSQVSGTTKVKVLGDGDATTKVAVYGTCYPAAGGSAPSSSAASSSVNPAKPQTPRLSKKIILSANTSGITNISVNTEQGSDSIISGNIHYEKVFLSSSIPITSRSSPTRVANTNTTQPVTNGSPALPRRRLASPATAQPVTPNAAGRATPQLTRGLTELVISSRPSRRDFHYLKLLNTPLKTKTSHKSTSAANNNIEQSTPSSSNSTQVTPTQRNNTSIVTGDSQEQRRRSSSTSDAQAPLQRVPQPATQRNANNNEFTPSRNGAFRMQPPPQGTPPSSTNPAQQSPNKRLTLREQQVMQLRREIMHPGGVRLNLRRKDCVGSIAWVEAFGGVWIAGWKQKEHPVLYNALHIGDQLLSIAGVSISSAAEANKIIRNTNTLFVEVLLRRIPFGRAYAIRRDREGQCLGLIRDGNTSTIVDVVPNSLAARHGLPPKTQSCDGNSLTFWMLTEINGRSLNLFFKDFEIRDRLNSVGRDISILVQPSDLITKLKKQLKSLRGYKDYLVQ

SEQ ID NO: 41503 - DNA, 5575 bp, DROSOPHILA
cgatcgatgatctattggtttctcacagtagcgaattaaggggcgtttggtccttcaattatctgcggtgccgcacgcttcgctatctttaatgccattttggtgagccgcaaatgattatcctgtaatcctttggataaatattaaatttcaattacgccatttaacatattattagccaccgatcggcactatcatcatcattgggcaagtcacgtgccgtcgaggagctgatagcaatctacgcaaaagcgaacaaccgcaaccctccgtttctgcagaaacaggcgtggtgacagcccgcaaaggatgcgactgcaattttatcagattatacatgtcgacggagtcccccgggagtcctcccgccatccacccccttggtcctcctcaacaggtgagcgagtccaacgaaactttgtgtgagaatttttcggcctttccccgattctgctcccctctccatttgtatcgggttaccttgcctcacccgattggcgctgtgatttgtcgttctcgagcattctcatgaaattaatttgaaacggagtatccaggatggatatcagttgaattaaaacaattattccaggattcagttaatttctagaccatacataaaattattattacatcagcttttaacagtaactcctgttatagcttacagaggctgttaatttttagggtgaaccaggtttgcttatttgtaattaatattaaataagaaaaaaagtaatcatgggcgtgacaaaacgaaagcaattcacaagaccaataaaaattgaggtactaagatctcgacgttcggatacggatgatcctgatctagaatatatcaactttatgttacatatttttacaattttactctacgagtaacgggtaaaatgtaaccagtagttgcataattctttctgaaatatatgtgtattaggagagggatgaatggacgctcattacttttagtaaaatgtcttatagagcaaattggtttatattttttttttaacatatctcaatacctagaagaacttttttaaagatcatttgactaagaagctgcagctacaaaataaataacgagaagcaataagttgaaaagttcaaaacttgtcagaattgtcatatctagttacctagcaaaagatttatcgagtgactgtcaatatatattacatgtaatacaaaaacggtccccttgcaaatccaagccgaaatcctgtgccaataagaagtcgagttccccgactaacagatacccgttgctcagttagtgtgaatgcgctgtgtctatgtatctagaatctgtatgctgcatcacaaccttctagcttttaaagttcctgagatctcgacattcagacggacagaggaacatggccagatcgactcggctattgatcttgatccagactatattctagtcttgattctagtatacccttttactcacgagcaaccgatataacaaccaagatctttgtaatatattatatatagtcagaaatttgatgtgcttttttttctgacagcaaatatatcatattgaaaacgagccacatttaattatacaaaatcatttttattgagaaaacttaggctacagtaaactcccccttaaaaacaagaaaagtaaatcagtaaattgtgcgttggctctcagccgcagacacccgtctagattttgggatcctggggcgtaagcttgacaatcttcacggactcctcccagatcttgagacccttctcctcatcgagggcagcagcattaagggtggcctccttgcagtccatgaagtactttccagacacattggccacctcattggatgtggccaaatagatagtggtctgggcgccggccttggtggtcttgaagaatcccttggtgatggccatcatgggcaagttgagggggaagggaacgttacgccaaatgcccgagtcgatcatgccgggatgcaggaaattcactgtaaccttggtgccctccagccgcttggccagctcccgggcaaagtagatgttcgcaaacttggacacatagtataagtaggcagccgggaaagtgccgatgggattgagcttggccaggttaaccgacgacaggcggtacagctccgaggctacgatgactatgcgagccggcgcgctcttctttagtacatcgatgagcagatgcgtcagcaggaagggtccatagtgattggtggccatggtcagctccacgccatcctcactcgtctgtccgcggaaggccagagccatgccggcattgtggataagcacatcgatcttgggctcggtcttcacaatgtcagcggcgaactcacggacggacttctgggagcccagatccagtttcttgactaggatcttgttgttcttcgtctccttgacgatctcatctgtgggaaatcaacaataaattacaaaattcggttatgtaaaaaaaaacatggttaatgcaacgccaacatattataagatactttctttaaagtaattacaacgtaaatatttaataaaaaaagatcattggtagtaagcagtttttgccagagtctataatcaactggatgagaccagttatcggaatttgaccgtgttgcatgtcctgccagatccttggcataacctcataggcattgtcttggtccacttacccttcactgcattggcagtctccaggttcctgcaggccatgatgatgcgggctccacgtccagccagatccttggccgtctccttgccaattccgctgttggcgcctgtgataatgactgtcttgccctccatctttgtctgtaatcaatgtcgaaggttaatcatttaatacggcgctgcaatcgaaaattggacgagggcggttcgaaaatatgtttacaatactaattagttggcgcttgttcacagtcacagtaatcgcagttcgtctggaacggaagctatcttagttttcagacccattaacgggtcgcttaattgccattcgagtgctgagagctttctgtgaatcagaggtaagcgatctcacagattgtaaccgagatacccagaagcttagatgttttgtgggatacgaacaatgttcggtcaggtggtaatcgtagctcagagatgtgacgtacctcgcctctcagaaggtatctaatttaatctgtaattaagtcgacgcgtcacaactgaccaatgtaataacaagattgaaacacgttaagttttcctagtggtgatttcatatatagttaaaagatttccatagtcggaatgcttggaatgctacagaatcgttttaattatatggggtttttccagatagtgatatatgtagttttctatagagcggtaagctgaaccattttcaattatggatctgtaatgtttatctgaatagttcgcatttatatgaatatataaaatttgtaaaagttttgagcgattaataagcttaaggtcgtgtccgaatactgttttagtaaactatcccaccatcatttgtatgtatatgacagctcatctacaagatctgaaaagaattcgcagcggaagtgggagcaacagccatataaagtgcgaaatattcgagtcgtgtcgcgattctggggagcatgggacttggttttttggattgggtgaggtgcgttcgttacctcggtgaaacatcgtcccgccgtgatgcgcagatagaaccgaatgctcatcagggtggccactatggcggccactgaagtcatgaggaagatgtcgcgcacatagtgctcggtcgacagccaaccgaagatgaaacccatcctacaaatatgccgaggtgtgtatactatatattgtatcttcatatacgtatatatcggtgtcaacatgcaaatcagattatataataaccgaagctgccaaagccagacgattgtcttagggcataacgaaacgagtttggttttgggttttggggtttcatggttttggggatattggttagtcggcgaaggttttcacaattcaaatcgtttatcagtgactgtcaataaatcaatttcgaaaactgttgagaaaacttacactttcactttcacacatgtgcgtaattatggcttattatgatgaaacgccgaaaaaaataacattcaaccaagttcattgacagcccaaacgaaagaaggttgaacaagaaagaaagtctgaagtttcatgtcgttttgagtttctggttttttcttctctgtttgttttttttttcccccaccgtccacgtcacaaagatttccaagagctttcctcaagactcgaagactggctctggttacgcttgcatgcaccatttaagaacccccccaaccgaaccacgccctacaatgcagtctcgaaaagaaacaagatctatagatgtatgaaaaagtctagaagtgacccgtttttgggttttgttcctcaacttttgccagtcggagacgagttttttagtgcaaactcacctgttttggctgttggctgatctataatttattccaacttctgctgacctgcactttggactatatctgcgctgcgaaatggaattggtggatccaagagctagtgccacaaccttcgccttgaacgactaatcggagactgaagtcggaattccgattataaagccgaggctgcggagaatgcgcgatcgtctccaccggtttggtattgccgtggtcgcggtgattttgttattgcacttatagccatggtaacaggttagccaagcggctttccgggctcctctttgggatcgtcttcatgaacggttcactcgcagcgaaagagcgagcacagagtggagccaaactataatacatagttaccagcggtaagagaaagatctgggtagtggattccaagaaagtgtgtctagaaagccacctgtcgggggcttcgcaaagcttcttttctagttatgcagctcgaatgatgagcttgaaataatgtagaaaataataatggatagtaattaacttttttaatgaccaagactttattactatttgaagtactacgggtaattgtataaacatgtcagataaaaatctattttatttttcatttcatatatcattaaccgagataccactgaaatatatcaacattcttttcaattcaatgcattttattatagagatgacatattcacaagtacaataaagaatgctcaacaatctaccacaagcttagtctaagcccgtctagttcgttgccttagtcctgtatatagctttatttgaaaaatataattcccttagaattatcgctcaaatataattcctttgaatgcagtaatgtttgaaaataaatatatatttacattcggttataatgctggcagtttaaacaaggtcatatggtaatataagtcattctacttctcaatgctgttttgtcggcggggtggttgggtttccgcatccgtttccaagtgcttggttaaggtgttgtaccattcgttcatatggttggatatgatgttgatgaagcgagatacctttgatttcatagtgctcacgaggctttcggagagtttagtcagactacgaccagaggc

SEQ ID NO: 41504 - DNA, 1238 bp, DROSOPHILA
ctcttggatccaccaattccatttcgcagcgcagatatagtccaaagtgcaggtcagcagaagttggaataaattatagatcagccaacagccaaaacaggatgggtttcatcttcggttggctgtcgaccgagcactatgtgcgcgacatcttcctcatgacttcagtggccgccatagtggccaccctgatgagcattcggttctatctgcgcatcacggcgggacgatgtttcaccgagacaaagatggagggcaagacagtcattatcacaggcgccaacagcggaattggcaaggagacggccaaggatctggctggacgtggagcccgcatcatcatggcctgcaggaacctggagactgccaatgcagtgaaggatgagatcgtcaaggagacgaagaacaacaagatcctagtcaagaaactggatctgggctcccagaagtccgtccgtgagttcgccgctgacattgtgaagaccgagcccaagatcgatgtgcttatccacaatgccggcatggctctggccttccgcggacagacgagtgaggatggcgtggagctgaccatggccaccaatcactatggacccttcctgctgacgcatctgctcatcgatgtactaaagaagagcgcgccggctcgcatagtcatcgtagcctcggagctgtaccgcctgtcgtcggttaacctggccaagctcaatcccatcggcactttcccggctgcctacttatactatgtgtccaagtttgcgaacatctactttgcccgggagctggccaagcggctggagggcaccaaggttacagtgaatttcctgcatcccggcatgatcgactcgggcatttggcgtaacgttcccttccccctcaacttgcccatgatggccatcaccaagggattcttcaagaccaccaaggccggcgcccagaccactatctatttggccacatccaatgaggtggccaatgtgtctggaaagtacttcatggactgcaaggaggccacccttaatgctgctgccctcgatgaggagaagggtctcaagatctgggaggagtccgtgaagattgtcaagcttacgccccaggatcccaaaatctagacgggtgtctgcggctgagagccaacgcacaatttactgatttacttttcttgtttttaagggggagtttactgtagcctaagttttctcaataaaaatgattttgtataattaaataaaaaaaaa

SEQ ID NO: 41505 - protein, 317 aa, DROSOPHILA
MTSVAAIVATLMSIRFYLRITAGRCFTETKMEGKTVIITGANSGIGKETAKDLAGRGARIIMACRNLETANAVKDEIVKETKNNKILVKKLDLGSQKSVREFAADIVKTEPKIDVLIHNAGMALAFRGQTSEDGVELTMATNHYGPFLLTHLLIDVLKKSAPARIVIVASELYRLSSVNLAKLNPIGTFPAAYLYYVSKFANIYFARELAKRLEGTKVTVNFLHPGMIDSGIWRNVPFPLNLPMMAITKGFFKTTKAGAQTTIYLATSNEVANVSGKYFMDCKEATLNAAALDEEKGLKIWEESVKIVKLTPQDPKI

SEQ ID NO: 41506 - DNA, 3190 bp, DROSOPHILA
tgggcacgttattgtacggaatgtaggaggcgttggggtcgtcgctgtcggcgcgggagctgaccactaccggtgtatcgcgggaggtcataatcttacgctttcgacgagaatactttccaggaaagacaaccggagctagttgaacaataaaaaaatagtacataagtaaataccaataaatctatctaacaaggctcgcgagattgctattgctgaatgagaactagtaatatcatattatgagtactaacctgaaaagctgggcctgtctttccttccgcccgagcttagatggccatctccgcgattgtaaaagtccatctgcttccatcggaagacctctatcatgggatcagcatctgccaaggaaagcagctgtaaccctgagattaaacttagaatcaaaaattggggcgataacattgctcggttttcctggggaactataatctaagttcgccttgccaagttgaggcctcaatagcgactgaaagccaatttgttcccaattggaatctattctcacagcggttcgaacgcaaattattaaaattgataagaaaagcgcgactctcacaagttctcaaaccggttttgtgacttgttagcctgataataatcgttagtaaaaatctaattatttacatacaaatggaattataaacagctttcagcttttctttctttttatgttgtatacatatataaatcaatcacaaaaacatgagaagaacatttagttgtaagaaacgttacgctattcgtttatgaaagcattgctgttctagcaatatattctctagcaattaataataattaacccaaaaatataaatttaatgcataatttctaaacttagaaaactaaagcaacaaatttcgcgccaaaagacttaacggcgatttattaaattaatcaaatcactaccaacaatcgataagaggtatcgatatacaaagctgttgtgtaaatcgtaatttatttagcgtaaacagtgtaaatagcaatatgcgctataatctgttagccagttcgttaaaattgctgaatagcacgaaaacccacaatttgttcttggtgaacgtgcgcagcttgaccggcgccgcccacaccaacgatgcagtggctccgaccacgcgcccaccggccgcagaatcgaggaatcccggagaggagcaacgatcactgcacatcgcggtaattggagtgcccaatgtgggaaagagcacgttcatcaacaacacggtgaaccaccgagtgtgtcccacctcggccaaggtgcacaccactcggcagtcgaacacggccatttacaccaccggccagacgcagttggtcttttacgatacgccgggcctggtcacgcaacatgagattcgtcggcaccacctggaccagaactttaagagtgcctaccgccatgccatacagcatgcggacatcatcgccgtggtgcacgatgcctcaaatgcctggactaggaaggaactgcatcccactgtcttggatacgctgaaggcgtatagcaacctgcccagtttcctggtgctgaataagatagacgccctgaagtcgaagcgtttgctgttggatctgatcaagacactcaccaacgacaccttgacagttggcaagcgggaagtccaggcaaaaagtgctctcgccaaggaaataagaatcaacaagcgggagtctagctggagccattttagcgacgtgtttcttgtttccgccttgaccggcaatgggctgcaggagatgcagaactacctggtgggccaggctaagcccagggattggaaatacccagctgacattcatacggactccagcccagaagcattaattgtggagagtgtgcgggctcgtctgctggactacttgccgcaggagataccctacaaccttaagtgcgagatcgagtactacagtgtggaaaaaagtgagtacttctgtacactcgtaaagaaatccttttcaattccgattttctttgcagatgttgtctacacatccgtgcaggttcagtgccccaccacgcgaatcgagcgcctaatctgtggcgagggtaatggcaagctgcggcagatcacggagcgagttacatcagacctggtggagatgttcggccaagcagtgtcccttactatatctacagtttccaagggcaagaagaccgccgcttgagcacttgttgattacttgtactttatttgtaacgttgcataaacctaagagttcacaaaagcttcaaatgcgccaccaatttgtctagatcttcggcaggggctggacccagtccgaggaccgttgctgtcccagattccagctgagtgcgcccggcatccctcaccaaggcggccaccacgttcgactcttgggcctgtcgctccagggagtttagctgctcgaagttgtccacgcgcagcactatcttcggctgtcccaggcgacaccaacgctgcagaatggcgttctgcagcttggttccctgcacagagctctggtagcacatgaccgccgcatgggcgcactgggccgctgtctttcccttggacatctttaggtcggttcggaccaccagcgccagtttggtggacttgccgaaggccaaaccgttgctgaggaacttctgcaggatgctacttgacgtgggcatacttctggctctgctgctccacgtacttctgcatgcacgcccggaactctttcaccttctcctggcaagccctccagtcgcccgtctcggcgatacactcctgcaccttgtagtgaagctctatgcagccggtcttcttcagcattagttccacgggatcctggtccgtcgatgcggacattttcttctccacttcgccggctgaattcgttcgtttcgaaattacgaaattcggtcagggttgtcaacacatcgaagggacacggatatattctgtacgacatttggcccactatcgaattgaaagaatttactgtaaaatatattttcttgcattataaatgtgtttattccatagacagaataggaaatttttagatctttgggacctttttctgtataaatacatgatgatttgttttacctacaatatatgttgaaaaaagtatatgaaacatacattcctatggttttacaatttttgtatggcttaaaatgcttttttaacatttcccaaatcaaattttt

SEQ ID NO: 41507 - DNA, 1133 bp, DROSOPHILA
taaatagcaatatgcgctataatctgttagccagttcgttaaaattgctgaatagcacgaaaacccacaatttgttcttggtgaacgtgcgcagcttgaccggcgccgcccacaccaacgatgcagtggctccgaccacgcgcccaccggccgcagaatcgaggaatcccggagaggagcaacgatcactgcacatcgcggtaattggagtgcccaatgtgggaaagagcacgttcatcaacaacacggtgaaccaccgagtgtgtcccacctcggccaaggtgcacaccactcggcagtcgaacacggccatttacaccaccggccagacgcagttggtcttttacgatacgccgggcctggtcacgcaacatgagattcgtcggcaccacctggaccagaactttaagagtgcctaccgccatgccatacagcatgcggacatcatcgccgtggtgcacgatgcctcaaatgcctggactaggaaggaactgcatcccactgtcttggatacgctgaaggcgtatagcaacctgcccagtttcctggtgctgaataagatagacgccctgaagtcgaagcgtttgctgttggatctgatcaagacactcaccaacgacaccttgacagttggcaagcgggaagtccaggcaaaaagtgctctcgccaaggaaataagaatcaacaagcgggagtctagctggagccattttagcgacgtgtttcttgtttccgccttgaccggcaatgggctgcaggagatgcagaactacctggtgggccaggctaagcccagggattggaaatacccagctgacattcatacggactccagcccagaagcattaattgtggagagtgtgcgggctcgtctgctggactacttgccgcaggagataccctacaaccttaagtgcgagatcgagtactacagtgtggaaaaaaatgttgtctacacatccgtgcaggttcagtgccccaccacgcgaatcgagcgcctaatctgtggcgagggtaatggcaagctgcggcagatcacggagcgagttacatcagacctggtggagatgttcggccaagcagtgtcccttactatatctacagtttccaagggcaagaagaccgccgcttga

SEQ ID NO: 41508 - protein, 373 aa, DROSOPHILA
MRYNLLASSLKLLNSTKTHNLFLVNVRSLTGAAHTNDAVAPTTRPPAAESRNPGEEQRSLHIAVIGVPNVGKSTFINNTVNHRVCPTSAKVHTTRQSNTAIYTTGQTQLVFYDTPGLVTQHEIRRHHLDQNFKSAYRHAIQHADIIAVVHDASNAWTRKELHPTVLDTLKAYSNLPSFLVLNKIDALKSKRLLLDLIKTLTNDTLTVGKREVQAKSALAKEIRINKRESSWSHFSDVFLVSALTGNGLQEMQNYLVGQAKPRDWKYPADIHTDSSPEALIVESVRARLLDYLPQEIPYNLKCEIEYYSVEKNVVYTSVQVQCPTTRIERLICGEGNGKLRQITERVTSDLVEMFGQAVSLTISTVSKGKKTAA

SEQ ID NO: 41509 - DNA, 5916 bp, DROSOPHILA
agtcgtctggtctgcggaggcgacacagaagccgtttacctagttgataatattgtttaaatgtcaagccttttgaattccttacctaaattatataatatttcaattgttgaaatcaattagttactgtatttaattttcgtatatttattattttctttatatactccaaaattggcttagatcaaagcacctgtcttacatctacgtctagtttaagcttaggactctatattcgtatacaggtgtttatgggtttaatgccttggcaattccaatttaaatattctcgttttgggtgctgctgtgttgtttggtcttatgattcatactcatatccgtcttaaatcctatttcgttggctaatttggaatagatttatgcgtgttttgaactaccttatttaatggatgaactaacttggattcaatgcatattaggctaagcgaatataataaatatagtatgtataagtatgtacagtgcagctcttaggcctacttttgttcgattctccgcgattcctcagatttgtattgtttgagcatttttaactgcatttggatgcggatttgggttatgagtattattacatcgttatgttcaattaggatttcaatttaacacgaacccaaattatttttctacagcaatgttgagtatggcatatacattattgtatttatcagcgatagagtgactatccccgtataattcactgagtggtcctcctttaaggtttcttatccagatgggatcctccagattttagtccctagtagaatcgttcgaacttgggcgccttgttgagtgcgcagaaataataccctgaatagttttgtgtggctccgggtggagtataatcgccgatgctgtagttcccgtagtcgtagttacccatgtgggcgtggtgatggtgatgggcgtggtgctggtggtgcatgtggtgggtgtgcggggggtggtaatgctggaaacctcctgcactccttggcttttgtcatgtgagcaggctgttgccaccaccaactccgctgccggtggaggactctccaccaactccggttgccccattgctgccattgctgctgttgttgttgccgtggacgcgcatgtgccgattcaagttccccgactgcgaaaatctgtggacaccaaaaaagcaattaactcgatgtataacgttccaggactgctctttgggggcctaagccttttttaaggggtaattttcatctttagcattacatttgaataaacaattattatttcatttaatttcagttctttagttgaagttgaaaatcttacgaaaatgcatgaatgaaaatgaatgatgcatattatctttggttttccttttttttaagcttgcaacagtctcagttttgttcaagttgttagttttatattgaaacgatagaaattattaaactatctttaaagctttaagggtttacgtaaaagtaaaagcaaaaccattttcgttcgtttaggaatgaggaaggacggtgtaagtaaatcccccatcccggactcacctgagcaggcagagcttgcactggtagggcttctcgccactgtggattcgcaggtgcttggtgagggtgctgctgtccgagaaggacttcttgcacgaggagcagcggtacggccgctcgccggagtgggtgcgcatgtgcgtggtgacactggaactctgcgagaatctccggtcgcagatggggcagcggaacggcttctggccggtgtgtgtgcgtacgtgagccgtcaggttggctgcctgcgagaagctcttgttgcagtcggggcatcgatagggtctttcgccggaatgggtccgcagatgggtcttgagcgtgctgggccgggcatatgtctttccgcacaaccggcatagattgggtttcatctcgccgccactgctgccctcatcgccgtccagatcctcgttgctatcctcctcgtcctcgaaggcggatagacttaagcccagggcggctgcctgatagctggtgggacttttgtggggcggtgtgtatccctgattgcccacccccgtgggatagtagccagccaaagaggagttggccggcggcgatggcgactccttttcgcccaccgtcagcggtggcagggcacccagacccgtgggagccggtgcccgaaaatccgctgtaaaggaatatgtggccgaggcaggatagtgaccgggactcagcagcggtgggtatagcacatttaccgccgctgctgctgctgccgccgaggtggagttactgggtggcgtccagttcatctgggagcactgcattggcacgccgcctgcatcaccggcaccgtagccatggtgcatggtcatgttcatgctgacgttcacgctcatgctgggatacatggctgccgccggaggaggaggtggtgcggccgttccagcactggtttcatagtagcaactggcagcgttggccactcctccggcactaccattactgccgatattgttgccaccactgctttggaggagagagttgcctacgtgcgatgcctggacttgggattgctggtgctggtgctgctggtgctgcgagtgcatctggccatgattgtgggagttcggcgaaatgagcatctggtgcggatgcactgtgtaggagagtgaggcggcctggtgcggattgccggcggcaaagttgtaggaagcgccgcagggcgagaatgggaacaggctgggcagcggatcgatgtccagcggcggtaggccgggaaatgtggaagccatctcgtcggtgctccagtagccgtgattacccgaggagcctcctccggcaccgttgttgctgctcccgttgccgctgctcgccggtggtgtcgtgctgatctggatgtggccgccaccgatgcccacgcccactccaatcgtgggatcgaaacagccgccgcagtcgaagtcgctgctggtgagcgaggagatgggcagggcggtgctgccctggcaggataggcagccgacgcaggaagcggcgcactcttgctgcacgagcgaaaacggaaatggagattgagaccggttatgaaatacattcagttagtactaatacgtaactaagacaaaataattagttagttagtggaaacatttagtaaattttaactatttttacattctaatactgacttctgaggagagtttaattgtattacatatggaaggaatttctaagctattaaacttcccaatagataaaatcgtatgggttaaaaatgtaatagattactttaaaaacgaaaatgataaacttcttagtacaaaactgtctgatttttcagttaccgatatagcaaattaaaataaccacaatttcggtattgggttctatttcctggttataaaatttaaatagttcaggtatatcacagatttcagctaagttctttccacgaaacaagcacaaccgaacgctcgaagatttccggagatattgaggcgaaatcgaaaaaggattccaggactcacctgagggctgtccagcgccaggccgaacaggggattgttgggcacatagcccgtctctggttccacaggaccgccgtttgagacatcgcacgatatgtacatagctccaccctcttgatcttccagggaatctgcgcagccaaaaaaaaaaaaaaaagaacagcatgaaaatcactggaagtacgccagagatgctcgccagcagcgcgtatctcatggatacatttttgctcccatgacaaccactgtgcgcactagctccgcccctcgagacacacacagacacacacaaatacacaaatcgagagaccgccatttgctttgctctctcgactcgcgactttccatccgtgtatcgccatacaatatgctgtatctgcatatctgtgcaatggtgcttccgatttcactcacccagaattgtgttcaggagtttggaacccttatataacaatcccatgacatgactccacttctggaacgtttgggctcagcagtcgcgcatttgttcctgcttttcctacgcttcatcttgatgcgttaatttccaactgcaaggcgatgacggaacattattggtaaattctaattaagattcactttctattcatttattcaaatctattattcaatttattatttattcaatcaaataccaatatcaaatctaatcttcatatattttcaataaagtgttaataaattcagttttaaataaagttcgacagctaatcagaaattagatacacaatatgacagattcttcacctctaaatttaaaagagatatcgaattatagatcgctcttatgacgaagatggatttcaattcgattgtttcattattgttaggactaaaaaattatactaaaattacaataactttcattttgaaagaaacaaaacgttaaaattgctatttaactaatttatgcatgcaaatcaaagtaaatttttgtttttctttttaatgagatcaaagctatgatattgttaaattgataaaatcttcttagtgaattgattttttcgatcttagccaaaacattgttaggacattttaattagctatttgcagttattaggttttatttcaaatacattagttgtattccattttttctttcttcttttttattgcagatttaatattgtttattccgttctttattcacatatgcactcttaatcgttttcaccttctgaatagatccacaaatggcatgataccaagatcaccaatagaatttcaacgttttcttgcaaaatatgtttgtaacttttttttcgaagactcggttttaagtagtaacacacgatcgttgttttccgatttgaattttatgcgttttcagttttcgatttttcgagtgcggggcaagaagcgacttttggcgaggagcataagacggcgactaattgtcagttgcagttcggttcgagccacctcggcccaaaatcgactgatatatcggattggcagagcggcagcaaagcgacaaccgacaactacagaggaagcagcagggcgcaaaaaacatactcacttaattataaacaagcgacaaaagggcgcaaaagacaacggcaacaacaatctcgctcgcactcacactttggtcggctataatgacacaagtacgcagcactacacactcgagacccttgctgaaagcacccctcctccaataccaaacccataccataccatacccacaccaagccatcccgcactatatcccatgcccactcctgagattccatccatccaccaccacaacaacgctgccgtcatcgttgttggccaaccaatgcgctccgtctgccggcttttgcggctactacccacccctctgctgcttccacgtccacatcctcatccaaatccaaagtcaccctcctccgccttcgccttcgcctccatatccgactcctccgctgccgatcccgcccagtccgagtttcaggcccattcatacgtggccagctacatcggcagcagttttcagtagtttttatttgtcacccaatatcttacagctcgacaccagataccaacgaggcggggagaaaaaagagtacacttcgagaaataatcgctagcaagcagttctagtgctctagaatgttacacttcaaaatcgatggccgttcaaataacgttgttttcaattcacaaacaagtatcctcactttatttgttgaaaagaagatatgaagttccttttccttaaaatctatagatgcacaaccgcagattgtcgctaaattcttaagaggacatcaaatcacttgagactatttgatatgcttgtgattagtgaatattttcgatatataacatattatttactttcttaaaataaaggtattgtaattttattacataataaacaaaaa

SEQ ID NO: 41510 - DNA, 2107 bp, DROSOPHILA
cctcgccaaaagtcgcttcttgccccgcactcgaaaaatcgaaaactgaaaacgcataaaattcaaatcggaaaacaacgatcgtgtgttactacttaaaaccgagtcttcgaaaaaaaagttacaaacatattttgcaagaaaacgttgaaattctattggtgatcttggtatcatgccatttgtggatctattcagaagttggaaattaacgcatcaagatgaagcgtaggaaaagcaggaacaaatgcgcgactgctgagcccaaacgttccagaagtggagtcatgtcatgggattgttatataagggttccaaactcctgaacacaattctggattccctggaagatcaagagggtggagctatgtacatatcgtgcgatgtctcaaacggcggtcctgtggaaccagagacgggctatgtgcccaacaatcccctgttcggcctggcgctggacagccctcagcaagagtgcgccgcttcctgcgtcggctgcctatcctgccagggcagcaccgccctgcccatctcctcgctcaccagcagcgacttcgactgcggcggctgtttcgatcccacgattggagtgggcgtgggcatcggtggcggccacatccagatcagcacgacaccaccggcgagcagcggcaacgggagcagcaacaacggtgccggaggaggctcctcgggtaatcacggctactggagcaccgacgagatggcttccacatttcccggcctaccgccgctggacatcgatccgctgcccagcctgttcccattctcgccctgcggcgcttcctacaactttgccgccggcaatccgcaccaggccgcctcactctcctacacagtgcatccgcaccagatgctcatttcgccgaactcccacaatcatggccagatgcactcgcagcaccagcagcaccagcaccagcaatcccaagtccaggcatcgcacgtaggcaactctctcctccaaagcagtggtggcaacaatatcggcagtaatggtagtgccggaggagtggccaacgctgccagttgctactatgaaaccagtgctggaacggccgcaccacctcctcctccggcggcagccatgtatcccagcatgagcgtgaacgtcagcatgaacatgaccatgcaccatggctacggtgccggtgatgcaggcggcgtgccaatgcagtgctcccagatgaactggacgccacccagtaactccacctcggcggcagcagcagcagcggcggtaaatgtgctatacccaccgctgctgagtcccggtcactatcctgcctcggccacatattcctttacagcggattttcgggcaccggctcccacgggtctgggtgccctgccaccgctgacggtgggcgaaaaggagtcgccatcgccgccggccaactcctctttggctggctactatcccacgggggtgggcaatcagggatacacaccgccccacaaaagtcccaccagctatcaggcagccgccctgggcttaagtctatccgccttcgaggacgaggaggatagcaacgaggatctggacggcgatgagggcagcagtggcggcgagatgaaacccaatctatgccggttgtgcggaaagacatatgcccggcccagcacgctcaagacccatctgcggacccattccggcgaaagaccctatcgatgccccgactgcaacaagagcttctcgcaggcagccaacctgacggctcacgtacgcacacacaccggccagaagccgttccgctgccccatctgcgaccggagattctcgcagagttccagtgtcaccacgcacatgcgcacccactccggcgagcggccgtaccgctgctcctcgtgcaagaagtccttctcggacagcagcaccctcaccaagcacctgcgaatccacagtggcgagaagccctaccagtgcaagctctgcctgctcagattttcgcagtcggggaacttgaatcggcacatgcgcgtccacggcaacaacaacagcagcaatggcagcaatggggcaaccggagttggtggagagtcctccaccggcagcggagttggtggtggcaacagcctgctcacatga

SEQ ID NO: 41511 - protein, 604 aa, DROSOPHILA
MGLLYKGSKLLNTILDSLEDQEGGAMYISCDVSNGGPVEPETGYVPNNPLFGLALDSPQQECAASCVGCLSCQGSTALPISSLTSSDFDCGGCFDPTIGVGVGIGGGHIQISTTPPASSGNGSSNNGAGGGSSGNHGYWSTDEMASTFPGLPPLDIDPLPSLFPFSPCGASYNFAAGNPHQAASLSYTVHPHQMLISPNSHNHGQMHSQHQQHQHQQSQVQASHVGNSLLQSSGGNNIGSNGSAGGVANAASCYYETSAGTAAPPPPPAAAMYPSMSVNVSMNMTMHHGYGAGDAGGVPMQCSQMNWTPPSNSTSAAAAAAAVNVLYPPLLSPGHYPASATYSFTADFRAPAPTGLGALPPLTVGEKESPSPPANSSLAGYYPTGVGNQGYTPPHKSPTSYQAAALGLSLSAFEDEEDSNEDLDGDEGSSGGEMKPNLCRLCGKTYARPSTLKTHLRTHSGERPYRCPDCNKSFSQAANLTAHVRTHTGQKPFRCPICDRRFSQSSSVTTHMRTHSGERPYRCSSCKKSFSDSSTLTKHLRIHSGEKPYQCKLCLLRFSQSGNLNRHMRVHGNNNSSNGSNGATGVGGESSTGSGVGGGNSLLT

SEQ ID NO: 41512 - DNA, 11571 bp, DROSOPHILA
gtcaacacatcgaagggacacggatatattctgtacgacatttggcccactatcgaattgaaagaatttactgtaaaatatattttcttgcattataaatgtgtttattccatagacagaataggaaatttttagatctttgggacctttttctgtataaatacatgatgatttgttttacctacaatatatgttgaaaaaagtatatgaaacatacattcctatggttttacaatttttgtatggcttaaaatgcttttttaacatttcccaaatcaaatttttaagaacgcattagtatagttttctaagaatggaccacacagaagtaaagtaaagctcatataaataaaagtttgtgtttgttctttgggatagatgtagaaaacttttcggccaaacaagtgtgcacggggtatgaccatttattcgtgactcttgcgcggcgttgcggtaatttgagcgaaggccgccacgggcacaccgatgcgaatgcaatcaacgagaaacgagcgaattgcaacgagcaggcgaaaaatcacaaaaagcggaaaatcacaacaatcgtgggtgcaaacgaaacggaaactgcgaggcaacggaaagtcgggtcccggaaaatccaaacggatggccctgcagtgaaacgctgatgaaagcagaggcgcacttggcgcgattcgaggggcaaagcgcgttgcgttgtgctgctctgcgttcttttccaaaaccgatttcgattccaaaaaccaaaccaatccaatacccacacttatacacttgcacaccgacacaccagcgcacacacacagacacgcgcgcgcatacagtgagcgagtgaaagtgcatctacatctgtgatttcgtatataataatgcgtcgcgcatacgcggatttggccagcagaagcaccaaagactaacaagtgatccggagccggggactgactgagttggctgggctcattgacccatccaccgcgtgaaagccccgccagaaatggccgatcaggtggcgcacaccaaagaaacggatgcagatgagccgctggtcaatggcgaactgccaatggaggaggcgccgccttcctgctgccatgtgatgtctctgtcctccatggacgtagatgtagatgcggatgcggagggcgatgtggatgccacagcgtcctcctcctgcgtcgccaccgcttcccagctgaatccgtcgccaccgcctgctggtgtccaacaggcgaagccggcgcggagcagctcaccgccatgccagctcctggagcggctcagctttcccgacggcaacatcatcaacacgctgcacacgatcctcgccctgcctccttttgatccttatgcccccgcccccaaagcggagacggtctacaaggaggtcgtatcgctgatgcagtggagccagcgggaagacaacgccatcgaactggagctcagcgacaagctgctgcacgagtgcgagcacaagggcggcgatcccaacgatgagacgcgatcgtatttggtgggttcccagaagctgcccgaaagctgtggagatcgatttcatttcatgtattttttttatttaaatgtactattaaagatgtgtgtgggatttttttatattatacctacatttagattggatttaatgagttatcaaatcaaatgggatagaaattatcttattagatcgactttagatgtttcgaaatacttaaacatgattttttttggtttaaagaacacttatttgaaattatgctttagaatattgataggtgcaatcataccaaatacattatatttgagaatataaagctttctcagtaaatactcactatcgttcaccttcttttcagatggccattgagaacatgcgcctgttctctgaggatccaaagaatccgcttcgtgacgccgacggacagctgcgtgcaattacggtgtgtttgcttgaaaggattaagatgtataacgaaacgtactcctaatccattgtagctatatttccagaatcttgccttcatatttgtgaaacaccggaaggaggagttcttcacattttgttcctgcaaggaatgtctcgaataccgcgaaaccatcatggccatcatgatggatcaatttaaggctgcgcacatggtggtcatgttgctagacgtactgatcaaggcctacagtcccatgttgaagtaagaacagtctgcaaaactgcaataagaaaaagtctcctaagtcagttggtaatcatttaaacatctctgttccagaaacgatgctgcctacaataagtttgagaaactgcttgagtgcaacaaggagatctattggattacgagcggttacctctacgataaaaatgccgaatatcttgattttattgatgatacagcgatctccgacaatatgatattagtgctattcagcgccatgtaagtgaacaccccagtcctgcatttgtttactttaaacgcattatctgttcacagattaatggctaacaatccgatgctgctgctacaaatactcgcctataatgttgaatgcattgtgaaagcgttttccgagggcatgatcgaaattgcccaaaatattcaggaaaacgagaagatttcggcagaaaggatgctgacatgtaagggaattctcaaatgatagctaactaaataaataaggggcatattcttctcttaagtacataaatttagtgactaggaggaatttatcttttaactcgaactggtttcatagggaaaatccacttacatataaactcaatgaatcactcttgttttttaaccctgtgtagacattctggacggctactctgatctgaattgcatctcgcagaagatctcgctcagcctgtttgcgtttgagaacgatttcctgcgaaagttcaggctgtcgtgggttcttctatgccagcgccttttccagcagcatgtattcacacccctgggtgataccatgctggcctgcatcctgtcgttgaaggaggtggctccatcggcccagacgacggcgctgattaagcggtacatgctgttcgacgagcacatgcactccattgagcggcgctggacggacatctggatcgagctaaataagtttaacttgtcgccaacggagcacgagcgccggatgggcctgctcgatgtgtacaacatattcgacaaggtcgtcctggacgccacatctttttcgctgccggatatcagcgacgatgagtttatagacttccagcgcatcgtcgatcgccagctggcctggaagaatatcatggccttcacgaagctgaagtggcccgatggcttctacgatccgcccaataagctggtgcacgaggatctctgcaagaagtgcaattcacttctcgagcaccataacgagtaagtagattgggtagattgtgcacccaatctgaaattttacaaaataataaataatataaattaaaattttaaaattatttttatcattatgtaccatatcaggaactgcaaatgcatcacttgctccatcgccggcactcctttgcgaccacgacaagcgggccattgtgccaagtgcacaacgctcggcattgtcgagaaggatccgaagctgatgaagtccaagatccttagcacctgcaccagtgatgaggccaagcacaatgcggccatagcggctactacgagctcctccacctccaccgcccagcaacagcgacgcactagcgatctgccagaggatgagtcaccaacaggcagcggcagcagtggatcggtgttccgccgccaggcagagacgtccgataccctgcgcaccacatatcacatcgcatgggcggtattccagcacctggccaccaggaagcgctatcgccacgaaaccatcgaaccgcagttcatctgcggtgagaattgccgcgtttccgcttgccagctggctagaaagatcctgtccaaccagctgtcgccgctgctgaccaaatatctgctgcgctgcttccagccgctgtcgtttacgcgggaggagctgcgctccacgattccatcgctgatgttcttcaatcggaagctggcgcctagtcccgccgagctgcaggagctgcgaaaccagcactatgtgtacaaaacatactggaccttcgtgctctccatctacgccaacttctttgtaaaattcaactcgagcagcacggatttcggtcacctggagctaatcaagggcgatctgcgcctgcggctaaacagcgtagttggcgacaaggaggacaatcggtttgagcagtttctggctcaagttattgggtaagttttctcacctaaattgtttccaacgtggatgtttcttaataggctttcttttcctcatcgcagatactcacctttcaaagtcactgatgagtaagtattgaagaccaaatgttttgaccaaacataaacttaaccaaggcagtcctccatttttcttttttgacacgtgccattttgacatttgcggacatgtttttattagggaccatctacaccacaagcatgcaaacagggttgccattgcaaaatactgcaggagttaaaaaataataataagcctgtaaagttgttcgattatgtgtataattaattaatttttaattatgcttttaaaaggtaataatctagcacttggcagttaatagtgttttttttatgatctgtcctaagtggacaataattaaatgttgtatattcacttaagcaatacaatcagtagttgtggggtgaacattctcttggggggtgtgccagttaagatatgtcttttattattcagccaggatggcacttgcattaacatcttgacaatatcggctatcgattactgataatttggatccttacctttgcatatcgttatcctctctaagagacctgtcaattaaatcgtgacaattcagattctagcaggcttctgtttggcacgccagaaatattaagattttaaaaacgagagtgaataagaaaggacttgagttgtactgttgtgattctaaaattaattataattatcattgcagttttactttgggtgatgccaacatagagaagttgcaatttggagtggatcagctaatgatgttgcacgactctcagataatgtaagttctaaattatagcaatcattaaatcattaacttatgagattatgtttcattgcagaaaacgcactaaaccagatagcactactggcttatcgggtgccaaatccaagttaggggaatcgaacgtgccccagtccggaggcaaaaatggcgaagctggcggcaacaagaagagcaaggagaagatgcgaaaatgtgaggagctatgattcagatttctgctaagatattaaggacgtgttttttataacctctaggctgttctgactacgcggacattggggagccctgcaaggagaatcattcaaagaaacgggtcaaaaaggagtgcaatcatgcgcgcttcaatgagacgcgcgatcggctgcgtaagaagctctcccagatcgtcaacgagcgtaagaccaagtccacggaggagaccacgccatcgaagaccaaatgcagcaagccggagccagttgctgtccccgcaccggcagccatcccaccgaagcggccgccatcacccttcaatccgccaaagttaccagcagtgttggctgtggcggctctcgaccgaatttgccgcgaggagcacgaggacgacagtctactgcgtctggacagcctctgcaagagcctgcagaggcacacggatgccacagacgcctcggctgcggctgctgctctggccgctttcaagcacggtagcggctttccagcggactacagcaaagaggacatgatgcaggactttgctgagttcctgggtacctatacctatacccgtgaacaggaccaacagcgctggatcaatgagacgctcaactttatcgagggcaagtcccagcagccgcacaccgcgaatcccaagaaagcagccaagaaagccaagcaaaagatgcgcaaggaggaggagaaacgtattaaggaactggaggatctgcgctgccagtttctggacatctatttcaaggagttcattgacaagtatgagatgaagaccttgacggctgcaggcggccggaaaaaggagaagaagcgcatcggcgagctggagacgaacattaaaaaccttcagcgggcaaaggctaaagtggagacagtgatcctcgaacttattgccaccgtcaagcagacgaacagcgagttcaagttctcctacttgcctaccaagcaacagcagctggccaagatggcccagctggaagagatcctgaacgggggcccgaccactgccactgccgaacctgttagacaggagcctccacagcagtctgcgccgcaatatcccgagttcagtagtaacgcctccttttaccatccaccaggactcgggcagcagaacacgcccgtatgcttcgcaccaccccagcagtcccaacatccgcctcaactgtctcgcgatgtgatcgccgccatggcggccagctccatcactgccgatccctccaagcgcattgtgacaatacggcgggtgcagctgcctcatccgggcgccgagcagcaggtgactgtagtggccaaaggcagtgctccgcacgaggacaaactgctctacacttttgtcaacgggcatatggtggcttcaggtccgatacagccagaggaaatggctcctcgacaggcaacggttccggctccagcgcccagtgttcctgaaaagagtgccaaggccaagaagaaagaggctaagcgagctgccgcggcggcagcagcagaagcagcagctgcggccgaggcagctgcagcggcagcagcagaagctgcggcggagcaaaaagccaagctaaagaacaagaagcaggcgaagaagacagccgtggctgtggccaccgcctccagttccacagcgagcagcaactcctcaaagtcgcagacgccgcagagtacgcgcgaaagctcggtgtgcagtgttaagccaaagactgtacccaagaagccgacttccaagccacccaaagttgtagaagtgacaccaccaccgcctgttcccgaaccggaaccggagccacccaagaggcagaaacgcttgaagtcgagactggatcctggacagttggacaacaatccgtggaaggcgctgcacatgcaagattcgtcggagggagagtgggaaactggtagtgagtcagacgaaggagtcccaacaccagcgcagccaccaataaggcagcagcccaaactgccagctgctccggctcccaagcccgttgcaccgtcagtggtcacaaaggcgaagccggctccagccgcagttgcagcacctgccaaaaaggtgaagcaacaggaagcaccggcccaccaaaagcaaccagctgccaagactcaggcacagcctaagagcaaatcgacgtttgcttccgtgggcaagtccaatccgccgcaacagcagcagcaacagtatcagcaggaaaaggtgccgcctaccaagagccagcagcagcgtccagcggaatcatccaggaagcagaagcaggctcctggcaatctcgaatccaatcgcagcgctccgaatcagcgctgtgagcatttgcagacgcaacaggcgcctcgcagtggacgggtcaatggtcgaacaaagcccacgcctggaggtcaacagcagcccgtgcagcagcactccaacgctcatgcggcggaatccattgctccgccaaagaagtcgcagcgtggaaagcgcggacatcgccagaagcagggtaagttcaagttcaaccattcattggtaaacctagaacgctattattacttattttatgattccctgcagaggatctctctggcattccacacaacatgggctatttcaatcccaacgaaattgccataccgccgcagtcgggaagctatgccagcactctggctcagcagctgcagcatttgcgcatcagccagccaggaggtagttccaactcgaaggaggcatcccagtcgcccaactgcagcattatggaccagctgaaccgcggtgtacaggtggaacacctttccctaccgcctggcatcaccctcaccaaggtggatccggctaaaagcgagcagttacgccagaaaagtgagtccatccgtttgctgtccaagccactggccgagcaacagcagcagcagcatcacttccagcagcagtctcacctcctggccggctactatggagcagccggtgccgctggcatggatcccaacggtgtaatcatggtggaggccaacccacggcccaatcgcagccaagctccagttgcaccacccaatgtggctgcagcggcctccgcagcgagcgccaacggaaaagcctctaggcgtcgtcgtcgcaatcgtggaaagtctggtggcgggagcggcggaaacccaggcagctcgggggcggccaacaagcaacgaacgggaggagaaggcggcggatcagcagcaggagcggctgatggccagatattggctaactcgccagccactgcggccaccattgaagctaacgccagtggtaatattatcacgctgcgcaatcccatgttccatcagggcaatgggccagtggccggcggaggcatgatgccgcccaatcccaatccaatgccgccaggtgagtggttcttctacttgtcgcaatttcatatacgataataaccaacatatattaactattcgttgcagtgcgcagctttggcgccggacttccggttcctccagccatgtccttggatcagcctgccgcaatcatcaagaacgagaacggcatgtttaccatacgcaatccggcgcttcaccaggctgtgaccaatggcctggccatgggaggctatcgccagttcggtggcaatgtcaactattacacgccccaagaggctgtggcggaagcggcacgagccgcccagcaaaagctgcagcagcagcagcaggccggtagtgcggccccagttgctcatggaggcggcgacagctcgaatttctcctacttctccagtggatcggccagtggcaacggcagcggaagcagcaacggcggcaacgggacgcacaacaatatcagtattagctgtaccaacgttcccccaaccagcgccgaaagtcctggccgattggtcggcgaggcggcagtaattgcccgtcccaagcactcacagaaatgtctatcggctattggcagtgagctgaaacagaaggccagcaagtggccgtgctttggtcagcagcagcagcagcagcagcagcagcaggattatagcaatagtgctggcggctctacgagcggagtgccactgcaggagcagtaccagcagtcgagctactacaatggtttcgaggttttctcggcggcagcggctaccgcatcgcacggtcctggaaacggcggcgtatcgaccgattgccacatgcatcacaactgtggcgacgactctccgccgcccaccatcaccggtttcaattcctatctggagggcattccgaacaccggagtcattcgctacgacgacgccgcctttctcaagaacttgataccgggccagcatctcaacaacgaggtgcgttacggatatgataactgtttgtgggagcacgatctctattcgaactatcaaacttatccgttgcccaatccattcacctcattcttctcatcctaattattttctgtaactgcacatttttaatttgaccttgcacacaaaaaaaaaaaaaaaccaaaaaaaaaaaaaaagaatgaaaaggttacatcgcaagaaaatgtatttccctttgccctttgctgcaataaaatccacaaatctttatttttagttttcctaaaatgtcacatgctcttcttgcattcgtgcattcgtatttttgcaggtctccatacacaatatttcggagtccaacttcacgcgcaacaacgcgtcgccgtcgccgcatcacgtggagatcaccagcgtgtttggaaaccgggcacgctcctccaacgcctatgatccgcagcagcagccgccacccgttccgggtgccaactactgcgacaacgtggccgccgactacggcagtggttagtttatacatgttacatggctaagagtcctcaatccaattgacccatttgtacatatttgcagattcccacctcttcgtgcagaacaatctgctgacgcgaatggcacagccggcggttccgccggacccatttggctatgacttcgatccctcctcggtggtgccgggcggaggatcgaaggcggccagcgtggccagcgatctgaacgaattcctgcgccgcagcccgctcagccagcgaacatcgccgtacagccaggacgagaatgccgccgccctggaaaccttcgtgcagaacatgaacgcactgcagatcgccacggatgcggagtgctcgcggctgaatggcacgggaactggaggtgggccgagcgatgtggcctcggcggacgccaccgccggaggagctgccaatgcggccgccgcctggtggtgagccacatgacacgaggtgcgctgcctggccagcagattgagttgaactcctcacattcataacagtctctcacatacgcagacatttcatcgatgaaaagcagaaagaaaaaaaaaaaaacgaaacataaaaattcaaaaaaccgaaaacgcatccaagaaatcattcaaaatgacttaggagtcaatttcaatgtttcaacaaaaaagagaaaaataaagaaaaattaactcaaatggaagttcacatatcctgcgattgtgtgtttttattcaattccccttaaattaactaaatctatgctaataatcaaagctaaattatcaaaatgagctttatttctccttgcgattttaattgttaattgtattttgttataattgataaaacaatgccgactaaattgaaactggttggggattttggatttattgttaaattttcaatttgatgctagtaaatataaaaacgttacgcttaaatagcaagaattagttgccgtcgagtggctaaaatacttgagtgctttcacatctcgaagacgagcgatccggaggcgtagctaacgctggagtcctcaatgtcctgacactggctgctctgggcgtacttgaggaacttgaaactcatcttgtcgtagccctgatcctgcagtgccttcacggcgcctagcattactccgatgggatggcgtccgcatatcgtattgttgtacttgcgcaagtactcggtgaaggagtgcggattgagcgactcaatgatgtccatgccctgcttgtccagcttctcgatggacttgtgaatcgctccgcaggagctgtcatagtaggtatagctgaagcgatggccccagtggcaaaagtcggaagatatcacaaacagattggtggggtccatcagatacgaggacagcaggctgccgtactgcgcctcctgttcgggattgagcgaacccaccagaataggcacaatggtgaactgatccttgtagctgcagcag

SEQ ID NO: 41513 - DNA, 7356 bp, DROSOPHILA
atggccgatcaggtggcgcacaccaaagaaacggatgcagatgagccgctggtcaatggcgaactgccaatggaggaggcgccgccttcctgctgccatgtgatgtctctgtcctccatggacgtagatgtagatgcggatgcggagggcgatgtggatgccacagcgtcctcctcctgcgtcgccaccgcttcccagctgaatccgtcgccaccgcctgctggtgtccaacaggcgaagccggcgcggagcagctcaccgccatgccagctcctggagcggctcagctttcccgacggcaacatcatcaacacgctgcacacgatcctcgccctgcctccttttgatccttatgcccccgcccccaaagcggagacggtctacaaggaggtcgtatcgctgatgcagtggagccagcgggaagacaacgccatcgaactggagctcagcgacaagctgctgcacgagtgcgagcacaagggcggcgatcccaacgatgagacgcgatcgtatttgatggccattgagaacatgcgcctgttctctgaggatccaaagaatccgcttcgtgacgccgacggacagctgcgtgcaattacgaatcttgccttcatatttgtgaaacaccggaaggaggagttcttcacattttgttcctgcaaggaatgtctcgaataccgcgaaaccatcatggccatcatgatggatcaatttaaggctgcgcacatggtggtcatgttgctagacgtactgatcaaggcctacagtcccatgttgaaaaacgatgctgcctacaataagtttgagaaactgcttgagtgcaacaaggagatctattggattacgagcggttacctctacgataaaaatgccgaatatcttgattttattgatgatacagcgatctccgacaatatgatattagtgctattcagcgccatattaatggctaacaatccgatgctgctgctacaaatactcgcctataatgttgaatgcattgtgaaagcgttttccgagggcatgatcgaaattgcccaaaatattcaggaaaacgagaagatttcggcagaaaggatgctgacatacattctggacggctactctgatctgaattgcatctcgcagaagatctcgctcagcctgtttgcgtttgagaacgatttcctgcgaaagttcaggctgtcgtgggttcttctatgccagcgccttttccagcagcatgtattcacacccctgggtgataccatgctggcctgcatcctgtcgttgaaggaggtggctccatcggcccagacgacggcgctgattaagcggtacatgctgttcgacgagcacatgcactccattgagcggcgctggacggacatctggatcgagctaaataagtttaacttgtcgccaacggagcacgagcgccggatgggcctgctcgatgtgtacaacatattcgacaaggtcgtcctggacgccacatctttttcgctgccggatatcagcgacgatgagtttatagacttccagcgcatcgtcgatcgccagctggcctggaagaatatcatggccttcacgaagctgaagtggcccgatggcttctacgatccgcccaataagctggtgcacgaggatctctgcaagaagtgcaattcacttctcgagcaccataacgagaactgcaaatgcatcacttgctccatcgccggcactcctttgcgaccacgacaagcgggccattgtgccaagtgcacaacgctcggcattgtcgagaaggatccgaagctgatgaagtccaagatccttagcacctgcaccagtgatgaggccaagcacaatgcggccatagcggctactacgagctcctccacctccaccgcccagcaacagcgacgcactagcgatctgccagaggatgagtcaccaacaggcagcggcagcagtggatcggtgttccgccgccaggcagagacgtccgataccctgcgcaccacatatcacatcgcatgggcggtattccagcacctggccaccaggaagcgctatcgccacgaaaccatcgaaccgcagttcatctgcggtgagaattgccgcgtttccgcttgccagctggctagaaagatcctgtccaaccagctgtcgccgctgctgaccaaatatctgctgcgctgcttccagccgctgtcgtttacgcgggaggagctgcgctccacgattccatcgctgatgttcttcaatcggaagctggcgcctagtcccgccgagctgcaggagctgcgaaaccagcactatgtgtacaaaacatactggaccttcgtgctctccatctacgccaacttctttgtaaaattcaactcgagcagcacggatttcggtcacctggagctaatcaagggcgatctgcgcctgcggctaaacagcgtagttggcgacaaggaggacaatcggtttgagcagtttctggctcaagttattggttttactttgggtgatgccaacatagagaagttgcaatttggagtggatcagctaatgatgttgcacgactctcagataataaaacgcactaaaccagatagcactactggcttatcgggtgccaaatccaagttaggggaatcgaacgtgccccagtccggaggcaaaaatggcgaagctggcggcaacaagaagagcaaggagaagatgcgaaaatgctgttctgactacgcggacattggggagccctgcaaggagaatcattcaaagaaacgggtcaaaaaggagtgcaatcatgcgcgcttcaatgagacgcgcgatcggctgcgtaagaagctctcccagatcgtcaacgagcgtaagaccaagtccacggaggagaccacgccatcgaagaccaaatgcagcaagccggagccagttgctgtccccgcaccggcagccatcccaccgaagcggccgccatcacccttcaatccgccaaagttaccagcagtgttggctgtggcggctctcgaccgaatttgccgcgaggagcacgaggacgacagtctactgcgtctggacagcctctgcaagagcctgcagaggcacacggatgccacagacgcctcggctgcggctgctgctctggccgctttcaagcacggtagcggctttccagcggactacagcaaagaggacatgatgcaggactttgctgagttcctgggtacctatacctatacccgtgaacaggaccaacagcgctggatcaatgagacgctcaactttatcgagggcaagtcccagcagccgcacaccgcgaatcccaagaaagcagccaagaaagccaagcaaaagatgcgcaaggaggaggagaaacgtattaaggaactggaggatctgcgctgccagtttctggacatctatttcaaggagttcattgacaagtatgagatgaagaccttgacggctgcaggcggccggaaaaaggagaagaagcgcatcggcgagctggagacgaacattaaaaaccttcagcgggcaaaggctaaagtggagacagtgatcctcgaacttattgccaccgtcaagcagacgaacagcgagttcaagttctcctacttgcctaccaagcaacagcagctggccaagatggcccagctggaagagatcctgaacgggggcccgaccactgccactgccgaacctgttagacaggagcctccacagcagtctgcgccgcaatatcccgagttcagtagtaacgcctccttttaccatccaccaggactcgggcagcagaacacgcccgtatgcttcgcaccaccccagcagtcccaacatccgcctcaactgtctcgcgatgtgatcgccgccatggcggccagctccatcactgccgatccctccaagcgcattgtgacaatacggcgggtgcagctgcctcatccgggcgccgagcagcaggtgactgtagtggccaaaggcagtgctccgcacgaggacaaactgctctacacttttgtcaacgggcatatggtggcttcaggtccgatacagccagaggaaatggctcctcgacaggcaacggttccggctccagcgcccagtgttcctgaaaagagtgccaaggccaagaagaaagaggctaagcgagctgccgcggcggcagcagcagaagcagcagctgcggccgaggcagctgcagcggcagcagcagaagctgcggcggagcaaaaagccaagctaaagaacaagaagcaggcgaagaagacagccgtggctgtggccaccgcctccagttccacagcgagcagcaactcctcaaagtcgcagacgccgcagagtacgcgcgaaagctcggtgtgcagtgttaagccaaagactgtacccaagaagccgacttccaagccacccaaagttgtagaagtgacaccaccaccgcctgttcccgaaccggaaccggagccacccaagaggcagaaacgcttgaagtcgagactggatcctggacagttggacaacaatccgtggaaggcgctgcacatgcaagattcgtcggagggagagtgggaaactggtagtgagtcagacgaaggagtcccaacaccagcgcagccaccaataaggcagcagcccaaactgccagctgctccggctcccaagcccgttgcaccgtcagtggtcacaaaggcgaagccggctccagccgcagttgcagcacctgccaaaaaggtgaagcaacaggaagcaccggcccaccaaaagcaaccagctgccaagactcaggcacagcctaagagcaaatcgacgtttgcttccgtgggcaagtccaatccgccgcaacagcagcagcaacagtatcagcaggaaaaggtgccgcctaccaagagccagcagcagcgtccagcggaatcatccaggaagcagaagcaggctcctggcaatctcgaatccaatcgcagcgctccgaatcagcgctgtgagcatttgcagacgcaacaggcgcctcgcagtggacgggtcaatggtcgaacaaagcccacgcctggaggtcaacagcagcccgtgcagcagcactccaacgctcatgcggcggaatccattgctccgccaaagaagtcgcagcgtggaaagcgcggacatcgccagaagcaggaggatctctctggcattccacacaacatgggctatttcaatcccaacgaaattgccataccgccgcagtcgggaagctatgccagcactctggctcagcagctgcagcatttgcgcatcagccagccaggaggtagttccaactcgaaggaggcatcccagtcgcccaactgcagcattatggaccagctgaaccgcggtgtacaggtggaacacctttccctaccgcctggcatcaccctcaccaaggtggatccggctaaaagcgagcagttacgccagaaaagtgagtccatccgtttgctgtccaagccactggccgagcaacagcagcagcagcatcacttccagcagcagtctcacctcctggccggctactatggagcagccggtgccgctggcatggatcccaacggtgtaatcatggtggaggccaacccacggcccaatcgcagccaagctccagttgcaccacccaatgtggctgcagcggcctccgcagcgagcgccaacggaaaagcctctaggcgtcgtcgtcgcaatcgtggaaagtctggtggcgggagcggcggaaacccaggcagctcgggggcggccaacaagcaacgaacgggaggagaaggcggcggatcagcagcaggagcggctgatggccagatattggctaactcgccagccactgcggccaccattgaagctaacgccagtggtaatattatcacgctgcgcaatcccatgttccatcagggcaatgggccagtggccggcggaggcatgatgccgcccaatcccaatccaatgccgccagtgcgcagctttggcgccggacttccggttcctccagccatgtccttggatcagcctgccgcaatcatcaagaacgagaacggcatgtttaccatacgcaatccggcgcttcaccaggctgtgaccaatggcctggccatgggaggctatcgccagttcggtggcaatgtcaactattacacgccccaagaggctgtggcggaagcggcacgagccgcccagcaaaagctgcagcagcagcagcaggccggtagtgcggccccagttgctcatggaggcggcgacagctcgaatttctcctacttctccagtggatcggccagtggcaacggcagcggaagcagcaacggcggcaacgggacgcacaacaatatcagtattagctgtaccaacgttcccccaaccagcgccgaaagtcctggccgattggtcggcgaggcggcagtaattgcccgtcccaagcactcacagaaatgtctatcggctattggcagtgagctgaaacagaaggccagcaagtggccgtgctttggtcagcagcagcagcagcagcagcagcagcaggattatagcaatagtgctggcggctctacgagcggagtgccactgcaggagcagtaccagcagtcgagctactacaatggtttcgaggttttctcggcggcagcggctaccgcatcgcacggtcctggaaacggcggcgtatcgaccgattgccacatgcatcacaactgtggcgacgactctccgccgcccaccatcaccggtttcaattcctatctggagggcattccgaacaccggagtcattcgctacgacgacgccgcctttctcaagaacttgataccgggccagcatctcaacaacgaggtctccatacacaatatttcggagtccaacttcacgcgcaacaacgcgtcgccgtcgccgcatcacgtggagatcaccagcgtgtttggaaaccgggcacgctcctccaacgcctatgatccgcagcagcagccgccacccgttccgggtgccaactactgcgacaacgtggccgccgactacggcagtgattcccacctcttcgtgcagaacaatctgctgacgcgaatggcacagccggcggttccgccggacccatttggctatgacttcgatccctcctcggtggtgccgggcggaggatcgaaggcggccagcgtggccagcgatctgaacgaattcctgcgccgcagcccgctcagccagcgaacatcgccgtacagccaggacgagaatgccgccgccctggaaaccttcgtgcagaacatgaacgcactgcagatcgccacggatgcggagtgctcgcggctgaatggcacgggaactggaggtgggccgagcgatgtggcctcggcggacgccaccgccggaggagctgccaatgcggccgccgcctggtggtga

SEQ ID NO: 41514 - protein, 2451 aa, DROSOPHILA
MADQVAHTKETDADEPLVNGELPMEEAPPSCCHVMSLSSMDVDVDADAEGDVDATASSSCVATASQLNPSPPPAGVQQAKPARSSSPPCQLLERLSFPDGNIINTLHTILALPPFDPYAPAPKAETVYKEVVSLMQWSQREDNAIELELSDKLLHECEHKGGDPNDETRSYLMAIENMRLFSEDPKNPLRDADGQLRAITNLAFIFVKHRKEEFFTFCSCKECLEYRETIMAIMMDQFKAAHMVVMLLDVLIKAYSPMLKNDAAYNKFEKLLECNKEIYWITSGYLYDKNAEYLDFIDDTAISDNMILVLFSAILMANNPMLLLQILAYNVECIVKAFSEGMIEIAQNIQENEKISAERMLTYILDGYSDLNCISQKISLSLFAFENDFLRKFRLSWVLLCQRLFQQHVFTPLGDTMLACILSLKEVAPSAQTTALIKRYMLFDEHMHSIERRWTDIWIELNKFNLSPTEHERRMGLLDVYNIFDKVVLDATSFSLPDISDDEFIDFQRIVDRQLAWKNIMAFTKLKWPDGFYDPPNKLVHEDLCKKCNSLLEHHNENCKCITCSIAGTPLRPRQAGHCAKCTTLGIVEKDPKLMKSKILSTCTSDEAKHNAAIAATTSSSTSTAQQQRRTSDLPEDESPTGSGSSGSVFRRQAETSDTLRTTYHIAWAVFQHLATRKRYRHETIEPQFICGENCRVSACQLARKILSNQLSPLLTKYLLRCFQPLSFTREELRSTIPSLMFFNRKLAPSPAELQELRNQHYVYKTYWTFVLSIYANFFVKFNSSSTDFGHLELIKGDLRLRLNSVVGDKEDNRFEQFLAQVIGFTLGDANIEKLQFGVDQLMMLHDSQIIKRTKPDSTTGLSGAKSKLGESNVPQSGGKNGEAGGNKKSKEKMRKCCSDYADIGEPCKENHSKKRVKKECNHARFNETRDRLRKKLSQIVNERKTKSTEETTPSKTKCSKPEPVAVPAPAAIPPKRPPSPFNPPKLPAVLAVAALDRICREEHEDDSLLRLDSLCKSLQRHTDATDASAAAAALAAFKHGSGFPADYSKEDMMQDFAEFLGTYTYTREQDQQRWINETLNFIEGKSQQPHTANPKKAAKKAKQKMRKEEEKRIKELEDLRCQFLDIYFKEFIDKYEMKTLTAAGGRKKEKKRIGELETNIKNLQRAKAKVETVILELIATVKQTNSEFKFSYLPTKQQQLAKMAQLEEILNGGPTTATAEPVRQEPPQQSAPQYPEFSSNASFYHPPGLGQQNTPVCFAPPQQSQHPPQLSRDVIAAMAASSITADPSKRIVTIRRVQLPHPGAEQQVTVVAKGSAPHEDKLLYTFVNGHMVASGPIQPEEMAPRQATVPAPAPSVPEKSAKAKKKEAKRAAAAAAAEAAAAAEAAAAAAAEAAAEQKAKLKNKKQAKKTAVAVATASSSTASSNSSKSQTPQSTRESSVCSVKPKTVPKKPTSKPPKVVEVTPPPPVPEPEPEPPKRQKRLKSRLDPGQLDNNPWKALHMQDSSEGEWETGSESDEGVPTPAQPPIRQQPKLPAAPAPKPVAPSVVTKAKPAPAAVAAPAKKVKQQEAPAHQKQPAAKTQAQPKSKSTFASVGKSNPPQQQQQQYQQEKVPPTKSQQQRPAESSRKQKQAPGNLESNRSAPNQRCEHLQTQQAPRSGRVNGRTKPTPGGQQQPVQQHSNAHAAESIAPPKKSQRGKRGHRQKQEDLSGIPHNMGYFNPNEIAIPPQSGSYASTLAQQLQHLRISQPGGSSNSKEASQSPNCSIMDQLNRGVQVEHLSLPPGITLTKVDPAKSEQLRQKSESIRLLSKPLAEQQQQQHHFQQQSHLLAGYYGAAGAAGMDPNGVIMVEANPRPNRSQAPVAPPNVAAAASAASANGKASRRRRRNRGKSGGGSGGNPGSSGAANKQRTGGEGGGSAAGAADGQILANSPATAATIEANASGNIITLRNPMFHQGNGPVAGGGMMPPNPNPMPPVRSFGAGLPVPPAMSLDQPAAIIKNENGMFTIRNPALHQAVTNGLAMGGYRQFGGNVNYYTPQEAVAEAARAAQQKLQQQQQAGSAAPVAHGGGDSSNFSYFSSGSASGNGSGSSNGGNGTHNNISISCTNVPPTSAESPGRLVGEAAVIARPKHSQKCLSAIGSELKQKASKWPCFGQQQQQQQQQQDYSNSAGGSTSGVPLQEQYQQSSYYNGFEVFSAAAATASHGPGNGGVSTDCHMHHNCGDDSPPPTITGFNSYLEGIPNTGVIRYDDAAFLKNLIPGQHLNNEVSIHNISESNFTRNNASPSPHHVEITSVFGNRARSSNAYDPQQQPPPVPGANYCDNVAADYGSDSHLFVQNNLLTRMAQPAVPPDPFGYDFDPSSVVPGGGSKAASVASDLNEFLRRSPLSQRTSPYSQDENAAALETFVQNMNALQIATDAECSRLNGTGTGGGPSDVASADATAGGAANAAAAWW

SEQ ID NO: 41515 - DNA, 3878 bp, DROSOPHILA
agtcattccagatcaatggaggagcgccaaatagccaagccttcgagcagcttgccatggccacggagatgttgcagcaacgaagtgacaggcgcggggacactgaatccgagatgtcatcgatgacggaaacgactatgaccagtgctaggagcttgggtggaggaattccccccctgacaatgcggatggagcgttctcaggaggcactactcacgacgcgatcttccaagctacccagacccaaatgcagatgtccctcggaatcggatttaattgaacacgagcagaaactggatatgggtcacgagttgccccatgacctggcagcgaacttcggcttgggcgaaggctacctcgtagacgaatgtggccagggcgacggactcatgaggcatccacaacagcgcaaaccaatggagttaaacaggcgagccgttagcggaactccaagcaccttcaacagcgacggttgcgagtatcaaatcaatgtgtcgcgttcccgctgctctaatgataagattaagtaagtaacttataatacttatacactctattacatataattacatctgcatagctataaaaaccttgggcgcaaaagctttagctttacgaatccccaagtgcgcgagatcgagcgccagaatcagattcttttgcgcaagatgatgactgtgaagcccacggcgacgatcaaggctagcaccagtagcataaagatcaatgggcccgagaaggtgagtacataatatagaacttatgtccaatattaaacctcttccttaacaatgtcatacagcgacagacacctccagcgccacgactgtccagcgcagctgtgaaccggaagaagaatcagcgccagatcgacctggacaacgatctgctcaagcggaaactggaggccatcggcacacggcgaccgcaattcaagtgacgcctccacaggcagctccaactgtgttcattaagtaattaaaagtgtttatgcgaatttacaaaattaaaatttattgcaagttgaaaagtgtaaaaagctgtataatcttaatataattttaagggaatttataaaccaactagaattcatgcaaaaatgtatagtactagtaaaatttcgttccgatcaaagtcaatgcatcaaaatgtgtttataatttgtacatttaggtataaacaattctataaatgttatcgtaatcaataatcgaattggatagcaatattaaatttaacaattattttgcagcacgttggtaacaaattaaactaagaaaaactcccgaaaataaatgaaagaaggcgaaaatatttaaacaggtaaaaggaattagatggcatatctgaaacttcaaagaaaagcttacagagtcacctcgttgatcttggtcagaaatgtctctcccaatgctttcattgctttaaaggcagcatctccgttcttttccttgaactcttcttcatttttaatcttgaccttctcgcggcgttccaattcacgatagataacctgaccaatctgaaaagaaaactaagattgaacgaaattgtatggaaaagtgaatatcaacttacatagacatcgatggcggcgtacattagttgattctcgtccagcggaatgacatgccacttgctcatgcgcaccttcttgcttttgtccatggccttcttggctataaagttggttaatcgctccaagctccagcgcccgccggtctcacagacctcattgcaccaaagacccaagtccacgcatttctctatcagtggttcggctgtaacctcggggaaatcacgtgccagctttcggaaatcgctggaaaataacagattttatttatccaaatggatttttcctttgtataactaacttctttatgttcacgccatgcaatcgcactttgggatgattgataagggccaccagggccgcaggcagtttcttcacattagtcagctggtatatgtagcagcacttttcatccacgcatatctggatgacggcagacttgccaggtcctgtttggaaagagaagggccactccatgtcgaaggccatgggcactacctcatctttttgtttttccacccattgcctaagttttgatttttaatgcacattattaacaagcaggaataagttatagagttaacttacaaaacatcgtcagcagatgccgcaatatcctggctctccgtgaaatactttatagcacccttgtatttaataaagggaagcttttcgggcttttccttctccggtgatggagacccatcctctgccattgaacgagtgcttctggtcagcctggaactccggcgcttgggcggattttcttcctccatcgctaacttctcagtcttctataaagttgttaatgcttcgtcccaatataaacttaatatataaattgttgcttaccacatctggagtatccagattttttcgcttggcagccggtctaccgggtcttcctttcgtttgctttggcgtattatcatctccagcattttctttatctttcaactgcaagatttattcggttgaaatagtatacatagtcattattgcttccgatttacagaaaccgattcttagttttgaaaaaagcagtagcagtattttaaataataaattctaaataataaacaaatgcaaacctcttttggagtatccttttttgttgctttccttgccactttgggagtctcctttttgacgcccgcctcctacaaatacttttaagttagtttttatccctgcacgaaattgtgtattagcctacttccttgggaacttcatttgcttttgatttgatgggcatttttgttaaatatttttccataacccgcgttgcttgttcgttttcttaaatgctttgtttactattatttcccgccaaaaatatggaggggtaggcgcacataaacaccacagtacgaaaaaatactgtgacaatcgataagtgccttgatgagttatgaaggaacggtagaatttggaacaaggaaatgttttttatttatttatattattgttatttcaaggtgaattcgataaactaaaaatgcaatttttttaagaaaagaaagatataactatctatgtgcgaaataagtttataggactcaagaaagtatatataatatgctattgaaaaattggcgccccacattttgggggacatctccactcgcagagcctgtgcaagcttgaccaccttaaaggatatttcaggaaaatttcataatagaattaccaatcgtttttgagataagctcattaagtaccataatatagatccacataacaatttttctgcttttgtttccagccctgcccaatttatagataccagattaagtttcccgctaagatatgttgcgatcttcttgctctggtcacacttaactcgaaagccgcattattttgtttacatcgcgaatcctctgctaaatccaacgaaaagatgtccattgcaaacgtttccacgcactacatatccgagaaggtgtcccaagtgcgctggcttccggaggaactgcagcagagcgaacggttcgttactggaagctgggacatggaccagaacttcgtgcgcctctggcggctacaatcgaaccaatatgtcaccgccacggattcggaagtggaccagatacctcgctgcatggacaaggtgagaatggaggacgatgtgaccgccatggagttcgtcgacaaggacacgctggctgtgagctgtgccgatggtcagttacaagttccagcaatcatgaactcagctaaataaatgtctattttaataccaaacaaggtcatctcagcgtgtttaacgtccatcgagccgtggaggaggatcagatgcaac

SEQ ID NO: 41516 - DNA, 1454 bp, DROSOPHILA
aagaaaacgaacaagcaacgcgggttatggaaaaatatttaacaaaaatgcccatcaaatcaaaagcaaatgaagttcccaaggaagaggcgggcgtcaaaaaggagactcccaaagtggcaaggaaagcaacaaaaaaggatactccaaaagagttgaaagataaagaaaatgctggagatgataatacgccaaagcaaacgaaaggaagacccggtagaccggctgccaagcgaaaaaatctggatactccagatgtgactgagaagttagcgatggaggaagaaaatccgcccaagcgccggagttccaggctgaccagaagcactcgttcaatggcagaggatgggtctccatcaccggagaaggaaaagcccgaaaagcttccctttattaaatacaagggtgctataaagtatttcacggagagccaggatattgcggcatctgctgacgatgttttgcaatgggtggaaaaacaaaaagatgaggtagtgcccatggccttcgacatggagtggcccttctctttccaaacaggacctggcaagtctgccgtcatccagatatgcgtggatgaaaagtgctgctacatataccagctgactaatgtgaagaaactgcctgcggccctggtggcccttatcaatcatcccaaagtgcgattgcatggcgtgaacataaagaacgatttccgaaagctggcacgtgatttccccgaggttacagccgaaccactgatagagaaatgcgtggacttgggtctttggtgcaatgaggtctgtgagaccggcgggcgctggagcttggagcgattaaccaactttatagccaagaaggccatggacaaaagcaagaaggtgcgcatgagcaagtggcatgtcattccgctggacgagaatcaactaatgtacgccgccatcgatgtctatattggtcaggttatctatcgtgaattggaacgccgcgagaaggtcaagattaaaaatgaagaagagttcaaggaaaagaacggagatgctgcctttaaagcaatgaaagcattgggagagacatttctgaccaagatcaacgaggtgactctgtaagcttttctttgaagtttcagatatgccatctaattccttttacctgtttaaatattttcgccttctttcatttattttcgggagtttttcttagtttaatttgttaccaacgtgctgcaaaataattgttaaatttaatattgctatccaattcgattattgattacgataacatttatagaattgtttatacctaaatgtacaaattataaacacattttgatgcattgactttgatcggaacgaaattttactagtactatacatttttgcatgaattctagttggtttataaattcccttaaaattatattaagattatacagctttttacacttttcaacttgcaataaattttaattttgt

SEQ ID NO: 41517 - protein, 346 aa, DROSOPHILA
MPIKSKANEVPKEEAGVKKETPKVARKATKKDTPKELKDKENAGDDNTPKQTKGRPGRPAAKRKNLDTPDVTEKLAMEEENPPKRRSSRLTRSTRSMAEDGSPSPEKEKPEKLPFIKYKGAIKYFTESQDIAASADDVLQWVEKQKDEVVPMAFDMEWPFSFQTGPGKSAVIQICVDEKCCYIYQLTNVKKLPAALVALINHPKVRLHGVNIKNDFRKLARDFPEVTAEPLIEKCVDLGLWCNEVCETGGRWSLERLTNFIAKKAMDKSKKVRMSKWHVIPLDENQLMYAAIDVYIGQVIYRELERREKVKIKNEEEFKEKNGDAAFKAMKALGETFLTKINEVTL

SEQ ID NO: 41518 - DNA, 6225 bp, DROSOPHILA
tgcctgcttgacttcccctcaaccgccagcagtaaagatgaaaaaggccatcattctggtgcccactgtgctggaagatctgaagcgattgcaggacacggagaaaaaggaaaggattccagaggcaccaccagctcctgtacatcctgtaaggtcattgcaatctcgtgctaccgggacaacgcagtcaacatctcaattggtacccatgaaattttctcctgcatcgaagcttattataccagtctcttcaaggatatctgaagtaccagaacctcccaagacgcccgagaaaccagttcctaccataacaagcaaatcaactcctccattggatggcacccagaaaatcctaaacaaactcagagcatgcggtgtggaggtgaagcgagcaagtacccaattgaatgccacgactgagctaaatccaaccaaaaatcaagagaccttggacatcatgagaaaactgcaatccaagggcatcagatgcaccaaagtaagaaaatcgtagttgtattcgccgtagtgtaaggatggtgccattaaatgtgcctctggaggcgaggatttagcaatataactttatttaatttaaatggagattaataaattcccggatagcgtttataactttaatagcaagcgagtctctttattatcaaatcgcttaattttaaatgttttattttggtttttttgctcaagcagtgtgaccttttgatgcgacaacgttatcgatttaatatatcgactatacactagtggtggctatttagcttataaatgtattgaactatattaaataattaaaactatatatcactcaaacaatgccgtttaaatactttgaagacggtaatcacatgttccatacaaaatgttaacagtcctagctttttttatgttgtccatttatgtagctgaaaagttggcatcactgtgtaagaagaagaagcagcttgttgatttttggtgccgcacgcgtttcggtcgaaagtaattggaaatatttgtgcttgcgcccggcgttatatatattttgtagtactcgaaacactgccgaatccaaatccaaaattcgcgtgtgcacacccacctgccgaggcggtaccaattaaaaggtaggtcagctgacgacgatggcagccaattcgggcttacataatttggggacagaatatttattttgccaccttagatttggcattcaatgcagtgaaaatgacatcattttgaaatttttagaaccgcttgtgttttgtttggtgaattttataatatttgcaatatttcggctgcagttgcatcattgacagcgaaccttaagtttagttctctgtaaaggtcaccaagcccagacttaaaaaacagatgttttttaacaatcttggtacgtcccactactaaagcacttataatttaatatacatttaatccgccagtaaaacacctataaatttgaattagaattcaattttattctcatttcaagtttcaatattatttctatttcaaatacttgtagttcatttccttacttaactctcgggcaccgaacaaaactgcattgcattttccttttaataatccactacatttagctttgagagtttcaggcttaattatctaattgaattcgttacatttcgacacttgtttttattcagagtttcattttcgtggtatttttaggctaaactacttagtgcatgtgcccatttgaattaaattagtgagtctacctgggtttattagtttagggttttaacattaacttaaagctgcttattgtttgcatatcattcaatccttttctttttagctctctcgaatcacaaaacatttacatagttaaagtattaacagtgagaaacatatacggagacaatagattagaatgtaatcaacatttatacgaaaatagttggtgtttatatcctgtgggtgtagagacttatcgatagtggtgcacatttaaatgcggcgttcaacgttttacaattacttttcattattcatttaatataaacaaatctgatatggggctggctgaagaagtctcctctggccccctagttgctcactattccagagagcgcctacgcagcgtcttgcgcactccgccgaaagcagcactgctgcgatccaggagctcgttggacaacctggccaacaggggcaactcccgcatggaaacgtttacggagggcaagggcgccagttgctgttgcagcttcttaatgggcgtgggcggtgcaaggtgattcagctggtgatggggtgtgactggcaagctggctgtggtggcgcaagaggtgaccttcacctcgaccacatcgcagtggcgtttcaaggcctcggcgcccaatgaatcgggtcgctgttcggtggacttcaagcggttcgtttgctgccttttggctgtttctttcagcatcatcaagtgatccagcttgtccaccgtggccttcagttcatgctcccacacatcgttctgctgctgtccatctccgccctcgatgggacgcaccgccaggatcttgaccttctgtcgcagcgcctccaaatcgcgttcatccactacacctctgagctccccggctcccgtttcatcgtagtcgcaggcatcttcctcatcttcagtttcggcagctgcttggggagtttttgcgcccaaagacatctggctgcccgctatggagggatagtcgcacttctcaagctccagctggaaatcgggcagtgatggcaaggcactggaagtcggagagtttaactctgctcccacacccggctcgcggggtcctggtggagtgggaaaatctcccctctgcctatgtatatcctcactgatcctctccagattgcgtaaggccgtggagtaggtgctcttagcaccggccacctgctgctgcagctcctgaatgcggtttttttgtgtctgcagctgatcctgacacacctgcttctcttcgaagtacgggcgtgacttgttgatgctacgacgaaaacgatcctcaagctgttgcagcttttgctcggcggcgttaaaaagtttggtgagcctctggtgctcagcatgacagtcggctttctgcgtttcggcatccatcaccttctgggtagcatggttaagcatctcctgccaggcattgtcgaactgccattcgtgcgagttggacataaaacgctgctcagcaagcgccaccgtctccttggctgcggcatggatttctaaagcaaaaattaagacttcttaactctttttttttcaatatttattttttttctactaaccattagctcgctggaacttaaccgctgctttttggcattcgatttgtgcctcgcgtgccttgtccaatgcctcgtagtagggtctagccttctctatgcagttgcccaactttttggaggaaactttaaggcggcgtgtagattcatttaacaggatgcgaaaggtggaattagcctcctaagcgaaatatgaaggaattttattaggcttttatatcattaattaaatgactatggcacttgcctctagctcgatttctagcttattaatctcatcggttgcactattgagattctccagttcaatctgaagaagaagaaggaagaatttgtaattagaataaagatttaatattaattttaaacaaacaatcatttcagtatttgcttaacgcctgcccaccgaagttagcaagatgcctaagtcgggtcgcgacggaggagcatccaaggactccaaatacgatctaagcaaaatctcagctcgcgtggatcgcgtgaacgtcagcggattgctgcgcacccacaacgactatgtgatgagggcggcagatggcctgtttaaggccagtaacttccaggatctaatgctggaggccatgtccaccaaatcatatctgcacgagctaggcatcttcaaggatgtgagcgtgcacatcgatgttagccgtggagcggatgcctcgccacagggatacgaggttaccttcaagggcaacgaaatgtcgcgcatgatgggttcggcgggcaccgagattggccagaacgagggctccctgcgaacggagttgactatccccaatattctgggacgtggcgagaacatctcactgcagggcagctatagcagcaccagggccaatgatctacaactgaagttctggaaacccttcttccacacacgcttcaaggaaaatcggcctgagtaagaatctgttttctatattgatgtaaatttacaattaacagttgctcttcttttacagaatgtctttcagcatttttaggcaaaccgatcggtttgacataagttcatttcaaaccaccaacataggctatttggtggacttctcggcgcatacgatggttggagtggatgtaagtttaaaaatccttcaaagtaaacttaacttcttagccatttatttcaattttcagttgacgcactcgctgcagtatgagaacgccatcagagacgtgggattgctaaacaaatcagtgcccttcgccatacgcgatcattgtggccccaaattggcctctttgctgcgctactccgtggtctacgacaatcgggatggaaacgtattccccacacgcggtatttaccttaaatcagttaacgaatactgcggattgggcggtaatgtcgcctacaccagcagcactgcccacggagagttgaatgtgccactgtttgccggtttggtggcccagttttgcgctcgcgttggcgtcgttaaagagactaaaaataccacccagctgcctattagctcgctattttactgtggtggtccattgacactgagaggatttaaatttggaggagctggtccagtagttgaaagcacgccaattggagcacagtctttctggtgcacgggcgctcacctgtgggcaccgctacccttcgccggagtcttcaaaaacctggccagccactttagaatgcatttcttctacaacattggcaacaacaatagtttcagcacaggttagtttatgcaccctaaagcaatctatccactggtctttaaatatatatctttgcagaaaacatgcgtagtgcatttggaatgggtctggcggttaagctggccgaaagagcccgaatcgaactcaactattgtgtgccagtgcgtcatcaggatacagatagaatcctgaatggtttccagtttggcattggctatgaattcgtttagatgcccttttccccgcaaccatcaactagatgtagcaccagcaaaagccatgagagtcacaacagcccagttagaaacaaatccttattcacaacatatggctgccctgttcgtagtttcgagcgtttacagattctgtttcgtatttttgtcaatgcattttattttcctctgaaaatgtattcgtagtccagcgatcatttaagtagttcctaaggcgtgtacatacgtaaaacgaaaggttaaacaaaatataaaaaaaattttaaacgaatgagaggtttttatgaagtacaaattgggcacggtatatattcgatttattttgcaatgtattttgttgaatatgacaaaaacaaaggccaattaattcggatattaaaatcagtctgataatttaacatctacaagttgaataagatttttatttacccgttttataggctataaataatgatacagacattaaagttaaatcttaagtgtttcttaaccctgaaaatgcaattcgacgatcttatctaatgttgatttattagctacatatttgtgcaccaacttaaaaatgcaaaaatgcatctgtttaatgaaatttaagtccatttttccttcggaaatgtcaggttggtcgtttgcggatatcccatggacacggtggacaggcgatggcatggagttcatggatgggtgagccgcatgcggttacagtgttttgtttgtgcttttgggtttcttttttccttttttggaatttaagttcgggacccacggcagattgtggtcgagaaactggttttaattataaatgctgttcgttgtgtttgcccctttttttttatggcggcttttattaacgctgtcctagtttgatttttatcgtgtccgctgctgctaaacatttctccacatcccggacatgaatatgatgtgatgatgagggcggggaatgtttttttttttttttttttttttttggtaagggcacgctcgagttgcctct

SEQ ID NO: 41519 - DNA, 1548 bp, DROSOPHILA
ttggaaatatttgtgcttgcgcccggcgttatatatattttgtagtactcgaaacactgccgaatccaaatccaaaattcgcgtgtgcacacccacctgccgaggcggtaccaattaaaagtatttgcttaacgcctgcccaccgaagttagcaagatgcctaagtcgggtcgcgacggaggagcatccaaggactccaaatacgatctaagcaaaatctcagctcgcgtggatcgcgtgaacgtcagcggattgctgcgcacccacaacgactatgtgatgagggcggcagatggcctgtttaaggccagtaacttccaggatctaatgctggaggccatgtccaccaaatcatatctgcacgagctaggcatcttcaaggatgtgagcgtgcacatcgatgttagccgtggagcggatgcctcgccacagggatacgaggttaccttcaagggcaacgaaatgtcgcgcatgatgggttcggcgggcaccgagattggccagaacgagggctccctgcgaacggagttgactatccccaatattctgggacgtggcgagaacatctcactgcagggcagctatagcagcaccagggccaatgatctacaactgaagttctggaaacccttcttccacacacgcttcaaggaaaatcggcctgaaatgtctttcagcatttttaggcaaaccgatcggtttgacataagttcatttcaaaccaccaacataggctatttggtggacttctcggcgcatacgatggttggagtggatgtaagtttaaaaatccttcaaagtaaacttaacttcttagccatttatttcaattttcagttgacgcactcgctgcagtatgagaacgccatcagagacgtgggattgctaaacaaatcagtgcccttcgccatacgcgatcattgtggccccaaattggcctctttgctgcgctactccgtggtctacgacaatcgggatggaaacgtattccccacacgcggtatttaccttaaatcagttaacgaatactgcggattgggcggtaatgtcgcctacaccagcagcactgcccacggagagttgaatgtgccactgtttgccggtttggtggcccagttttgcgctcgcgttggcgtcgttaaagagactaaaaataccacccagctgcctattagctcgctattttactgtggtggtccattgacactgagaggatttaaatttggaggagctggtccagtagttgaaagcacgccaattggagcacagtctttctggtgcacgggcgctcacctgtgggcaccgctacccttcgccggagtcttcaaaaacctggccagccactttagaatgcatttcttctacaacattggcaacaacaatagtttcagcacagaaaacatgcgtagtgcatttggaatgggtctggcggttaagctggccgaaagagcccgaatcgaactcaactattgtgtgccagtgcgtcatcaggatacagatagaatcctgaatggtttccagtttggcattggctatgaattcgtttag

SEQ ID NO: 41520 - protein, 463 aa, DROSOPHILA
MPKSGRDGGASKDSKYDLSKISARVDRVNVSGLLRTHNDYVMRAADGLFKASNFQDLMLEAMSTKSYLHELGIFKDVSVHIDVSRGADASPQGYEVTFKGNEMSRMMGSAGTEIGQNEGSLRTELTIPNILGRGENISLQGSYSSTRANDLQLKFWKPFFHTRFKENRPEMSFSIFRQTDRFDISSFQTTNIGYLVDFSAHTMVGVDVSLKILQSKLNFLAIYFNFQLTHSLQYENAIRDVGLLNKSVPFAIRDHCGPKLASLLRYSVVYDNRDGNVFPTRGIYLKSVNEYCGLGGNVAYTSSTAHGELNVPLFAGLVAQFCARVGVVKETKNTTQLPISSLFYCGGPLTLRGFKFGGAGPVVESTPIGAQSFWCTGAHLWAPLPFAGVFKNLASHFRMHFFYNIGNNNSFSTENMRSAFGMGLAVKLAERARIELNYCVPVRHQDTDRILNGFQFGIGYEFV

SEQ ID NO: 41521 - DNA, 4694 bp, DROSOPHILA
tacaatatattactatctcctaaattagttgccagcgtaaaaaggtagttacccaatcaaaaaaatagccatacgaattgggaaaacattttataaagacaaatagccggcattaaataaaagggttgtctgcaaattggccacatgaaaagcctgtggtcaatacgtctttatataaaggtatattcaataaaaaaaaggcagaaaaagacaaactgttcgtatgaactacttcaaaggcatatcaataggtcatcatcttgacaatgggccaactcacatttattttctggttcctttcctcaggtgggcgtaaccttttgacatggcttttgggcgtcaccaggggcaacaattaaagaggaaatctcataaatatctgctggtatatcaggaaattgacttggggcggcagcatttgtgcccaaaaaaaggtattcataaatgcacgagaacccaaaaataaaccgtcacttgattaaagttgcatttgggtcgaaggggagacagaagtggtgtgtgtggaaatcgccgtcaggtgtgacaggtgacaatttaataagaactcgactcgcgttcatatggatttctgacaacagctgcgacatcaatcagtcaaaaaattcggataaaaatatatatatccgtttcctgattcttgaatgtttgaaatccactcttgcagatttcgcttaagtttaaatagtttaggatattcaatttccccgtctaaaaatcagagctaaagctaaagtaaccctattatatattcatcttttcctatttctatatagattttgttcgaatttttataggtaaatattatgtgtacagataactttcctaaggtttcttaactaaaatgaaattgtaataaaaagaagtactcacacagtgtaaactgctccagttcctgttccgtttccgcttccggtggccttgccatttccgcttgcagtcctgccgccgactcctgatggccgtcgggaaggggctgccactatgtgctggtcgaatcgcccagcggcgaggctatgttgctgttgctattgctatccgaggcggagaggggtcggcagatgcccagccgcgtgagtccaggcggcatggccttcagaatggacaccgcctcgtccagctcgaggccctgaagcaggcgatcgccgacgctcataaggcgatcgcccggataaatctcgttggttgcctccgcagcaccaccgcgtatcaggccgcgaatgacgatgacactgccctcggagtccagcggatcctggtagtctagaatggagaagccgaagccctgttccgttttctctatatcgacggcggtcacttcgcagctccacagagccaagccggaaacgttttctagtgacttggagcgagctcctccacctgcagtgccccccgatcctccagccgctgctcccgcatccgttaaagtcgccgtgctggacgtgtagagcgagctctccgactgggccttgctcagcagattctggagactctggtggccaccgggtaagaggctacgagtctcaaaggcctccggattttgcgaggtatttatgaccgacggaacgtgagtgccgcgggcgcagaccaacttaaccctggcgggcagttccttgaggatcttaaccacctcgatgtgtcgcaatccctggagcttgtgctcgttcacctggaggagctcatctcccggccgcaagatgccctgtcgccccaccggcccgtcggccagtatcgagcgtatatagtgatgcggacgcttctcaatgccgcactccacatccacagtgccttcaaggctgatccctagacctgaaagtttatttatttcggcaactaaaatttcactgtcgggaaactcacttttccaggccacgcgcagcgaggcggccgtcgggctggccgctttcacaggtgcctcattcgtgggcgttggcatctggccaggatcgagatcaggatcgggatcggtatccgttttcgtatcccccaggtctttgaccctctccgtctccggctttgaccctttgcgggcctgtgccgtttccgtttccggctcagcacactgctcatcggtgtcattgccactgtcatcggccaggattaggctgcgcccattcgttagaggcactatcggactgatcctgggcacctgatccttagtgaggcctccactgtgatcactgcggtccagcacgtgcgacatattcgattcgactgtgtcccgggatgggagctcaatgaactcatcctcggctcccgaaatgccaacatactctgcatccacggcctcatcgccttcggtggctatggaatcggcatccagtgacttgggtggcagccaacttaacgtggctatcgacggggacccaggcatggatagctgcgactcctggtcctggtctttatcttgactcctatctaggccggagggagcagatgttcctttgatttcggtaagggccacttgcaagtgctcatactttctgcctctgaggaatcgttccagagtcagatgaaccactatgtcggtgttcctgagcagttccaccgcctgatggttggttacgccggatagggatctgccatccacggctacaatgcgatcattgatctggatttgaccacttgtctctgctgcacttccctcaattatgctcttcacgaatatccccgatagatcctcctcctcgcatacatatccggccacggtgatacccaggccgtagacattcttgtgcagctccaccacgtacgtttccgtttccggggagtccatgtaggagtcgggggaaccggaacccgacgccgaagcggatccgccatcttcgttggccaacagcttgcgtttgctgtcggctatcacagtctcaatgtgccggttctgatcctgaacgcatcgccattgggtctccaggggcagcatctgcagggcgggacgtggcggcggcgatagtatcgagaagggcactatatccagatccagacgcgggcaggggcgttggccagcattggagtccgtgaccatcgagtggcctccaccacccggaattggaggcagtgggaagtcagccagatcgccggccagctcggatagttgttgaagctgaagcaccgccgcacttggttgcggttccacggcagatagctccgtaccctcggcgggaccgccgcgcaccagaccaaccaagctggccacatccaagacgccgccgccgccgacatcgccgtcgctgccggagcccgctgctgctgccgctgctgctgcggctgctacggcagcagttgcaaaactcggattctggaagagatgacgcgacagttcttccgggtcggagaggagcttagttggtataatcggcgcctgacaggccagcgtttggtaatcgatggccgtcggctccaccggccgcgccactatcagacgcacctgagctccggtctgacgaagaactgttgccacctgctccgagctgaagccccgcagattgacctcgccgatctgcagcagatgatcgcccagctgcagtcggccatcccgctcggccacgcccccgggcgttagggccttgatcaccacaccggtactgcgaccgcccacgaggatgaagcccaaaccgttgccatcgttgatcagatcgatgacctccacctgcgaccattcggtgctgagaaccatcttttcccccagctaattctgctgccgtcggtcgccctttcctttttgtagttttattaaatattgctgacgatagttgttcttgttgttgttgctgttgttcctgttgtgtgttttccgttcgctttgcccttgctaacatgtcgcatttatgattgtgtccaaaatttagcggtggtgctgttggcaattgttcgttgttgctgctccgttggctcctccttctcgccgtcaaatggaacgagcgtgatgaatattatgcttgccggagcagctgattttgctgttattgctgttattgctatcgcatcgagagtcattcaaccgacaattatggcccgggaactgtgctcctggcaccgccagctccagccgcatcatccacgaccgcaacagcacagcgcacctgtaattatgcagcacacgcacgcacttcgcatcaaatagggtggagtacgcggcgtatacgcaatacgcggaataggtggcgtatacgtaacgcaatgcagagtgaaaatgtgtgtatgtgtgtgtttggaatacgcggcgtatacgcaatgcgaacggggacaaaaagaagagacagaggcgttgcacgggcgtgaagcgagaatttgaatagctgccctgccaggcataccattcgacgttccttgccaatactctcgtttgaggtatataaataaggtcttaagccaaccacattctaatcaatttacactcggataatgctgctgataaaagcaacataaaaatattttcaatgaagcagcgggtttttgtatagcacaaaagggatattttatagatgcaatatatctgatgcattgtttagatctgtgttgtgacaatgttgtaatgtataaaaatgtagatattaaatattaaaattaaactcaaatttattgtgagacatctttaatatcaatttaaattaaataaattttgtcaagtttaaagttactgtgtcatgttaaaacatattaagaatttttcagaa

SEQ ID NO: 41522 - DNA, 2568 bp, DROSOPHILA
atggttctcagcaccgaatggtcgcaggtggaggtcatcgatctgatcaacgatggcaacggtttgggcttcatcctcgtgggcggtcgcagtaccggtgtgatcggcgaggtcaatctgcggggcttcagctcggagcaggtggcaacagttcttcgtcagaccggagctcaggtgcgtctgatagtggcgcggccggtggagccgacggccatcgattaccaaacgctggcctgtcaggcgccgattataccaactaagctcctctccgacccggaagaactgtcgcgtcatctcttccagaatccgagttttgcaactgctgccgtagcagccgcagcagcagcggcagcagcagcgggctccggcagcgacggcgatgtcggcggcggcggcgtcttggatgtggccagcttggttggtctggtgcgcggcggtcccgccgagggtacggagctatctgccgtggaaccgcaaccaagtgcggcggtgcttcagcttcaacaactatccgagctggccggcgatctggctgacttcccactgcctccaattccgggtggtggaggccactcgatggtcacggactccaatgctggccaacgcccctgcccgcgtctggatctggatatagtgcccttctcgatactatcgccgccgccacgtcccgccctgcagatgctgcccctggagacccaatggcgatgcgttcaggatcagaaccggcacattgagactgtgatagccgacagcaaacgcaagctgttggccaacgaagatggcggatccgcttcggcgtcgggttccggttcccccgactcctacatggactccccggaaacggaaacgtacgtggtggagctgcacaagaatgtctacggcctgggtatcaccgtggccggatatgtatgcgaggaggaggatctatcggggatattcgtgaagagcataattgagggaagtgcagcagagacaagtggtcaaatccagatcaatgatcgcattgtagccgtggatggcagatccctatccggcgtaaccaaccatcaggcggtggaactgctcaggaacaccgacatagtggttcatctgactctggaacgattcctcagaggcagaaagtatgagcacttgcaagtggcccttaccgaaatcaaaggaacatctgctccctccggcctagataggagtcaagataaagaccaggaccaggagtcgcagctatccatgcctgggtccccgtcgatagccacgttaagttggctgccacccaagtcactggatgccgattccatagccaccgaaggcgatgaggccgtggatgcagagtatgttggcatttcgggagccgaggatgagttcattgagctcccatcccgggacacagtcgaatcgaatatgtcgcacgtgctggaccgcagtgatcacagtggaggcctcactaaggatcaggtgcccaggatcagtccgatagtgcctctaacgaatgggcgcagcctaatcctggccgatgacagtggcaatgacaccgatgagcagtgtgctgagccggaaacggaaacggcacaggcccgcaaagggtcaaagccggagacggagagggtcaaagacctgggggatacgaaaacggataccgatcccgatcctgatctcgatcctggccagatgccaacgcccacgaatgaggcacctgtgaaagcggccagcccgacggccgcctcgctgcgcgtggcctggaaaagtctagggatcagccttgaaggcactgtggatgtggagtgcggcattgagaagcgtccgcatcactatatacgctcgatactggccgacgggccggtggggcgacagggcatcttgcggccgggagatgagctcctccaggtgaacgagcacaagctccagggattgcgacacatcgaggtggttaagatcctcaaggaactgcccgccagggttaagttggtctgcgcccgcggcactcacgttccgtcggtcataaatacctcgcaaaatccggaggcctttgagactcgtagcctcttacccggtggccaccagagtctccagaatctgctgagcaaggcccagtcggagagctcgctctacacgtccagcacggcgactttaacggatgcgggagcagcggctggaggatcggggggcactgcaggtggaggagctcgctccaagtcactagaaaacgtttccggcttggctctgtggagctgcgaagtgaccgccgtcgatatagagaaaacggaacagggcttcggcttctccattctagactaccaggatccgctggactccgagggcagtgtcatcgtcattcgcggcctgatacgcggtggtgctgcggaggcaaccaacgagatttatccgggcgatcgccttatgagcgtcggcgatcgcctgcttcagggcctcgagctggacgaggcggtgtccattctgaaggccatgccgcctggactcacgcggctgggcatctgccgacccctctccgcctcggatagcaatagcaacagcaacatagcctcgccgctgggcgattcgaccagcacatag

SEQ ID NO: 41523 - protein, 855 aa, DROSOPHILA
MVLSTEWSQVEVIDLINDGNGLGFILVGGRSTGVIGEVNLRGFSSEQVATVLRQTGAQVRLIVARPVEPTAIDYQTLACQAPIIPTKLLSDPEELSRHLFQNPSFATAAVAAAAAAAAAAGSGSDGDVGGGGVLDVASLVGLVRGGPAEGTELSAVEPQPSAAVLQLQQLSELAGDLADFPLPPIPGGGGHSMVTDSNAGQRPCPRLDLDIVPFSILSPPPRPALQMLPLETQWRCVQDQNRHIETVIADSKRKLLANEDGGSASASGSGSPDSYMDSPETETYVVELHKNVYGLGITVAGYVCEEEDLSGIFVKSIIEGSAAETSGQIQINDRIVAVDGRSLSGVTNHQAVELLRNTDIVVHLTLERFLRGRKYEHLQVALTEIKGTSAPSGLDRSQDKDQDQESQLSMPGSPSIATLSWLPPKSLDADSIATEGDEAVDAEYVGISGAEDEFIELPSRDTVESNMSHVLDRSDHSGGLTKDQVPRISPIVPLTNGRSLILADDSGNDTDEQCAEPETETAQARKGSKPETERVKDLGDTKTDTDPDPDLDPGQMPTPTNEAPVKAASPTAASLRVAWKSLGISLEGTVDVECGIEKRPHHYIRSILADGPVGRQGILRPGDELLQVNEHKLQGLRHIEVVKILKELPARVKLVCARGTHVPSVINTSQNPEAFETRSLLPGGHQSLQNLLSKAQSESSLYTSSTATLTDAGAAAGGSGGTAGGGARSKSLENVSGLALWSCEVTAVDIEKTEQGFGFSILDYQDPLDSEGSVIVIRGLIRGGAAEATNEIYPGDRLMSVGDRLLQGLELDEAVSILKAMPPGLTRLGICRPLSASDSNSNSNIASPLGDSTST

SEQ ID NO: 41524 - DNA, 15424 bp, DROSOPHILA
cgggcctactgatgccgcaatgccaatggcctgccctataaaaattatgcgtatcgcgtcccgttccgccccgaaatccccatttacctacaaaacatgccgagtactctaccttccgtctagggtcttacaaaattggtgcaatcttatcgagtgtctttgtgtgattttcttttttgtcgttttgggtttgtttcaataaatgcagaatttcgactctgcgccatcgaacgtgtccttctgcttcctttcgagtgccccacttcccatctcaactggctgcgggcttattgttgtctttgtgcgcgggatcgggaggatatggctcttctgtcatccgcaagttggccaatttcaattacatgttcctgcactgggcgcaaaccgagcgcgcctttgtattgtcacgcacaaaatcatgcacattgaactttccatcatcgccgtgctcgtagccgcgactctttagttgcctgcaaatgagaatgaagatattaaatgtattgatcggggaaatttcgaagaattccatagtggtttcacgttctagtaatatacgtatctcctaaaattaattctgtattaatcaattctgtactaagcctaaaacagagtatattatggatacaagttgtaagaaacctatagtaatgcctatagaaacctcatagtaaaagctttgctttaaatctgaataccttcattttcgaagaaatgaaaaacgaaaactgaacttttcaactattccaagcattatcttgtgaatttgatcaaatttacatagctaagatacttaatatatttttaaatcaatatgtctttttcccaattggaaataaatcgaatttaggatggcgttgcaaggagaactcacctggccaccgctgtgaaggacagctccacattgagtcccgtcttggccgaggtctccatgaagggcacgttgtgctcccgccccaaacgctccccatcctcccgcttcacctgccgctcgctgccgctgcagtcggccttgttgcctgcggattgaagcgaaaagttgattcgattcgaagctcgtaagttgattaagttcaatcaaggccctttaacccgatctctcacctattaaaacgatgaccacgtcctcctgcgcgtactcccggatctcgcccagccaggcgcgaatgttgtcataggtggtcttgttggtcacgtcgtacagcagcagtagagcttcggttgaaaaatgcaattaggttcagtagcaaaggtaggataaagtgcatccgaaacaaggatagttattcgataaaaaataaagtaattgaaatttaaaatatacattcaaacttcaataaatatgtggtgtattagatataacatcaaactaatacatttttttaaatatgtgcaaaatgatcacatttccgtgtgttacgaaatcactccatttctgttttctttatatgcacgaggaaataacggaaaaactggatgttctttgaataaaaattacccctaacaatttgaaggaatttcattgacctggagaatttcggttttctaaacagatcgagcattgggttttagtactgcatttttccacaaatgcttgaagattaaatattgaataataaaaatatataataatatataatactcgtgggtagctcaccgtgcgcgtcgcgataataggcgtgggtaacgctccggaatcgctcctgaccagctgtgtcccagatttgcagcttgacgcgcgttccatcgacgaccaccactttgttctgttggtatttttataattgaaggatatttaatttattattttatcaatgccaaacaggaaaccgggccgtggaaatgcaattgatatgtaaaatgcaattaatttacgaaatgtacatgcacaaaaaccgtgcctttaaactacaaatagaatgggagcaaaatgcttgcagacgagggggataccgttgcgtatacttaatacatgtaacttatgcgcaacgtggtctctacccaaatttcacatgcacacttcttaaaagtaatggagtacgaggtcggggggaatattcataagtacgggcatccgttgaattgatgaaagccaaaaggtcgaaggatccgacagagtgataagccacctcctcttccgtttttcttttacccgaataatgaacagcagacgttgcgggttcgtccggctattggcatcacgatggccccatgttgcttctccactaactacttagacagtcagtcaataccataaaagtgtacgggccagggaatacataaaaaaaacacacacacaaaaaatacacgacacacagcaaaagattcaagtacggggtgtcatcactttaatgtgactgtgcggcatattgccttgatttgatttgtatttatgagaagaaaacacgactaaaaagatgagccaagaatttctggcttatcatagactgggctcatgaagcgccaccacttcgttggtttcatttcaaaaggttttttttattttaatgatagtaaagaaatatgtggagttatttctttctttgtcataactaaaatttagttgtaatgattagaatctcaggtaaacttaaaatgcatccatttaattgttgtatatcatctacatccttaccaaataccttatattgaaatcgtattttctttcgtacgtataggaaacgtatacttagttacatataaagtaaaaaaaagtatatataatttcaattgaaatgaaaataaataaatgaatgcgtgcacatatcatacaacacacaaatggataacttttcgtacatctagggagtttaaacatttaattatccataaattggcaagcagtcatacacgatattcgtttactttagactttggccaagaatcagccaagttgaaaaatcaacatgaacaactccccagcgaattaaatttcattccccagttcattccccaatgccccacttggaagccggcgaagtgggtgtgagtgactctatggggatgaggtgcatccccgaggccacggttagacaatggcagagtcgacacatttaatatagaaaacatggcaacaatttaaagtcaaggaaacgccaaacgcatggggcacttgtaaaattccccgggacagagacaaatagtagtggatggagaaagagagagagagtgtgagagataggtaacacgggtagtttaataaatttatgagccatgaatcacatagaaaggaggatggatatatgggaggttatagactgaggcaaaggaaatgcctccggccaggataacaaagtccctaaatgttaaaccgcgcacaataataagcacactgaaagcaacaacaacaactggttaaatacaccgaacaagaacaaacggcaagcacacacacagacacactgacaaagacacggataagacatcaacaagtccttttcaagttcacatgctttttaataaacagtcccccaaggatttttatctctatcaacaaagtaggaggttgggtttgaacaagaactaaacgtaaagaggacaaccgcaggcgactacaaaatcatgaaaaccacagcccatagacgggtcagcgaaagaggcagaaacaagcggttataaggcgacagaaacaagcggggtggaaagatacagacagaggtgaaaatcgcatacagaattttgacaactgttgagaggactcagaaaaagggagtcacacagggggagtgtatcacacggaaagaagtttttatgttctattataaattaatatggataatttaaatgtagattttaaaaaatgttcgttatatttaacatatttaaaaaactgttagacaaaagagtataatgtggctaaaagcagcgactattacccttagctgatggaagtgtaaaagtgatggcgataatcaaccagtaaagcgagtgctgtagcaagcagattttgcgtcggtagaccccgcatgccaaatttcaattttctagctttatacttcccaagtacggaaggacctacgaacggacggacgattctacctcttaaattttacatttagtagttaacacaaaatattttacaattttcagaggttaattaactgattaactgatttatttattacctcttctgtattaaatgcaaataattttccttgtgtacccaatgatggacagttcaaatagagagataaatgatgtagatttcgtagacagacagagtcagtgatgtgtataaactaagctgagaggaggagaaaacacttatgtggaaagaacaacaatgataggaacactatccacaacaacatcaacaataacgacaaaaacattaacaacaagaaggataatgacattgacaacaaaccatacagtatacagaaagagggaactgaaccgacagacacacagagatttgaacagaatggaaaagaacaaacggcgggaatgaagcgcttaccctaaaatcaatgccaactgtgctgaggaaatagctcggcacatagcgaccatcgcggaaacggatcaaaagtgaggtcttgcccactcccgaatcgcccagcattatgacctatttttcggatgccaagggggcgccggggaaagccaagaaaaaccaaagaaaaccatgtgatacgtgaattgttaagtacattgtagtggttcgattttcacataataatttatgccgcaacctaatgtttccagctaaatatttaatgaactgcttatgaattttacatgacagtcgggcgggagtgttgaatgctctcagtttcgggatatccttaccgtaaggcacttccccctttcagtttacctcctaaaatgcttttaaaggctactgctgatagccgctgttggctcgactaaaatacgcaaagttggtttggttatgcaaacatgcaattgctgattttccagggaatttctcagctagcagctggtcacccagcacaaatgttacataaaaacggtgagcagacctactcaaataaatccctgtatttgcaataataaaaataatataaaataaacaaataaataaattaatattctaggttcagacgtttttataaagtgtttctctttgccttaataccagctctattcatgggcggaataaatataaaaataattacccatctatggctttaagtgcctttaagcgggattcatgcaaattcgactagtcccctcttcagcagtcaacatttaacgagcgagtcaagtaaatggaattttatgcagctactgttttatatatttttcattttcacgactgtgttggcatttggacgacaggaggaagtcgccgcccgaagtgctgtcataattccaccgaattattctaatcaacagcagctgcagttctacggaaccaaatgtcgcaagaaactttgcttttgctctccaactttctactcgtccttgttgtctgcgcatttaatttcctttgtcactctgcactttattgaattttatgacttccttttcgcctgcttatgtaaatcacattgtaaaacaggccaaaagccgatcaggggcgcgaacgaatataagcctgttcgtaaaagtcggaggcagccaacaaaaaggtatactatataaataaaattgcggcctcacgaccaagttactgggggaggtaactcgtcaagttgcagataaatatacccataataaagcacatatattttgttttttcctcagaacgcctttgtcgccgctttttggaaaatgcaaattggcagttgacgagttgaagcaacaagggggtttttcattgtgtcactttttttgaagtgaacgggggagagtatccttaggaaacgagtaaaatgtgtaaagtattattgttggcaaataaataaatatttcaatttaaaacttatatggcagaaaaaacatacagctcagttttatgaaaaattgactgaactgccttcttcgtaacatttttaaaaaatttactaatagttttcgtagctagtgccctaacaacttttgcactcattttatctcacttacttcccaatctatcatactattcattcgatattttcctaattaatttcccgttttcccagtattattcaccttgcccatgatatcgaattcgtcttcctcctccggagccttgctcgatgaaatcatgcggatgagtgcccgtccagcgttcttgcagagcgttgcgctggctccctcgcttcccggtcccggagcaactggagccggtgcaacaggtggcctggccacggcagttgccgatactcctcctccggaatccagaagtggctgttgctccgtcgcgctggccagccgtacgctattcaatcgggccatgaaaccattgccagatggcagatgatgtgattgcgactgcgattgcgatgtctgtggagcatgatcccggaatatggaggctgaggtcatgtattccggcagcagaggctgctgggagatggactgctggcgctggtggacaatcacgctgggtcgcctcttcggatagccatcgtcgtccgaatcgtccgaggcaatgccattgatcttgtccagcgttttgggtggcagctggccgggtgtgatgtgctgccaggtgggcttgaccagggactcccggcgagtgggggatccactggccaacggcgttggggtggccaccgaaatggagggcttgcgggagcccgacggactagcgatggaatcactccgatatcttgtctgctgccgacgcatcttcttgaaacctctttacttcctgctgattggcctgattctatatttaacacacgcacataaatcaataatctcgactcggatgtcggaagtgtcttcattattgatgggctgaaaacagaaaacaccaacccccaggaagaagtaacccaaaactgaagtttgtttaggtcatagatacacactcacacacacgcacactttcatattcacactcagtaggttccgtcaaagtcatttaaactcattaaaagcacaaacaagatgggaactttcattatcgtgcgttcgtaaatatgtacgggtttgttcataaaatacatgaatatttcgacataaaacaataaaccaccagatgcaaattgaatgtaatttccacgctttctcctttttggcgaaatgaaatgaaaaccgaaacccacaaatgctccggggccacaaaacaacaactgtcgttgacaacagtggtgaaagtgggcggtgggtgggtggatacgaatggaacagtgggtggtgaacgatgtttggttgcggtctctgtcgctaaatcaacagttggcaagcaaaccgcaacgccgccaaaagcgaaagcaggagcaaaatcagcggaccgaagccgtggctaactaaatttttggctcattatgcattggctcgtcctgcaggaggaagttggtgaagtgctaaagcaggggaggaggtgaggagggggatggggtgtcaaaggttagtaatggtccaactctgtgattaactaccgctcattagtaaccacgaatggccaaggcgccagtataattaagtgattacaaatagcttgtatatacgggaatgctgccaataatattagcatactttttggggccaaaaagcgttttggctgggaactgggaacttcccagtttgctattttccagaatgtatttttaatataaatatttttaaagattagaagatgaagatataatttcgataaataaaaatttaaaatgcttattcaaaaataaataaaagttcattcttaagttttatataattgcaaaagccatcaataagctaacagcaagtgcgcagctgataaattttcaaatatacttctagaaggtttttattgaatccaaatcaataatttcaataacacacaacgcataaatttaccccccgtaagcgaatacataaactagaaatcacatttcatctaccaaaaattgctgaactcttatttactttgatggctttggggttgctgctggcagtagagcaaaattcatccgaactttaatttaattcgcagctcaacaaatggccaaatgccaatacatatatcaatacgcttgttgggctttcaattttcagacaaaacccttttgatttggctgatttggggtgggattgaggcgttcgaagctggtttatcgaagttatgggaccagcagatcccggtgaactccaccatccatccatcccacgccatctgcaacctttatttttgacctccttaaagcgcttttttatgacggccttcgacggggggagttaaatgcaggtcaacggcagcgaacacgtgcgaattgttaactgcttttctgagagcagttaaaacggggctaagtgctaaagatggaatggcaacgaaatcggataacccagggacaaattttataaatggagaaaggttcgttgaaaggcagctgttactggaaaaacttaaattgctattgctattgaatatatttgtgattatttttacatctagtaaatgttttaacggccttggttttaaattaaattttggttgaaataaagacctagtgaacagattaataacaaacatttcgcatcaaaggacattgaaatcggataggctttcagccaaaatcagacaaaagtttaattttaccaattaggaacacattcctagcaacgcacacaaattgagacctttaattatgcccgaattaaatttaattctatatagacatttttgtggcctgtgggcatttcgcttccccttatgcaaatatgaaaaatgatattcaaaaagttgacccttttccaccagcgtgaccccgctcgcgggtcaatgaggtgtcaatccatgaaacaacctttcccaacggccatcgagcaatttacttaaatcaacttaaaacgcagtgcctgataacaaaagtttttaattgggttgtcgcagctttcgccccagctgatgcttttctttctatttcataccctacagattaaaataatgctgttagtaagaaaaaaaagaatttttcaatacaaaatctacttctatttcaaattgttgtgaatcttaagttatgaaaaatacaattaatattaattcatgagcttccattctgttatatttcattcaaaggaaggtcttttgactgtgaaaatagttgattcaaatcgaaaatgctttttccagtgtaccccatcgctgtaggtgacaacaaccaaaaggcggagagacaaaaaggaaaagcgaaatttcctttcccggactccacaaaatttgttcaaagttaaaagttaagcagcatttttcagtttctttcataaattgggtgagcaaaaacgaaagttcccactcccgttcccatttgcagcttgccgtgtaatcgcacaaagcgaaaggagaaagggagaaagtggttggtccgctgggaagaaagtgggggaatagccaccggaacggttcattgcacagctaccgacgccgccggatctcccactcagtacagaatgctcgtgtaagcgtacaagtatgtcctgtccacgcatacacacgcacaagggcacacaaccaccaagaggaaagcagaacacacagatgtaaggacacactgacttacattcaatttagcgttcaatcacgccgcttaaacggcaacaaggagcagacagaagcgccagaccattgtctgtttcctgtttgcacggacagctttaaggaaatgacgagccagatggatggactgaatcccacgcaaaaggacatacagcaccgctcgagctagaaatctcttttgcaacaaattttatagttggatcgggaaaagattatcaatataaccaacgataacgagtaaccaaatatcttacattgcaaaaatgtatcaatttggttttattgacctctattttccattgtttataattaattgtttgactgtttttaagtaattaattaatattaaatttccaaattagtactctttgtgattaaaatggtagctatttgatgtacgtagtgttccgaaccgggccgttctaaaatgtatgttacttgcaaaggaaatagacttttgaaaaaatgtaatgcagatatctttaaagccagtaaacaagttcgatggacctaactatttaaactcggatgttgatactgttcaagaaaatatatacttcatatggtaggctttaccttttcattaagggttttcgttttaggtaaccctgactcacttttaaaaaggggtttttatgatgaagtttctgcaattaacatttagttaatttagttaattcatagtttagtttagctaataggatcgagacttttcaaaaagctctattattctgctaacttccgtagaatactcacccggcattctttttttttttagtaaaacttcaaactggcgagtgagccaattcgcaggacaaaaggcgaagtgcttgcgcgaaggtttcataaaactgccaggccagccacacaacaatttagttccagtgcatattagtggtcattccgagcggagggacaaaggaaagggctcctctgaaggaggggcactcaccacccaggagatttgtgctactaatcggcttaaacgacggttcaagtgactttcaccccaaggggacggcccaggaaatttcgaaacgacaagaaagaggacacctgtggcagtgaaagaaaagttttgggggctttatagacctattctcctcaaccaaccgcttttgaaatttttcaaatcgtcgcagataggcaaaactaattttaatttcgaaaatcgatggctcatttatctctatgaataacgtttaaagcgaaaagccacttaaggaatgtacctcagcttctagcttgttagacactaatataagttcgttgttaaaaaagctgatatcaatggaaaatcatcaccgtggccctcggcacttttgtgttcatcagcagttattgactcccacataattaatgcgcatttgaatgaaacccgagtccgagtaaacaacaatggaatctggttaagatgtgagagacataaggttcgggtataaattggcttacatttaattgcatttatcaaattccaatttaatttagacaataagctagtggcaaatgagtcgagaactctgcaaaacaattgaattttccaattaaccgaattatcagaattcgccgaaaatgacaacaatgatttacttaaaccaaaggttttctgcgaaaatatgttggtttggcggcaatgtgttaagtctttaaaaaagtatacatatttccattctagcatcttaataatcataagtaaggtaatgaattaattagtgtttgtccctttaagcttcaaaaccgttaataagtaatttccagttccaaaccttgaaaatatttaacatgttagtattgacaaatatctattatatgtctagttccttgttatgcctaacaaaccaagatagtatcatatataggcataacttatacttcagaatgtttcaaacagattaatcaattagaaggaaaccgaaattcccaaatccgctcaacgcaaccaaagccaaaagaatgttggttacaaccattttccgctgcccttcaattattgagtaccgagcaaaagccagtctaccataattgtttttatttatttttaacacgcgcaggaccttgtcaaatcatccagacatcacaacacacaagccatttgcacacacacgcgcgcaggatggtaaaaggataaaaattaggaagtaataaagtaaataagaactgctgcttaaatgcaagtgcttactaaatgtttacaaaatgtagtaagtctttaatgagcgcgcctcagaaagtcagacacaaaccagcacttcactctacttggctcggaaactcgcgaccgagtgttttttcggctggagcagctggttcagccttccacctggctgggaaatacggaaaagctgcgagggatgcgaaggatgcgcgaccgatgcttatcggaacacacagctagactgactggcgggcccaggagaaaaccatcgtcgcatcagtctcaattcctcgcaatccttcgcagcagccgagtccttcggcttcgctttcagtccgatttcagtttgagttgtagttcgtgtggcttcggctatttcggctttggcttggaatcaggagcagcagcagcaaccctggcctagaaacgttaaaggtggcggggaacgggaaggggatttggtaggtttcaggactcaggtgtctgttcaatagggtgctccgattcttgccagaatattcttcttacttccaattccataccatactgcgaaattccatatcagggcgagaatttcaaaatttcagatactttgtgaaaataaatatgattaagatttttagttagaaatatgaaaattcctgaaacatacaaatgctaccgctatataatcatatggatcttatgtatataatgctccgaagtttaatagttttaagtagttttctgaaccagtgtcccaccctgatggagaaatgtttgtgccccgaagttgagcacgcgcttagtgttgcaatggggaaaagcgggctagcagggggaaaatcagcagcagcaacatccgaggcaactgaaaaccgttgcacttgaacttcactggcggccattgcggtggctgtctgtctgtgtctgtgtctctgattgcgcctgtgtgcgggcgtgagggtgagcgtgggagagttcgtatctgtgtgtggtgcggattgcggtgagtgaaagtgaaaggcaacagcaacaggtcgcgcgagtgtgtgagtgcgcgctgcacatacagtcacacacagacagccatcaatgtcagcacaacacaacaacgtggaaaaggtcgaacgcagagatttatatttaccgtgcgggaaaaaatcaatttgggggatttcagcatgcccgccaaaaatagaaaatctccggcgattacccgaacaatatgttgcctatttagcggagtaaaaaggtgcactgcgagaaaggattccaattggtcttgtcatttttaatacgtttaggaggcgaaaagagttttattatttactgcggaatagtaataacatgtctctgtaccgaaaactagaaatatatgtatgtaaatggcactactacaaataataatatttaaacgaatttaggcgtaacagccatagagaaaattttgaaaaaacgacagtctgttatgagatttggattagttatttactccccagtgccccgaaggcggagacttatattaccaaaagcaggaactgctccccaattaggtacacacagcaggccaatgcacacagacgtactcttactacataagcgagcccattcgaatgtgcgtcaatacatgggcggggaaaggggcggctggttaagtaggcggggtcaggctactgtgcgggtttcatgcagcaggcagcgctacggattcgcccacaatcgcaagtttaaggccaagtgagttccacagcttgggcaccacgctcgaacttctgcaactcgaaccaacatctgtcaacatgcgagagttccattctgtatttaagttggcatatcattaaattcacgggttaggctaccaagtactttgcattgctttgatgttgcttttaccgagaaagtagtttataaaacggtaatcctttggttcgagttacagcatatggagctagagtagtttctacttacaaactgtggtactgcagtattcaaaactcaccgtaagcgcaatgcccactgtggcggaaaaggaacccagtcggaactcgcccgtattgtatttgaccaggaaggaggtctttcccacgcccgaatcccccagcaggatcgtcttgtggttaaccgtatcatcgaagggctgctgatgggcgttggacggggctgggtgcatgtccacttcatcgtagcgatacgatcgccaaccatcgttatagtcatcgtcgtagtcatccgttccgtacgcatacatctgcattgcctcgcgggagggacgatagccaggatatccggtggccgagcgctgaacgggcgccatgatagcatcgtcgtggtagtgatggctgcccgtcaaactcagctggctgtggtggtggtggtgatggtggtgggatggttggtggtgcgaggattggtggtgatgcgaaggattgtgatgttgttgctgctgctgtgtcgttgtcgtcgttatcgaggcggaaactgaggcgggcgctgcggggggattgtaggagccatcgccaaagggccggcgacgcagctcctcgatcctggcctgggtggtctccgcatcctcgaagacgtcgtcgctcatgctgctggcgtcgtcgggatgcgctgatcccgctggcggtcctcccgccccggggtcaccttcgccgcctcccagtcccaccgctgtgctggccattggtttcgattttattggattgtgtcttggccaaaagttgtgctgacgcttttatcctgagctttcactttctcattggtttagattcgggatttgctctgagctttatctaggctttcccctaattaactccgaaactgtctcttttatttgcgcatattgaatagaattgtgtcacattatcatcgacccctcttctgaggatttgtatgacctcctattgcggcgttcctttctcttttctttttataaactctttttttaggcaaaacgactgataaatacaagctattccattgtcctgtttgcgttaatatatggccgtaatgctcaatctactggttaaaaaataaccggaagttttcgttaagctgtgtctctcttttgttactttctctttgcgattttgacacttggcattgcttctcccaatataactgtaactggctagcttttatcgcctctcatagttttgacgttttctctgagctttctctcatcggcatttccgagttttctctttatgactttgacatttaccgttgtccgtcgctcccgtccggttgtgtggcacgtttttctgaatgaatccgctattcggggctttcgcctggagatggggtggtttgccgttgctattattatttcctatatgctataagcttaatattttcgccagccttatcagttggccagttttcctaatcgctattcgttagtttttcgctccgtacaattgaactaggtattggtttttccccttttttgttcggttgtttggttgcttggtgttttgtttgaagccactaattaaatatcatctatgtaaattgtaactagctaaacatattgactaatattttataggttatgcgctaattggtgctgttttcactatgaattaaacattaatctatttatagggttcgcaacaatttgcttggtgtttttctttatgttttggttaaagcttttggttaatttctcgttttcgtcgtta

SEQ ID NO: 41525 - DNA, 2001 bp, DROSOPHILA
atggccagcacagcggtgggactgggaggcggcgaaggtgaccccggggcgggaggaccgccagcgggatcagcgcatcccgacgacgccagcagcatgagcgacgacgtcttcgaggatgcggagaccacccaggccaggatcgaggagctgcgtcgccggccctttggcgatggctcctacaatccccccgcagcgcccgcctcagtttccgcctcgataacgacgacaacgacacagcagcagcaacaacatcacaatccttcgcatcaccaccaatcctcgcaccaccaaccatcccaccaccatcaccaccaccaccacagccagctgagtttgacgggcagccatcactaccacgacgatgctatcatggcgcccgttcagcgctcggccaccggatatcctggctatcgtccctcccgcgaggcaatgcagatgtatgcgtacggaacggatgactacgacgatgactataacgatggttggcgatcgtatcgctacgatgaagtggacatgcacccagccccgtccaacgcccatcagcagcccttcgatgatacggttaaccacaagacgatcctgctgggggattcgggcgtgggaaagacctccttcctggtcaaatacaatacgggcgagttccgactgggttccttttccgccacagtgggcattgcgcttacgcttttccgtatttcccagccaggtggaaggctgaaccagctgctccagccgaaaaaacactcggtcgcgagtttccgagccaactgtccgtgcaaacaggaaacagacaatggtctggcgcttcttccgtcgggctcccgcaagccctccatttcggtggccaccccaacgccgttggccagtggatcccccactcgccgggagtccctggtcaagcccacctggcagcacatcacacccggccagctgccacccaaaacgctggacaagatcaatggcattgcctcggacgattcggacgacgatggctatccgaagaggcgacccagcgtgattgtccaccagcgccagcagtccatctcccagcagcctctgctgccggaatacatgacctcagcctccatattccgggatcatgctccacagacatcgcaatcgcagtcgcaatcacatcatctgccatctggcaatggtttcatggcccgattgaatagcgtacggctggccagcgcgacggagcaacagccacttctggattccggaggaggagtatcggcaactgccgtggccaggccacctgttgcaccggctccagttgctccgggaccgggaagcgagggagccagcgcaacgctctgcaagaacgctggacgggcactcatccgcatgatttcatcgagcaaggctccggaggaggaagacgaattcgatatcatgggcaaggtcataatgctgggcgattcgggagtgggcaagacctcacttttgatccgtttccgcgatggtcgctatgtgccgagctatttcctcagcacagttggcattgattttaggaacaaagtggtggtcgtcgatggaacgcgcgtcaagctgcaaatctgggacacagctggtcaggagcgattccggagcgttacccacgcctattatcgcgacgcgcacgctctactgctgctgtacgacgtgaccaacaagaccacctatgacaacattcgcgcctggctgggcgagatccgggagtacgcgcaggaggacgtggtcatcgttttaataggcaacaaggccgactgcagcggcagcgagcggcaggtgaagcgggaggatggggagcgtttggggcgggagcacaacgtgcccttcatggagacctcggccaagacgggactcaatgtggagctgtccttcacagcggtggccaggcaactaaagagtcgcggctacgagcacggcgatgatggaaagttcaatgtgcatgattttgtgcgtgacaatacaaaggcgcgctcggtttgcgcccagtgcaggaacatgtaa

SEQ ID NO: 41526 - protein, 666 aa, DROSOPHILA
MASTAVGLGGGEGDPGAGGPPAGSAHPDDASSMSDDVFEDAETTQARIEELRRRPFGDGSYNPPAAPASVSASITTTTTQQQQQHHNPSHHHQSSHHQPSHHHHHHHHSQLSLTGSHHYHDDAIMAPVQRSATGYPGYRPSREAMQMYAYGTDDYDDDYNDGWRSYRYDEVDMHPAPSNAHQQPFDDTVNHKTILLGDSGVGKTSFLVKYNTGEFRLGSFSATVGIALTLFRISQPGGRLNQLLQPKKHSVASFRANCPCKQETDNGLALLPSGSRKPSISVATPTPLASGSPTRRESLVKPTWQHITPGQLPPKTLDKINGIASDDSDDDGYPKRRPSVIVHQRQQSISQQPLLPEYMTSASIFRDHAPQTSQSQSQSHHLPSGNGFMARLNSVRLASATEQQPLLDSGGGVSATAVARPPVAPAPVAPGPGSEGASATLCKNAGRALIRMISSSKAPEEEDEFDIMGKVIMLGDSGVGKTSLLIRFRDGRYVPSYFLSTVGIDFRNKVVVVDGTRVKLQIWDTAGQERFRSVTHAYYRDAHALLLLYDVTNKTTYDNIRAWLGEIREYAQEDVVIVLIGNKADCSGSERQVKREDGERLGREHNVPFMETSAKTGLNVELSFTAVARQLKSRGYEHGDDGKFNVHDFVRDNTKARSVCAQCRNM

SEQ ID NO: 41527 - DNA, 12012 bp, DROSOPHILA
gcagagcttcagatgatgttcgaccagcgtttcctgcaaaatcgcctggacaagctatccacggacgccacgcagggattccgtcggcatcccggcgaattcggcgacatacccgagctgagcaccttcttccaggcatgcactcagttggaacgcggactggatgcactgcgtcagcagcggcggcgcaacagcgagctggagaagcgtctgtgctgggccaccgaaatcgcatacgatcgcatggacgagattcgcaatgcggttggctcggatccggaaaagaacttctgaattggtgacctgtagttacatttttggttcaccctaaggttcattacccgcacacaaacacacacacaggcaaacacgcacaggtgcaatacatatgcgtttatcccacacccataggcgatgcaataattgattgtgttatcttctgggccgcagctgggttgttactcacccgagtccgtgtaccagctgcctgcatgggttgctcttctggccgacattttgtgcgagatccctaatcggtctgtttagttagtaagagctattaactggccgttacttgtagaaaaaacgagttctttgttattggtacagcagtgtgaccgtcgtcttgtttttgaaataaacacgttctctggattcgctgatcagcggtcacacttcttcagggctgcattaagtacttaaatatcgttttttttttggtataatcatatataccattaatacttttttattattctaaataataaatcacacaaataaaatacaatacataaggtaacgtaattttatttaagtgttgttttttattaatttccataaatgaaatcgcataacatatacaactgaaactcacggaagtcgaaagtcggaattctgcaataccaacatttcaaactataccataattcttgcagtttgcctgcgcgcaccgaggtattttcgaacgacccgtgtgcggtcacactgttcgcatagcgtcattgctgtactaaaacctaaaaatccgccgtgttcgtattccgccattttgaaagctgcgagtggaatttggacgcgttgctggtaaattaattgtgggaaaactgcccaaaaagtgcataaaatttgtgaaaagtggtcggcaacggtgcatgagacccgccgccaagtgtttgtccccgaaaattgtgtgtggccgcgtttttggcacgtgaatttcttgcccaattgtgaactcgcaaaaaaagaaaaagaaaagagagaagaaaaccgacgccgccgtcgccgccgccacaaaggaataggcgaataagcgagagaaaaaaaggcgaaaacgagagctgaaaatcaaattgtgcgccgctgattgcgtttcagctatttaataataccacaatcgaaaatccgcggcagcggcgatttttccacggattactacaccatatatttcccatttgcctttccgtttgcaacgagtgtgcgcctgtgcctgtgtgcgtgcgtgtgtgtgagtgtgcgataaacgtgtacaagaaaaatttaaacgtgcagaattctgatgaattttaaagcggaactgctattgcctgtataggtgatgcgggtgtgcgtgtgtgggtacgcacacacacatgaccaagtattgttgcggtttaatgcaaaagtcgagtgagtgcgtgtgtgagtgagtgagagagagagagagagagcaatgcctgccatattctatgcaaaacataaataaaattgtgcaataatttccccgcacacgcacacagccacagatacatacactctctttgtaatttatatttttttccgcccgcctagtgacaatacacacgcaaggttcactgcgcaacgtcccccttttctcaagcaccccccttttgcccacgccactgcaacatgctgtctcatcgttgttgttttgccgccgccacatttggtgcgacagagagagaaagagcgagctagcgcgagtgcaagagaaagggtgggagggagaggccaaaagcaacgagtttgaaaaccaactaaagcctcatgttgacacatttcaaccgggagttttcgttctttcgctcggattaaaagcctttaaagggtgaaagtgctgcttatcgtttcttcttcgcgaactaaagctttaaaagtataaatagcttttatttcctgcgcccgcatattgattgcaaattacaagcgcacacacttactcaacaaccgttgcgattgtttgtttgtgtgtgtttatgccgatttgaatacacaaccaagtgaaaaagtttgatcaacttacgaatgtccattcaaattgatgcttgtttctagttttcttacaatttttgcgcttgtcgtgtttttgtcatagcttcttctatctctatcgctctctctcttctctcttgttcgttcgccctttcactgttcgacgtgcctgtacccatcacacacatacaaacgtatacgtcatacacacacacacacgcacacatgaagaggcagacagacaagcaactctgggctcccccctccctaaacctctcccctcccagccacatactgccgcacttgcaacgggaatgttgttggtattgctcgcagtgctcaaaactccgaagaggattacaaatggtgtttttgtttttgcccaaaaacggaaatacagacaaacttctgccacataaagagttcaaattatagcgactgttagttgtttagtcatttgttgtattccccgcaactttttgcgcacttttggggtatctagactgattacaaacccttaaaagcagcaggcacaattgaaattattgattgccttaaagttaaagttaattgcggttatgaaatttttggctaattgttcgtcattgggcaaaaatgaaatgctgaggaatttgctttataaaaacacttaaatttatagttattagccactgaatttgtattgcagtcgttaagaattcttcctacccaatgtagttttcgctatagaataaatagaaatatggaaatatgtggcagagagagccgcttttcccgtttccacttcaatatttgcattgccatggaattttctatatatatagtccatcgataactgtacatgttgctgaatttgttgttactagtttttttggcgcaacaacgttttccgcttcttgtcactgcccttttttggcaaataataaatttgattgtgtatgggctgcccactcccactagctaacggttatttattgtcaatgccaggcgatgccgcccactgccacgcctcgtacgacccccccccccaatccgtttgatgctctgtgtttttgcgcaatgtttgttgttgtgtgtttgccgccgactgcgcgcgtgaaaaaatgcacacctgcccaaagaatttcacacttggtggtgcacggggcgcaaaacaaagcgaaagcagccaccaaaatagcaggcaaacgtttaaatttaaacacaaaagtccgaggaactaaaattcgaccagaaacacaatggcagccatgtgtgcctcatattcttgtattttttttctgcgctctatctctatcgatctgaaaggcaaatacaacgcaattcggttgatggtacaggctctaatacccttaaagctaaattgtccaagttataaatttgttgaaaatgaatgatagtttacaaattcggatgtctttcatctattcagcggtggaaagatgtattttggccagctaatcgttgcatgtttgatggcaaacctttcgccatatctgctatactcctgcgcaagcacttttcaaatgaaaacagaaaacacacactttcagatggctcagccaaattcgtccaaaacaacagatgcagcgatatggcaacaataataaatagaaatagccaagcagccgcaaaacgcagaatcagcaattcgtaagcgtgcgaggcaataatatatacatatatatatatatataaattgtatttcatttgattttttcccacttctggtcacttgccactcggctatgctggcttgcagtttttcgatttgcgtcattcgcagaccgcgcgcaccaccaatcaatattataaaaaaaaaaaacaacaacaacaacaacaaaaaacgaaacaagacaacaaaaaccaaaaaacaagtgggaaatacgagaaaaggcgagggaaaacaatgggaaagcaacgcagaatggcacctacatgcatacatactacatacatagacaaatgaaaacattggccaatgtcaggcaaacagtttaagtgctttcgtttggtagtacagtaaataccatggctaaattattgctgaaggtccgaactcgttcgtaatcgcgttatctgcacttttccaaccgcgaaaaccgaatatcagcgaaaatggccaattcggaaatttacccagttaatgcggtgtgtttatatacttgtaggtggaataatctggctaaaacaatctcaaatttaaattggaaggaatttggaaaacgcaatgctctgattttctattgaaaaatggtttgactttttatagcttattggcaaaaaatgtatttaacatttagatattttcgcaattcaacgatttctggtttgaatttcttacattttccatgttctattttcatttctacactcccatctataaattctataaattcacttatggcattgcgggcaactgatttatgatgtaagagtatgaatacccatacccacaactttcgccggcttgaaaaatcgcatttgcgagtgccgaaatattgtggcattaatatcgcgcttaatgtgaatggccatcactttagttactgcgagccacgaggcttttggcgtcatcttgaaagccggctttaagtgcatatgcatgaaacagaaagctgaaatggttagccagcgtggtgtggaggggacgggggctgctggcaggaaaagcgcgggaacgcaacgtcacgacaaaacggcagcagccgttaattcaggcaaaagtacaaagaaaagggagcgggtggggtaaacaagttacgagcaccgacgacgactgacttaaagttgaaaaatcgctggcagtcgtcgcagcaacgacgcatgagcagttgcactttgaattttccagttgcagttgtcgatttcccaaccctcgagcagcattttcaccatttccccgcagcagcatctcaactgtgctttaaaagttgttgcccacaaatgcgcatgacttatttaaacgtgttttaaggctgctcaacacacacacacacacacaacgcacacatacagcaaacaatttaagcgaacatggctttcaggcaggaagaaattgtggcaaaaacgagaaaaagaaatgaaaataaaatcgagtggaaaaaagaaccgaggcacacaccgagttcgccagcggctctttagcgcgctgactttcctctttttgccgccactctgttatcgtccgccttgtcgtttcatgttgataaaccggtttttcgctttggcttggtttggtttgttgctgtgctgtgccgtgccgcctgctgcctctgctgctcctccgttccctgtccataaagagatatgtgtgcgcgcggccatcgtcatcggtgctctggagttactgctcctcctccagttggacagtgctgaccgggttttaaagccagcacgcagctactgttgtgtttttttttttcctgaaagttacaatggaaaatttataatagctgccacaactgctgagttggagcgttggtggccaaagacgatttgtttgttttcataaccaccagccgcataccaaatttcatttcaatcggtcagatactgcaatttaaacgagtagtatcttatctaatcgatatcctaatcaagagcaagattggtatttagggctgtctacaaatccttcaaagcgattatagcccctttactgattgcttaccctcaagacatttattaggaaccagccataatccagccaaattggctgctccgctggccaaatgcggccggcttgtttgttagacagccggtggctagtcagtcggcttgtacggcatcagaatcggaatccgaatgggaacgagaatgggaatcatcggaatcatcggacacaccggactcaggtagtcgcgcgcaacgtcacattcggcatcagagaatgtatctgttagatacgcgaccgcgacttactgtacacactgcggcgctagaagtgatttattataatgcctcgctggatgcgattttcagttcgttgaattatatgccttgatttgatatatattcctgctcactggccgcgggcgtcaacaggtttttcgttcgattcggtggtggtgattcgcgaaggcaagtcgggtgaagaaaagtggcactgccacaggcgtgggcgctcgcactcggcgaatgccacatcctgtggcaacttcaggcattccagcaacagaaagagattcgaaataagagtaaaaggcgaatcgtgcaagctcgagtaaaactggtttttggcgcgctttatcaactctcgactgacattttccatttcgagtgtgtttcgaaagagtcttttgtgtcttactgccgccaagttgtggcaaaagtgtaacttcggtgaagagtggaccttacgactaaaaggaaactgaaactttaatactttgatttacttaaaaccacatttgtaaacataaatcggagtagtcgaatgaatggtttagcataccaagtgcagtgagtcatttgcgaataacttgagccggttatccacgcacacagcgcgtttacaatgaatacatttccgagtaaacaaatgcgaatcaaaaatccacagccacatgagccacaaattctgggcagagagaaattgcttgaaaattaacaaagcgttgcgcccacttgactttggctattcacttgataaatgtatacatatataaatatgtatatatacgtttatagtacgcttgccattgtcaggggggaggggttgtggtgggtggggggcgatgtgattgtgctgggatatttttttccattgcccgatgtcataattgcgttgcttatttctgtatttctgtattttggcttgcgatttggcgaacgttcgctcgagcgttatttcccccgcagtatctgtgcaactttttgtttttgtttcttcattccttttttttttttttttttttttttgctattattattgtagtctcgtcggttgccgcatttgaacgtatttcatacttttgcacaatacgtgacacatggctgatgggaagtgaccggtggagcaggcagcagggaatcgggtggggtgtgttggttcagatgtgtgtctaaacatagcctatagcctattgcctattgcccgtggaggcagcggcagtcattgacggcttatcacgcacaaattatatacatatgtgacagtagtcccgtcccggtgctatatagacatattatatctgtgctgtcaatatgttttttattgttccgatttgctgttcttatcagcgctgcatagtgaatctccgctggtatataacgaaaactattcacgcgatttaggttcggacgactataaatgtagctttaagtaatttcatgtgatcgcattagttatcattttattgatagccactgcctaactcagctgttagtccacctacgaatacgatagtcattcaaattagaagtgccgataagaagaggcttatctggaaatattgtcatatttattagtggttaaagtacgttggtttcggaatcatccagccatgccaaccatttcaattgagctctaaatgtgttcccatattcggactatatctacgaatagtcgtcaaatcaaacttgatgatatagttaaccttcgagtaaacaaattcgctgtgcattcaacaaccttctggatgttcacactttcatagagcccgtcatatatatcggtcacattgccatcacgctgagctggaagcccaccatccgttgcccccacgccgttccacgtcagatagccgagaagtgtcgtggtgataagataaggccgcgcgggctactacacgtaatccgtatccactcggtgacaaaccagatgtgagtgggtacagtaccttgctcttctgtgttcctgagactcgttcccgtgtctaatcaaccgtccgataagttcagttggatttggcggcacgaagccgacgacgaggaggtgtatgtatttcagccagctggccaacaagaaacgccctttcatactctcatacaaacggaaagtcgggaatgggttggtggggggtgcactggccattccgctccagacgattttgtcgatggtcgcatgtgaacagcgttgaatttctatgtttttgcaatgacacctctctcccgaatgccactccgaatcccaatcccccaactctttgcgcttaagccactccatgggtcgaaaaaagggagtagaaggggcagcgatgtgagtgcgacaataatgtagctttatcgctgatattggcgaaatccaaacgaaacttgtcatcagccaaattttgctgacatgagctgtttgcttttttatttttttttttttcgtttttttcttcttgtttttggtctacatcatgtttcatgttttccatttaatttatgtgttatgtgttcttgttgcttccattgcaggattctcgatttcaatatgaagcgccaaaaatgattgcagcgtttgcatcgtagtcttgaaaaggtttttttcattgatttaattagagccactgaaagcggttggccagccagaaaaacgataaaagggattccataccagtctgcgcccagcgccccccgaaacgcggtagtacagaaatatcaaaaaaagaaccacagccggaaaagggcaaaagttttattccgacgacgacgaagagcagaggacagcagcagacagattgaaaaacagcgaaatggacaaaaatctgatgatgccgaagcgttcgcgcatcgatgtcaagggcaactttgccaacggaccgctgcaagcacgcccactggtggccctactcgatggacgcgactgctccatcgagatgcccatcctaaaggatgtggccacggtggccttttgcgatgcacaaagcacctccgaaatacacgagaaggtaagtgttgtgcataatgattacatgcattccttctctgacataactctaataattcgttgtttatctaattccgtataggtcctcaacgaggcagtgggagctctgatgtggcacaccatcatcttgacaaaggaggatcttgagaagttcaaagctttacgcattatcgtgcgcatcggcagcggcacagacaacattgatgtaaaggcggcgggcgaactgggcatcgccgtgtgcaacgttcccggctacggagtcgaggaggtggcggacacgacgatgtgcctcatcctcaacctctaccggcggacatactggctagcgaacatggtgcgcgagggcaagaagttcaccggacccgagcaagtgcgggaggctgcgcatgtaagtcattggccaaaaacgatatgtaaaatcagtgaaattctacggcattggtattgattgaaaatagttattcttttaagggcatataatgcttaagctccccgcgaaggtagcagaaaaattttagaagcaaaggaaaagtcagttgatattatttatgctagtcacgtacatagattacagatagtataaaacctacatacaatatatttacaaacataaaaggaaaacgatttgtctatttccatttgagttggacgattgcgaattgtattgataaaaacaagtcaccatgacatttgtatagcttggtttttaacgaatgctttcatttgccatggatgtctgataaaatagattgttttcatatttaccagattattatttcaccgattgaattcagtggctacagctcataaatatagcgtacgcttattgccgtattcaaattacttcatccaatccaaatgcaaattgcgtgtttcaaaatgcatgatttgcatttaatcaagactttcagctagttataaataatagaggagctagaacgcacatatatgagcagcattaatatttaatcgataccaccaagtatacctttgaatgcatctaactggaacaacaccatctgcttgttttctcaacgcagggctgtgcacgcatccgcggcgacaccttgggtctggtgggactgggccgcattggtagcgccgtggccctgcgggctaaggcgttcggcttcaacgtcatcttctacgatccctacctgcccgatggcatcgacaagtcgctgggcctaactcgcgtctacacgctgcaggacctgcttttccagtccgattgcgtctcactgcattgcacgctcaacgagcacaaccatcatttaatcaatgaattcacaattaaacaggtgagcaggagtttctctcaaatgtatcctgcgattgagtaatattattattttgctacagatgcgacctggtgcatttctggtgaacaccgcacgcggcggtctggtcgatgacgagaccctggcgttggcgctgaagcagggaaggataagagctgccgccctggacgttcacgaaaacgaaccttacaatgtatttcaagtaagagattgttgtaaaacgagacattttacgcaatctgagttggcgccgcacccacgatgaatgtgatcgcaactaatgaatgttttcttttggtttacagggcgcactgaaggatgccccaaatctgatttgcacaccgcacgccgccttcttcagcgacgcgtccgcaacggagctgcgcgaaatggcagccaccgagatccggcgggcgatcgtcggcaatattccagacgtgctgaggaattgcgtcaacaaggagtacttcatgcgcacgccgcctgccgctgccgccgggggcgtggcggcggctgtttatcccgaaggtaaactacaaatgatatcaaatcaagaaaagtagagagacagagacaggcgagcaagggagcgttattacaagtaaaaaaaaaaacaaatcgaaacaaaacaaaacaaaaaatatgagaagaacataagaaatcaaccaacaaaatccaagcaaaaatacaataccagaaatcgttaaaaagaaaaacacacacataccttacacacacacacacacacaccataccatagcacacccacacaagcacacgcacacgcacacagatgtagcaagcatcccaaacatacttctattctttctctgactcattcgaaagtatatatatatagacgacgggagtggagcgcgccagagagagtatataacatttgaagcacgattcaagaacacacgctataagagttgatatataagttacacagtttaagctatacacatatatagatctatatatatgcatatatatatttatatatgtatatatataaatatgtatatatataaatatatagtggctaagcgctgcaccgagatcagaatgtttgacgtcgatgaggaggattagaacgcagccgatgttggccaaaagttacgtttatccaatatgtatctgtgtacgtatatgcattgtttcggcccttctagaacagagaacgcattcaaaagcatctctgaaatatgtttagagcgttttcggcgagtttccaaactacgtcgctatcgaacttagtaagaattcctttaactgaagttcaagtaagctagatttcttcagattaattcaaaacagcgtttacgtggccaattgtcttctccttagtctacaacaaatacatacgtgcatatttagtgacatagtgaatatacagataaacgaataagtttcaagataatttacacatgaaaacaaggtgaaagtaaacaatatgatggattattgttgttgatgtttcgcaactgacgtcccttcatccctccctcccaagaatccctcactaagtatccggctttaactttaaccgaaactagaaac

SEQ ID NO: 41528 - DNA, 1522 bp, DROSOPHILA
attgctgtactaaaacctaaaaatccgccgtgttcgtattccgccattttgaaagctgcgagtggaatttggacgcgttgctggattctcgatttcaatatgaagcgccaaaaatgattgcagcgtttgcatcgtagtcttgaaaaggtttttttcattgatttaattagagccactgaaagcggttggccagccagaaaaacgataaaagggattccataccagtctgcgcccagcgccccccgaaacgcggtagtacagaaatatcaaaaaaagaaccacagccggaaaagggcaaaagttttattccgacgacgacgaagagcagaggacagcagcagacagattgaaaaacagcgaaatggacaaaaatctgatgatgccgaagcgttcgcgcatcgatgtcaagggcaactttgccaacggaccgctgcaagcacgcccactggtggccctactcgatggacgcgactgctccatcgagatgcccatcctaaaggatgtggccacggtggccttttgcgatgcacaaagcacctccgaaatacacgagaaggtcctcaacgaggcagtgggagctctgatgtggcacaccatcatcttgacaaaggaggatcttgagaagttcaaagctttacgcattatcgtgcgcatcggcagcggcacagacaacattgatgtaaaggcggcgggcgaactgggcatcgccgtgtgcaacgttcccggctacggagtcgaggaggtggcggacacgacgatgtgcctcatcctcaacctctaccggcggacatactggctagcgaacatggtgcgcgagggcaagaagttcaccggacccgagcaagtgcgggaggctgcgcatggctgtgcacgcatccgcggcgacaccttgggtctggtgggactgggccgcattggtagcgccgtggccctgcgggctaaggcgttcggcttcaacgtcatcttctacgatccctacctgcccgatggcatcgacaagtcgctgggcctaactcgcgtctacacgctgcaggacctgcttttccagtccgattgcgtctcactgcattgcacgctcaacgagcacaaccatcatttaatcaatgaattcacaattaaacagatgcgacctggtgcatttctggtgaacaccgcacgcggcggtctggtcgatgacgagaccctggcgttggcgctgaagcagggaaggataagagctgccgccctggacgttcacgaaaacgaaccttacaatgtatttcaaggcgcactgaaggatgccccaaatctgatttgcacaccgcacgccgccttcttcagcgacgcgtccgcaacggagctgcgcgaaatggcagccaccgagatccggcgggcgatcgtcggcaatattccagacgtgctgaggaattgcgtcaacaaggagtacttcatgcgcacgccgcctgccgctgccgccgggggcgtggcggcggctgtttatcccgaaggtaaactacaaatgatatcaaatcaagaaaagtag

SEQ ID NO: 41529 - protein, 386 aa, DROSOPHILA; identical to SEQ ID NO: 24351

SEQ ID NO: 41530 - DNA, 4156 bp, DROSOPHILA
cgctgggcgagggagagaaagtgctggagcgcaagttcctgaccacagaggcggcgccacatggagctaatggggattcttaattgtttaagatatttgaaaatgcatagcaggaaataatggtttagtttaccaagtagaagaaataaaatcaccaagatatactaactattatagatatatgtatggattaatatttattgttcagagtttattattgcactttataatacatttatgaccaagttagaaaatccaatcttcaatttcaatttcctaacttttaatccattaagcatatgaatcattgggctttaaacttgtaattcttaagctagtggttaaaagtaatatggtcttgagaaaaaagaaatatataaacacaaatcaatattatatatccggcaaaaagttctagtgttcgcagcttaaacccggtgcttaaaaagtaaatccgctatatacttgctgaataacttttgtattatttcaatatcactttatatcaatttccagtgctgttggttaatttattcagtgttttccataattaacgcaacaagagccggcaaagtgctgctgaggcaaccaacaacaaaccgcctgcgcctgctctgttgcccaggacaaccgctggctagaataaataaattcccaggtgtcaagtggtgggtgctgcgacgaggggttagcggtgggcatgcggactccgctcacctgagctccagtcgacggttggcagcgccaccgcaatgcaaccaaggagtcaaagttgagccaagaagcgcggtatgcgcccagtttttccaacttggggtagaccggagacggaggagcacctgccccaatgtgggcgcaaaggtgtcaatcataagagcgcatcgaaatggctgcaaaatcaaactcagtgaacaaatagcaactactcaagctgaaatcaaaattcaaagtttgaaaggcctaggagtttcggcagttctcagtacaaactaaagaaaaacacacgggtgacaacgctaataccccaaaaaaaacaaaatacactacaaacgacgaaaggaacttaatcagagaaccgacgaagaataagcatacaggatgtcgggggctggagaacactcagatgaagagtcctatggagaggagtccttcgaggaggactcggagtcggaggtggaggtggaggaagaagagattgagtatattgagccagaggagtcaaaaccaagtgacgctcttctgttgggggagagcgacacccaaagcgagagcgatgtgaaagaagagtttcttagcggcaacgtaagtcctcctcaccaggagctgactatttccgagttcagccttaatccgcaacctgcatcgcgcccacagccacacgcccgtcgctatttgggcgcccgagtggtgtcctacctgagttcctcctctgacgacgaaagccaagtggtcatcaccaagacggtagccgaggtaaatcaactaagtctgcgagtggacacgcctccggaggatgagacgccctcggtgcgcactctgatgccaggcagtgcccattctcgggttaaggatgaggacgaggctgaagacgaggatgatgacgaaggtgatggcgaaaatgataacgataatgaggacgagaatgatgacgaggatgctgaagtcgaggaaatcgaagaagaggaggaagaaattccaggagacgaagacgacgcccaaagcgatggatccatgggtcgtcaatccgccgacgacagcgacgaggaggagggcacggatgtggaagtggagcagctggaggaggacgaaccaattgtaacagctgtgtgcaaaaagacggtccagaaggagttaccaccgccccagaaggacattgtttcgctggtcgatgccagtgataacagtagtgagcacagtgtggtcaccatgtgtgcatcaggagacgaaacagacaacaccttggtgaagtatcctagattacgaaagcaggtaaataatggattagataatatctcactacagataattaaacacctactcacagcaaccacttactgctaaggattcgcaatcgctaaaagagcaggaagaaccggaagaaccggaacaacccgaagaaaatcaaacagaagaacacatgccaacatcacagcccgatctggcgagggttcggtacctggagcagcagatgacccaaatgtcggaattgatcatgaagtcattccagatcaatggaggagcgccaaatagccaagccttcgagcagcttgccatggccacggagatgttgcagcaacgaagtgacaggcgcggggacactgaatccgagatgtcatcgatgacggaaacgactatgaccagtgctaggagcttgggtggaggaattccccccctgacaatgcggatggagcgttctcaggaggcactactcacgacgcgatcttccaagctacccagacccaaatgcagatgtccctcggaatcggatttaattgaacacgagcagaaactggatatgggtcacgagttgccccatgacctggcagcgaacttcggcttgggcgaaggctacctcgtagacgaatgtggccagggcgacggactcatgaggcatccacaacagcgcaaaccaatggagttaaacaggcgagccgttagcggaactccaagcaccttcaacagcgacggttgcgagtatcaaatcaatgtgtcgcgttcccgctgctctaatgataagattaagtaagtaacttataatacttatacactctattacatataattacatctgcatagctataaaaaccttgggcgcaaaagctttagctttacgaatccccaagtgcgcgagatcgagcgccagaatcagattcttttgcgcaagatgatgactgtgaagcccacggcgacgatcaaggctagcaccagtagcataaagatcaatgggcccgagaaggtgagtacataatatagaacttatgtccaatattaaacctcttccttaacaatgtcatacagcgacagacacctccagcgccacgactgtccagcgcagctgtgaaccggaagaagaatcagcgccagatcgacctggacaacgatctgctcaagcggaaactggaggccatcggcacacggcgaccgcaattcaagtgacgcctccacaggcagctccaactgtgttcattaagtaattaaaagtgtttatgcgaatttacaaaattaaaatttattgcaagttgaaaagtgtaaaaagctgtataatcttaatataattttaagggaatttataaaccaactagaattcatgcaaaaatgtatagtactagtaaaatttcgttccgatcaaagtcaatgcatcaaaatgtgtttataatttgtacatttaggtataaacaattctataaatgttatcgtaatcaataatcgaattggatagcaatattaaatttaacaattattttgcagcacgttggtaacaaattaaactaagaaaaactcccgaaaataaatgaaagaaggcgaaaatatttaaacaggtaaaaggaattagatggcatatctgaaacttcaaagaaaagcttacagagtcacctcgttgatcttggtcagaaatgtctctcccaatgctttcattgctttaaaggcagcatctccgttcttttccttgaactcttcttcatttttaatcttgaccttctcgcggcgttccaattcacgatagataacctgaccaatctgaaaagaaaactaagattgaacgaaattgtatggaaaagtgaatatcaacttacatagacatcgatggcggcgtacattagttgattctcgtccagcggaatgacatgccacttgctcatgcgcaccttcttgcttttgtccatggccttcttggctataaagttggttaatcgctccaagctccagcgcccgccggtctcacagacctcattgcaccaaagacccaagtccacgcatttctctatcagtggttcggctgtaacctcggggaaatcacgtgccagctttcggaaatcgctggaaaataacagattttatttatccaaatggatttttcctttgtataactaacttctttatgttcacgccatgcaatcgcactttgggatgattgataagggccaccagggccgca

SEQ ID NO: 41531 - DNA, 1886 bp, DROSOPHILA
cacacgggtgacaacgctaataccccaaaaaaaacaaaatacactacaaacgacgaaaggaacttaatcagagaaccgacgaagaataagcatacaggatgtcgggggctggagaacactcagatgaagagtcctatggagaggagtccttcgaggaggactcggagtcggaggtggaggtggaggaagaagagattgagtatattgagccagaggagtcaaaaccaagtgacgctcttctgttgggggagagcgacacccaaagcgagagcgatgtgaaagaagagtttcttagcggcaacccacacgcccgtcgctatttgggcgcccgagtggtgtcctacctgagttcctcctctgacgacgaaagccaagtggtcatcaccaagacggtagccgaggtaaatcaactaagtctgcgagtggacacgcctccggaggatgagacgccctcggtgcgcactctgatgccaggcagtgcccattctcgggttaaggatgaggacgaggctgaagacgaggatgatgacgaaggtgatggcgaaaatgataacgataatgaggacgagaatgatgacgaggatgctgaagtcgaggaaatcgaagaagaggaggaagaaattccaggagacgaagacgacgcccaaagcgatggatccatgggtcgtcaatccgccgacgacagcgacgaggaggagggcacggatgtggaagtggagcagctggaggaggacgaaccaattgtaacagctgtgtgcaaaaagacggtccagaaggagttaccaccgccccagaaggacattgtttcgctggtcgatgccagtgataacagtagtgagcacagtgtggtcaccatgtgtgcatcaggagacgaaacagacaacaccttgcaaccacttactgctaaggattcgcaatcgctaaaagagcaggaagaaccggaagaaccggaacaacccgaagaaaatcaaacagaagaacacatgccaacatcacagcccgatctggcgagggttcggtacctggagcagcagatgacccaaatgtcggaattgatcatgaagtcattccagatcaatggaggagcgccaaatagccaagccttcgagcagcttgccatggccacggagatgttgcagcaacgaagtgacaggcgcggggacactgaatccgagatgtcatcgatgacggaaacgactatgaccagtgctaggagcttgggtggaggaattccccccctgacaatgcggatggagcgttctcaggaggcactactcacgacgcgatcttccaagctacccagacccaaatgcagatgtccctcggaatcggatttaattgaacacgagcagaaactggatatgggtcacgagttgccccatgacctggcagcgaacttcggcttgggcgaaggctacctcgtagacgaatgtggccagggcgacggactcatgaggcatccacaacagcgcaaaccaatggagttaaacaggcgagccgttagcggaactccaagcaccttcaacagcgacggttgcgagtatcaaatcaatgtgtcgcgttcccgctgctctaatgataagattaactataaaaaccttgggcgcaaaagctttagctttacgaatccccaagtgcgcgagatcgagcgccagaatcagattcttttgcgcaagatgatgactgtgaagcccacggcgacgatcaaggctagcaccagtagcataaagatcaatgggcccgagaagcgacagacacctccagcgccacgactgtccagcgcagctgtgaaccggaagaagaatcagcgccagatcgacctggacaacgatctgctcaagcggaaactggaggccatcggcacacggcgaccgcaattcaagtga

SEQ ID NO: 41532 - protein, 595 aa, DROSOPHILA
MSGAGEHSDEESYGEESFEEDSESEVEVEEEEIEYIEPEESKPSDALLLGESDTQSESDVKEEFLSGNPHARRYLGARVVSYLSSSSDDESQVVITKTVAEVNQLSLRVDTPPEDETPSVRTLMPGSAHSRVKDEDEAEDEDDDEGDGENDNDNEDENDDEDAEVEEIEEEEEEIPGDEDDAQSDGSMGRQSADDSDEEEGTDVEVEQLEEDEPIVTAVCKKTVQKELPPPQKDIVSLVDASDNSSEHSVVTMCASGDETDNTLQPLTAKDSQSLKEQEEPEEPEQPEENQTEEHMPTSQPDLARVRYLEQQMTQMSELIMKSFQINGGAPNSQAFEQLAMATEMLQQRSDRRGDTESEMSSMTETTMTSARSLGGGIPPLTMRMERSQEALLTTRSSKLPRPKCRCPSESDLIEHEQKLDMGHELPHDLAANFGLGEGYLVDECGQGDGLMRHPQQRKPMELNRRAVSGTPSTFNSDGCEYQINVSRSRCSNDKINYKNLGRKSFSFTNPQVREIERQNQILLRKMMTVKPTATIKASTSSIKINGPEKRQTPPAPRLSSAAVNRKKNQRQIDLDNDLLKRKLEAIGTRRPQFK

SEQ ID NO: 41533 - DNA, 3227 bp, DROSOPHILA
tttttcgcttggcagccggtctaccgggtcttcctttcgtttgctttggcgtattatcatctccagcattttctttatctttcaactgcaagatttattcggttgaaatagtatacatagtcattattgcttccgatttacagaaaccgattcttagttttgaaaaaagcagtagcagtattttaaataataaattctaaataataaacaaatgcaaacctcttttggagtatccttttttgttgctttccttgccactttgggagtctcctttttgacgcccgcctcctacaaatacttttaagttagtttttatccctgcacgaaattgtgtattagcctacttccttgggaacttcatttgcttttgatttgatgggcatttttgttaaatatttttccataacccgcgttgcttgttcgttttcttaaatgctttgtttactattatttcccgccaaaaatatggaggggtaggcgcacataaacaccacagtacgaaaaaatactgtgacaatcgataagtgccttgatgagttatgaaggaacggtagaatttggaacaaggaaatgttttttatttatttatattattgttatttcaaggtgaattcgataaactaaaaatgcaatttttttaagaaaagaaagatataactatctatgtgcgaaataagtttataggactcaagaaagtatatataatatgctattgaaaaattggcgccccacattttgggggacatctccactcgcagagcctgtgcaagcttgaccaccttaaaggatatttcaggaaaatttcataatagaattaccaatcgtttttgagataagctcattaagtaccataatatagatccacataacaatttttctgcttttgtttccagccctgcccaatttatagataccagattaagtttcccgctaagatatgttgcgatcttcttgctctggtcacacttaactcgaaagccgcattattttgtttacatcgcgaatcctctgctaaatccaacgaaaagatgtccattgcaaacgtttccacgcactacatatccgagaaggtgtcccaagtgcgctggcttccggaggaactgcagcagagcgaacggttcgttactggaagctgggacatggaccagaacttcgtgcgcctctggcggctacaatcgaaccaatatgtcaccgccacggattcggaagtggaccagatacctcgctgcatggacaaggtgagaatggaggacgatgtgaccgccatggagttcgtcgacaaggacacgctggctgtgagctgtgccgatggtcagttacaagttccagcaatcatgaactcagctaaataaatgtctattttaataccaaacaaggtcatctcagcgtgtttaacgtccatcgagccgtggaggaggatcagatgcaacgtacgtcccgatcgggacgtctgcactgcttccaacgtagccaggagcccgctccttgcaccgacctttctgtttacggcacggatatcgccaccgccggcgaggatgggtgtgtaagcatcgtctccgtggaaaatgtgcgccaggtgaagcgacagattgaggcggacagcatggcgctgttttccatttgctatatcagccagcaggaactggtgactgccaataggatgggtgttatccgaatgctggacgcccgagtggccactgaagcgcagccgaagaccacctttatggtggcctcccaggatgacaagtcgaactttgtctcgtcccttgccaagcatccgatgcagcaacatattttactttgcggcagcgaagagggttccataaccgtctgggatatgcgaaacctcagttatcccgcctcctatctcagcgctcacaaaagtcccatcaacgagataggcttccatcaaaaggatcccagcaaactgttcaccgccgcagaaggtggcgaggtgtggatgtggtcagagaacaaagttctcgggtgcgactataacaaagacggacacagcccctggttgtctggcgatcgtgttcgctccctggtcgatgtggagggagtgctgagtaatgttcgcaagtccatcaactccttcgatgtgcatggaagtcgtctggtctgcggaggcgacacagaagccgtttacctagttgataatattgtttaaatgtcaagccttttgaattccttacctaaattatataatatttcaattgttgaaatcaattagttactgtatttaattttcgtatatttattattttctttatatactccaaaattggcttagatcaaagcacctgtcttacatctacgtctagtttaagcttaggactctatattcgtatacaggtgtttatgggtttaatgccttggcaattccaatttaaatattctcgttttgggtgctgctgtgttgtttggtcttatgattcatactcatatccgtcttaaatcctatttcgttggctaatttggaatagatttatgcgtgttttgaactaccttatttaatggatgaactaacttggattcaatgcatattaggctaagcgaatataataaatatagtatgtataagtatgtacagtgcagctcttaggcctacttttgttcgattctccgcgattcctcagatttgtattgtttgagcatttttaactgcatttggatgcggatttgggttatgagtattattacatcgttatgttcaattaggatttcaatttaacacgaacccaaattatttttctacagcaatgttgagtatggcatatacattattgtatttatcagcgatagagtgactatccccgtataattcactgagtggtcctcctttaaggtttcttatccagatgggatcctccagattttagtccctagtagaatcgttcgaacttgggcgccttgttgagtgcgcagaaataataccctgaatagttttgtgtggctccgggtggagtataatcgccgatgctgtagttcccgtagtcgtagttacccatgtgggcgtggtgatggtgatgggcgtggtgctggtggtgcatgtggtgggtgtgcggggggtggtaatgctggaaacctcctgcactccttggcttttgtcatgtgagcaggctgttgccaccaccaactccgctgccggtggaggactctccaccaactccggttgccccattgctgccattgctgctgttgttgttgccgtggacgcgcatgtg

SEQ ID NO: 41534 - DNA, 1162 bp, DROSOPHILA
cgaatcctctgctaaatccaacgaaaagatgtccattgcaaacgtttccacgcactacatatccgagaaggtgtcccaagtgcgctggcttccggaggaactgcagcagagcgaacggttcgttactggaagctgggacatggaccagaacttcgtgcgcctctggcggctacaatcgaaccaatatgtcaccgccacggattcggaagtggaccagatacctcgctgcatggacaaggtgagaatggaggacgatgtgaccgccatggagttcgtcgacaaggacacgctggctgtgagctgtgccgatggtcatctcagcgtgtttaacgtccatcgagccgtggaggaggatcagatgcaacgtacgtcccgatcgggacgtctgcactgcttccaacgtagccaggagcccgctccttgcaccgacctttctgtttacggcacggatatcgccaccgccggcgaggatgggtgtgtaagcatcgtctccgtggaaaatgtgcgccaggtgaagcgacagattgaggcggacagcatggcgctgttttccatttgctatatcagccagcaggaactggtgactgccaataggatgggtgttatccgaatgctggacgcccgagtggccactgaagcgcagccgaagaccacctttatggtggcctcccaggatgacaagtcgaactttgtctcgtcccttgccaagcatccgatgcagcaacatattttactttgcggcagcgaagagggttccataaccgtctgggatatgcgaaacctcagttatcccgcctcctatctcagcgctcacaaaagtcccatcaacgagataggcttccatcaaaaggatcccagcaaactgttcaccgccgcagaaggtggcgaggtgtggatgtggtcagagaacaaagttctcgggtgcgactataacaaagacggacacagcccctggttgtctggcgatcgtgttcgctccctggtcgatgtggagggagtgctgagtaatgttcgcaagtccatcaactccttcgatgtgcatggaagtcgtctggtctgcggaggcgacacagaagccgtttacctagttgataatattgtttaaatgtcaagccttttgaattccttacctaaattatataatatttcaattgttgaaatc

SEQ ID NO: 41535 - protein, 358 aa, DROSOPHILA
MSIANVSTHYISEKVSQVRWLPEELQQSERFVTGSWDMDQNFVRLWRLQSNQYVTATDSEVDQIPRCMDKVRMEDDVTAMEFVDKDTLAVSCADGHLSVFNVHRAVEEDQMQRTSRSGRLHCFQRSQEPAPCTDLSVYGTDIATAGEDGCVSIVSVENVRQVKRQIEADSMALFSICYISQQELVTANRMGVIRMLDARVATEAQPKTTFMVASQDDKSNFVSSLAKHPMQQHILLCGSEEGSITVWDMRNLSYPASYLSAHKSPINEIGFHQKDPSKLFTAAEGGEVWMWSENKVLGCDYNKDGHSPWLSGDRVRSLVDVEGVLSNVRKSINSFDVHGSRLVCGGDTEAVYLVDNIV

SEQ ID NO: 41536 - DNA, 2793 bp, DROSOPHILA
gccatccagggcatcgtacagatcctccggacgaacggcaaaactgacaaacttttcgttcacatcgttgtaaggacgattcacatggagctgaaccagtgtatccgcaaagcacactaccgccagtcccaaaagagccaaacacaaatgccacatgttttaatccagaattacgaatggaaagaccggagacctgtctgttgctcgatggctccacaactgaccggagtttcataatgactacctctaaataaactccccactcgatcatttccatctgatttcgctgccatccgcaagaattttgcgctgatcgctgccctcaatatgatgaccttcttccaatgcaccactaacgtaacccaaacccacatacaagtgggccgtggttggaatgccgtgcttatcaatgaactatgagatgacccaataaggttggggtaaatctgcggaggccagttcttcggcatcctcgctggcggtcacggtttgttagaagaaaagagaagagaaaccgtctcatttttttaaattaagaaggtttctcacacaaagtttaatgttacgaaccattttgcaaaacaaatcacgtcaaagctttcagttatactcacaaagtaaaaggagggtatattagattcgctgaaaagtgtgaaacatgtagaagaatatatttttattatatatatttatatttttgatcagagtcacaagtccagagtcagagtcgatcgtccacagtttctgtgatatacataaatatatgaacatgaatgtgaatataatgtatgccaatttcagatatggaaactattaaagttatgaagtatttgtgttctttgactagaacgtaaatatttccaattggtgtaaatttaaatagcgcgctcatcaacagatctatcaccaataagtgtgtagaaagttgctatcgtcatcgacctatctgctgttttccaacactaagttgaccgccattttgtacgtcaaaacagaaatttcgccaaaacttgaatagaacgttgcgacaattattattacagttaaacaaattgttatccaaaactacatgagcaatgggtagtaaccaagattggaacaaggaagactccaaaactgaggtcccacctgaggaagatgaccaagtgacagcatacattgagaaatcagtggcccaattggtaagttaagaaaggaaacatttttagttaaaatttatatacattttgatattattgtagggctccgaaaatgatcaccgtaccgcgctggtcgatgaaaagaagaaggagttggatgtcctgattgccgagaagtacaccactttgaacgacttaacccatgtcaccaattcccagaatcttgtggacgacatccactttctgcatacgaagaacgccaagatcctggagagcctcaatcaggcggtcaccgccaagagaaacgtctcccaggcctacgatgaccattgcaagaaggcgctcaaggtcaaggccgagatgcaggagcagacgaaatgcttcgatgagttcaccgtgatggtatgtaatctcctcaagaaaccagtaatcttgcaggtttgtaaaattctatccaaatattttctatttcagaactaccacgatctaaagaagaccatacttaacaccaagaaagaaacgcaagaaattcgcgctaagacggctttaaagaccgaggagctcaaaaagaagcgagaatttgttaacaccacccaaaagtcaatggctaatgatatccgtgttctaggccagatcgaacatgacctcatgtgagtaactattaggagttataaaaaaaccgtacaagaacatgtatcccaaatgtttgttttttccacagtgggataatcgaagacttaaaatccaaaatttctgcaatttaagtacaggaaaacaaataacacttgaacaatcgccaaaggtgcattggaaaatacggtcgtacctcatcttccaaaaaataatccttaatattgctgcgttttccaaataatttgacaaataaagtactttttattctgtaatgcttttttaattaaaccttcttcaaggagcgaatcacgatggctatcctgatggttctaatcatcttcgacgacgatcaaaatatccttaaagctgaatggcgtgaacggatatccgtttcccacatagaacttgctcatgaactccacccagtgcaagcgcaatgtgtgcaggaaggcggaaagaccctccatcatgaccatgatagcgatggtgaaaaactcccaaacggcaaagatgaaaaacagcccaatggcgcccacgtagccgttcatctgaagtcccatcgccagcaccatagtccacagcacctccgatagctctgaaataagatctgcatgaagtacaaattcaattactgacttagcagattcttacgggcatgagctaaggacaaggcccagagacgaagatatgaggccgtgtgtgagatggtactaaggatatactcgattgtgtggatggcctggtggatccagatttcgctcatcggctcgtcatcctcctcgctgtgtcctcccgactcatgcgcttcggctacctcagtgataatgatctccttgccagttgtcacctctatcttctctacgatctcgtccacttcctccactggtccagcaggctagaaggtatatagatatattattaggtaattgggcaattatgacagtcccaataatttaccctgtttcggcgttggtatttaatgtatagaggttttccaagcagaatccacggaatgcaaaga

SEQ ID NO: 41537 - DNA, 661 bp, DROSOPHILA
tcgccaaaacttgaatagaacgttgcgacaattattattacagttaaacaaattgttatccaaaactacatgagcaatgggtagtaaccaagattggaacaaggaagactccaaaactgaggtcccacctgaggaagatgaccaagtgacagcatacattgagaaatcagtggcccaattgggctccgaaaatgatcaccgtaccgcgctggtcgatgaaaagaagaaggagttggatgtcctgattgccgagaagtacaccactttgaacgacttaacccatgtcaccaattcccagaatcttgtggacgacatccactttctgcatacgaagaacgccaagatcctggagagcctcaatcaggcggtcaccgccaagagaaacgtctcccaggcctacgatgaccattgcaagaaggcgctcaaggtcaaggccgagatgcaggagcagacgaaatgcttcgatgagttcaccgtgatgaactaccacgatctaaagaagaccatacttaacaccaagaaagaaacgcaagaaattcgcgctaagacggctttaaagaccgaggagctcaaaaagaagcgagaatttgttaacaccacccaaaagtcaatggctaatgatatccgtgttctaggccagatcgaacatgacctcatgtga

SEQ ID NO: 41538 - protein, 194 aa, DROSOPHILA
MGSNQDWNKEDSKTEVPPEEDDQVTAYIEKSVAQLGSENDHRTALVDEKKKELDVLIAEKYTTLNDLTHVTNSQNLVDDIHFLHTKNAKILESLNQAVTAKRNVSQAYDDHCKKALKVKAEMQEQTKCFDEFTVMNYHDLKKTILNTKKETQEIRAKTALKTEELKKKREFVNTTQKSMANDIRVLGQIEHDLM

SEQ ID NO: 41539 - DNA, 5158 bp, DROSOPHILA
aaattcgcagcctaattgctcctattattaattaggaatatggcaagttctcagctcgttaaggctcattttagaatgtttgtcgggcaattgttttcaacatctttatggcattattaaattactattggcgtgcgccgaaacagcaggtgggggaaatccttatagagcgggtctctccaatttaaagcggctacttgttaaatttataatgcaatttggcggtgttaactattaacgaggttaagtggcgcaatttgaaaccacatttgaaggatttcccatggtttaatggtgtgcatttttaagcaccctagtgcacggcatttctagtacttggcttaataataaatgtaagaacaaacttatagaccaattaggttctagcaatttatcaaaacgttacgacgtgttgtattctttctaaggcgtagaaaatagcgaatgggaaagcttcttatttataattcattgtttgaggtaatttactattgaaggtttatcacttaaaagcggaaacagatatggctcagactttaacctaggcattatatgtagatatgaaacctatttacaagttttatatttctctctgaactcaaaatagaattaatatatagtattaaagatatactgctgtgcaatatataggaacaaaactaagcttccaattataataaatgcaataaattagtataaattcacatgaaacccttacctccgccgacgagaattacctccaaaactcgattggctttaaaaaaaaaaccggtaatagaattgtaactcgcctgctcaaatgttgtttaatgattcaacgagcgcactttcgtttataatgaattcaaccaaaagtccagtttccaattgcgatagcccaatatcgcaatatcacagttcacacgcacagctcgaacactaaaaaaacactgagccagctgagaggcaactgctaactgctaactgtaaaccagttcgacttcaaaacaacaactaagtgccgttcgctctcttcgccttctcttttctctcccgctttcttctctccacctcttcactgctttgctggtcaatctagccttgtgtgcgtgagtgtgggtgcgcctatcacgatgtacaggtaaacttttattattactaaatgtccagaagtctttaattaaaataattacttattgcgacaataagtaagaaggtgaaatgtaagacttcccaaattgcaataagaacaatagctgtgagagcaataataatcttcagcttttatcactgagcggagcgacataagcaagctgcactgtacttcagatgcaatgttgttgtttcagttgttgtagctgctccttggctttcacacgcgagttgtgggtgagccttaatcacatttattcgatggtgagtggagaaggaggtgctgagtgggcgagggagcggcgccgagagagcgaacgagcggttgacattgacaaccccccttttttgctgttgggagcgggcgcacgcccatgtgtgagtaggctaatatcgctacacttcgaagtttcgttgaatttgcgctctgttttgtttgcttctctctttatcgctctgcgctttggctctcccgttcgctatttgttgttaattcgaatacgaatataacttctagtttttatggtgcctttgcgctcggttttatgacaaaaccattttttttccactgcgggtaattaagaactcgctggcacgaataaccgaaccaattcaatgtgaatccacagtggaggcgatcgaggaacaaaaacagtccgcaccatcatttattaacgccaattgtcagttcaattcattttcttcaactgcttctgtgcgaagaaaccgtttcattgcgtcacaaagatgattatgctcatatattatcgaactaatggggggaattcaaaattatatagagctgtaaaacaggagccagctaataaatcggctagtatcaactccttataaatagcctctttacgcaatactattgaatacagaaaaataagccatcaaagtcagcattatttgcagtgtttgccgaccacttccccgataagccatacatatagagttacgtaactggagatcggcgactcgagtggccgggctttggctttatatagctaattaactggacgatcgaccaggagcacttgtgtgcaactcggcaaaatactatacttcagatgtgaaattgctagatttctagaatcgatcagattttccccattcataaactgggtctgcgactgtggctaatcagcgcaatactgattgatcgattggaagtgccattggacaatttatagagcgatccataaatcataatcgactggtatttattgtgcgctattcgcaactactcgagcccagcttttagggtttccgttccagctggagatctttgtggggacgcaaggcttctggaaaccgagaccccgagaaaaagatcacatgatagaacccccccatatgattatgatgattgcataaaactcgaaaactcgcgactttgcaaagagagcgcgactcacagatactctggagagtattatattcacatgacaagggttcgactaacacacacacacactgcgaacgtagtaggtgcgtacctgagtatctcagagatactcggggcttacgaaagagatagcgctacgcgtatctgccgctctgactttagctgcgacttctggcaggtgtttgcacaatgggtcccatgacaggtgtgccccgcagcccccagtaagctcacttttccgaccagtagctgtcagcagccagcatcacgtgccaaagtgcattcaaattgggcttaattgcacatactccctgctgccaaagcacgtgctttggatggctagtttacaggggatatgggatatatacgggtggataacccgtggcacagcttttacacctcgaacccgccgggtttttccagttgcttcgagttttttcgagtttttcgcttaccttcacagctccgaaaacgctttttatgtcaaagacacaccagattcgattccccgcgagtgcgagcgataaatttagaacttgtttgttgccgagcgagagtatctttattcgaatctgaatctgaatggagcgcagcacacgtctgctcaccgccagcgatcgactgcgtttaaatttggcactcgctgccgcgacttcggttcgaaaatctcgcgatcgcctcgaaatgcctcgcactctctgttactcagcacacacaccctgtgaattcaggcggctctctcggcgcgggcatgccaactatgtatgatcggtgaccgttatcgcaaatcagaaatcgacaaatacccgtactaaagtcaaaatcctcgagtgctacatgtgtctaccaaaaaaatggtcagtttccaaaaacctaatcactcttaggatcacccaattaatcaccattaatatgtgatatttttgcagtaactagatgtgcttgttgatagtgaggaagccaatctcaaaaaaaaaccaattgaactaacacttcttacaatttaaacttttaattagaatttagaatataaaataatattaagctaatttggtaacagtttcattttaaatttcaactgttttaagtgctgtaaagtgcataaagtgttaacaggtggctccacgcacaacgcgttagtaccttaccaaatagcgttttcactgcaccgctcaccacggccacactctgcctttgttttgttttgatattcccactgcatcgcatttaatttattaaaagctgttaccaaattatgtcctacgccggctatagccagctgcccagcggcagcgaccaggagcgcaggcaggcgcagctcgcggccagcacctacgacgtgctacagcggacgacggacagtatccagcgatccaaccagattgccatcgaaacggagaacatgggggcggaggtaattacccagatagtagccattaacagggctaactaatgctcgcttacgcatcaacaggtactcggcgaactgggcgagcagagggagtcgctgctacgcaccacgcgccgcctggaggacgccgatcaggatctgtccaaatcgagggtcatcattcggaagttgagcagggaggtgctctacaacaagatcatcctaatcctgattatcattctggaggtgggcatactcgtcggcttgctggtgctgaagttcgctcacctgtgagccaatgccattctattccaaagtcgtaaccaccaaacaggcgatggactatatatacctattaatcgttacgaattctttgtcctagttaataagcttataaatgtatatactccactaaaatgcacttccaattcaaaaaggtcagttttaggatatacccagcgatgaatcgggtggttgattatgtttattcatgttggctaaagcgttaatgccttagacgtctataatatgtattatggtagtaaaacacagataaaatcgggtctggacatcggaagctctgcactccgaagagtttagcccagtcccaacgcatatacatacgtatgctataacaatgataatatgtagttcgtgcagcacgctatgccacgactatttggcaaaaagcaacgttaattacattcagtgggcgacaacgagatagtagaacatcctgaacaatgtctgcataatacttgatctatgataaacggttacatatatgtaagtatgtgggcatcgctttggggatgcttctttgttcgagagatgtttgggatttcgcagagctgcgcctcctcattcctttggtgcagcagctctccgcttcagttgccttcaattgtccttcggaagaacgatggaccagccgaaaacgcggcgatcgaagccgcaggagaagagatcgcagtccagcagcggctcctccgcccacgctacagacgacaccatccgtcggtggccctgccgactggtccgtggcaatcgggcgactctctgcccgttcaaatcgaacagtcggatctgtcgattgtcatgcggtatggcgataattccaccagtggagaccgccaaacgattgaccgaggaatccgttcgaatggtggccaaggcggatcgcatgttgcgcagctcccagaccttgattgtacgatcatctgatc

SEQ ID NO: 41540 - DNA, 790 bp, DROSOPHILA
ccgttcgctctcttcgccttctcttttctctcccgctttcttctctccacctcttcactgctttgctggtcaatctagccttgtgtgcgtgagtgtgggtgcgcctatcacgatgtacaggtaaacttttattattactaaatgtccagaagtctttaattaaaataattacttattgcgacaataagtaagaaggtgaaatgtaagacttcccaaattgcaataagaacaatagctgtgagagcaataataatcttcagcttttatcactgagcggagcgacataagcaagctgcactgtacttcagatgcaatgttgttgtttcagttgttgtagctgctccttggctttcacacgcgagttgtgggtgagccttaatcacatttattcgatggtgagtggagaaggaggtgctgagtgggcgagggagcggcgccgagagagcgaacgagcggttgacattgacaaccccccttttttgctgttgggagcgggcgcacgcccatgtccagctgcccagcggcagcgaccaggagcgcaggcaggcgcagctcgcggccagcacctacgacgtgctacagcggacgacggacagtatccagcgatccaaccagattgccatcgaaacggagaacatgggggcggaggtactcggcgaactgggcgagcagagggagtcgctgctacgcaccacgcgccgcctggaggacgccgatcaggatctgtccaaatcgagggtcatcattcggaagttgagcagggaggtgctctacaacaagatcatcctaa

SEQ ID NO: 41541 - protein, 83 aa, DROSOPHILA
MSSCPAAATRSAGRRSSRPAPTTCYSGRRTVSSDPTRLPSKRRTWGRRYSANWASRGSRCYAPRAAWRTPIRICPNRGSSFGS

SEQ ID NO: 41542 - DNA, 3388 bp, DROSOPHILA
tcgctgttgttgctgttgctcccgatttaattttaaaagtttttgtcggacctgggctgcagtttgaagggataacttccgagcggcttgtacagtgttacctggggaataaagagggaggaaggaacataaatatagaagcaatctaaaatgaataatataacctttctggttgctattgctggtggttggatactgcggaaaggctttgtccgtctgggatcctgcattagaaatggcgtaggaacgcgaggtctgctgcgtctgacacttgccggtttggtcttccttcgactgttctatgtcctgttgaatccgattcctagccaaagcatcctcgagaaccacgaacgaaggtctattcgccagatccttgttgcagatcttaacgaaaggcggcaaagtttcggttttcttgatctcctctatggacttgtcattcttgctcttctccagcttttcagttgagtcatcatcgatgtcatttgaattccctttgagcacagctatgcactctttcttggtttccttagtgccattcgtcagtggggagttactactgtctgctccgctttggggattcttgcattcctgattaagtgagctaatttcgatgagaccatcagtgcccacggtaatcatgaaacagcatttggccaccgtttcgtcatttgatttggccaattgccctgatgattcattctcgcctggggcctccattttcctgaattttgatgtgttttccgggtgttgtgagttgatgtttcctaacgcatatcaaaaagtatatcaggcgacaaatgtactgtcaactttgaaatgctcatcgaaactggatttcccttactgtgtaagtagtgaccaaaacgttcttggtgtttaagattttagaaccatattaatattaataagataaaattatttaaaaacttgaaacagtatttatttcttaaaataattcaaattatatactagagaagcaagtctggtatcaatcagtatgtctcagctttatgatgtcaaacatttctacaccttttgtgctttaacatgtacacaaaattgtcatatccgtgagttggcctctccgggtggtgaagagttgaagatgttctgcacggagagctgtgagcacggatgcaatgcaacctcgtcgggcaagctgatcgccaatggaaacggtggcggcctgcagtcgcagggaaattcacagcatcagttcaccatgtcctacgctccactgtcgaccaacgatgtgccctccaagtccgaggtggaaccaccgcgactgggcatgtgcctggtcaccgagtgtccagagggtctgaggtaatttatacatgaatttccatgaaaagtgattcgatttctactcccttcctctccagcattgactgcaatgtgccactgccgaattctttcaatttggatgaatacaaaaatcacatgatctgctcgagctgtacccagttcaatggtggcttggacagatttggccagccaggtacagccggtccaagtgccagtcctagtgccaatccatatccaactccgatgcccaatcccatccaggcctctccttgcagctttcatggccagtgttgttcagccggtggaccatgcgctggatatgattcgcagccaaatccatcaagatgctatcgacaggaatcatcgttggctcaaggagccccagcgatgccgcagatcttttgcctggcaccacccagttcccatggtggcttaaatcagcccgtttacttgtgcagcctgattccagttccgccatcgtggaacctggtgccgctggcccaaccgcagcacttgacgcatcagcagctgctgacgaatcccgcacaggactcgcagctgccgttgcagcaattggtgcagtacgacctgtccttcaatcgcctgctggccgaattgcgcaaggaacgggagaggtcctgttgtgacctgcagatcccccagcctctggctttccagctgtatgcgcccacggttaggtttctagatcagccagattccagttcggcgaagagagagcctcattgcccgccggcagctccttgtgctcctccagctgcaccaccacaaccaccatcctcgtcatcatccccaacagccacatctgcctccgccgccgggctgccaagagctcgttcggccagcccgaagcgcagtcgttcgtgtctccggaacaaggatctctgggacagtggcggatccgtaccaggtccatccccctgctcctcgcccacccaacatgcgaccggaaatgtgtgcatgaagtgcggaaactgctggcattgtccgcgctgcaactgctccaactgcttctggcatcccggcttggtgcgagctcctccaagagatggtcgctagggaaggggactaagagccactcctacactgtaaaagaagaaagtgtaataaaattccaagacttttaagcaagcagcttgccactatttcttaattgaattcaataataagaatatttattcttgcaatatgaagagagagtcacttttaaggtttttttttcgtttattagtttgtaatatttaaaccctatttataaatattttatgatacataaaaaatgaattctttcacaatttctacagcagctaggacttatatcacaagtaatgttcgttaaacaatgaactgtaattaaaagtaattatcgatcagcctgcatgttcataaagctagccacgtagttggacatgaccgagtttattccgaaatggtcgtttctgggctcaaggggttgggattgcaaattccggtggccgggcaagatcagcgaagctggcggcaagggagttcttatttggcaaggatacggatccgttcccagctcagaaatccttgtgcgacaacgcctcactttccgggcagagggactaacttgggtgcaggtcctgctgctggattggcaatacggaggtggcggaaggagaaatctttgctgcagctcaactgccgtggtatgcgactcgggtgcttggtagttctgctgctcatggtaggcttggatgcgttgttgatacgccactgattcctggtaggcagttgagtatatgtaggatggatcgtacaggaaggcctgttgctgcattatataagtctccgtgttcatatgggcatctggatgcacaaagtgctgttgctgctgctgctgcggcgattgtgcttctggttgctgttgtatcagcaactggtgccgctgcaaatgctgctgctgctgttggagttgctgctgctggtgccaggaccaggccagagccttctcctccagctggcgctgctggttagccatcttcagctcgagagttttcatatcggatctcagttggtgctgcagttgctccct

SEQ ID NO: 41543 - DNA, 1329 bp, DROSOPHILA
atgtctcagctttatgatgtcaaacatttctacaccttttgtgctttaacatgtacacaaaattgtcatatccgtgagttggcctctccgggtggtgaagagttgaagatgttctgcacggagagctgtgagcacggatgcaatgcaacctcgtcgggcaagctgatcgccaatggaaacggtggcggcctgcagtcgcagggaaattcacagcatcagttcaccatgtcctacgctccactgtcgaccaacgatgtgccctccaagtccgaggtggaaccaccgcgactgggcatgtgcctggtcaccgagtgtccagagggtctgagcattgactgcaatgtgccactgccgaattctttcaatttggatgaatacaaaaatcacatgatctgctcgagctgtacccagttcaatggtggcttggacagatttggccagccaggtacagccggtccaagtgccagtcctagtgccaatccatatccaactccgatgcccaatcccatccaggcctctccttgcagctttcatggccagtgttgttcagccggtggaccatgcgctggatatgattcgcagccaaatccatcaagatgctatcgacaggaatcatcgttggctcaaggagccccagcgatgccgcagatcttttgcctggcaccacccagttcccatggtggcttaaatcagcccgtttacttgtgcagcctgattccagttccgccatcgtggaacctggtgccgctggcccaaccgcagcacttgacgcatcagcagctgctgacgaatcccgcacaggactcgcagctgccgttgcagcaattggtgcagtacgacctgtccttcaatcgcctgctggccgaattgcgcaaggaacgggagaggtcctgttgtgacctgcagatcccccagcctctggctttccagctgtatgcgcccacggttaggtttctagatcagccagattccagttcggcgaagagagagcctcattgcccgccggcagctccttgtgctcctccagctgcaccaccacaaccaccatcctcgtcatcatccccaacagccacatctgcctccgccgccgggctgccaagagctcgttcggccagcccgaagcgcagtcgttcgtgtctccggaacaaggatctctgggacagtggcggatccgtaccaggtccatccccctgctcctcgcccacccaacatgcgaccggaaatgtgtgcatgaagtgcggaaactgctggcattgtccgcgctgcaactgctccaactgcttctggcatcccggcttggtgcgagctcctccaagagatggtcgctag

SEQ ID NO: 41544 - protein, 442 aa, DROSOPHILA
MSQLYDVKHFYTFCALTCTQNCHIRELASPGGEELKMFCTESCEHGCNATSSGKLIANGNGGGLQSQGNSQHQFTMSYAPLSTNDVPSKSEVEPPRLGMCLVTECPEGLSIDCNVPLPNSFNLDEYKNHMICSSCTQFNGGLDRFGQPGTAGPSASPSANPYPTPMPNPIQASPCSFHGQCCSAGGPCAGYDSQPNPSRCYRQESSLAQGAPAMPQIFCLAPPSSHGGLNQPVYLCSLIPVPPSWNLVPLAQPQHLTHQQLLTNPAQDSQLPLQQLVQYDLSFNRLLAELRKERERSCCDLQIPQPLAFQLYAPTVRFLDQPDSSSAKREPHCPPAAPCAPPAAPPQPPSSSSSPTATSASAAGLPRARSASPKRSRSCLRNKDLWDSGGSVPGPSPCSSPTQHATGNVCMKCGNCWHCPRCNCSNCFWHPGLVRAPPRDGR

SEQ ID NO: 41545 - DNA, 3417 bp, DROSOPHILA
atattaaagtttatgaacgagaccttaaggagttgtggattatatagctacttacgggcctggttctccagatacagctgctcgaactcccgctcgatctgggcgaagaggacgtgcaggcgtgcacggaatggtgcatcttccggtacggcggccacgtcctccgtcaaactggtgaggcgcacagcccgtgtcttgctagccttcatgcttttcttttcgcctctttgttgtgtatctcgcaagtgattttctgagccgagctggtcggcgatatccgtttcctggtgggcagagcgcccgggggaatccaattagtgttcaggggttgcagactcgcgctctattgatccatcttccgctgctggcgatgcatttgcctctttggctgactggggaactgctgttgcacttggttttcgcaatgataatatacttattgcaggtgtttttgtgcgcggggggagcgggcggaacagctggtgtgtgtatcgagtgttatcgatgtgcgattatcgcacagtcggactgtggcacactgagagcaaattgaacaaattaaaataaaataattttgaaattgcagtttacatattaaatatatttatatcataaaaacgaaaaatcctgtaaaaattaactgaaaattcattatatgttatgaattagtttagaaaaattttcaacaaaaacacatctataaaaatgtacaattaacaaagttttttttttagtgcactttggtttgagtactagtgttgagaaacaattagttaattttgctgactttcaaatctgacacgtgaaggtaaataaattcaaatagaaatgtaactatggatcagcgctttcctgtaattatttattagggttgattatcttgtataaccctttgaaacggaagcattatccttaatcaacactgtgtacttgaacagctgtttggcccgtagttgtaggtactatttttgaaaacaccattgggagttcccacaagacaaacaaatccgtgcaccgttgtattggattccaatcgaacagctgacataccttcgggcccgttagttttcccgatcgccctgcatatgataccatatctcccattacagcgctgcagcccaatcaaaccggtttgtcgcctttcgacttttcggtggtctcagttcacatccatttccccaaccagtccaattgcttttatcttgctcctcgagtgttaacgaaattgcttaaatccacccacattcatcctttcattcagttcggcctgggagtagcagcatgaaaaacgttttggatgtcatgtcgatgcagcagcacgtggagttgaacaaggcgcagaccatgaagcccatcgactatcggtaagttgaatgatccaatctaaagataccaccaatatatacatatctgtgccatctgtgccgcagcaaaatgaacaaacccggcgtggtgccgatgtacatctttgagtgcgctgccaagttgaaaatgaaaccgctgacggcggcctgtgcggccatagtgttccatcgcttcttccgcgaggtcaaggccagcgactacgatgagttcgtgagtaatatatgcccccaaaacgaccccatctcatgagaaactttctggaatccacagctcattgccgcgggctcgctgtacttggctggcaaaattaaggaagacgaaagtgtcaagatacgcgatgtcatcaacgtggcatactgcacccttaaccggggcaatgatccagtcgacctgaacgatgagtactggtcgatgcgggatgccattgtccaggctgagctgctcatcacgcgcaccctgtgcttcgatctcaacatagatctggcccacaagtacttactccactacatgaagaccctacaagactgggtgggcactgaggtgtggaactcggtgcccattgccaaggcagccgcctcgtatctgcaagactttcaccacagcgccaatatcctcaagtacaagcccacccatgtggccattgggtgcctgtcgctggccctccagacctacggcatccaggtgccgctaaccgacgagtccgacgaatccgccatgtggtacaagcccttggtcaaggacttcacccgagagaaccagtgggagatcatcgagaacgtgatcgaggtctacaagaacgagggcttcctgaatgccacctaatcgctgagagagactgccaaaaccattccttctgccatctgaacttatttattttcccctcgccacctcataaaccaatctcagatactactagacgtacatatgctcaaatgtccaatgcatttacatcatgcccttgccaaaacaaataaattgaccggtaatgaaatgcttatgtgatcgacgggcgaaagtacatttacctatcagcgaagacgatagatctaaagtttacaacttatttatacactgattcaataaacaattgttctgtgaaaaatgatattgttaatgggtctttggagttgtgaaatgctttaagattctgaggaaaagcaaaaaggtgtttggcgcttttatttcaatcaaattcattatacttttaagctgttaaaagttttacaaaaaaatattacactttatcaaacaaatttaaataaatcgctctgtatttgattaaattccgggatgggtggcaacccttagccccagcccagcagtgttgactaacgcaggcatgtacaaaaacaatgctagttcgtaaacaaaacatattttttatacattacttggccagagcgaaaaaacaaggacaatatgcgtaagacgtgggtgaagcgagagaatatatacttcaagcccttctacaagcagaagtcgaagatgttcctgctgctgatcttcctggtcggaatttcgttcatcgcgtatcaggtgagagtctcgcaaggattttcctgtgcacggtgtttaatgtgtaaacaataacgataggccttctcgctgaaccagctgcccggagtgcctgctccgtggaatctgcagcagatcaagcgcaagcaccagcagatgatgcagtccctgggcagcaaacagcgcgacgtggacgatttcgatggcggaggcgccgatgcagttgctccggcaggcggggaaacctcacctgttgcgggtcacgaggatcccatcaagattgtcaggtgtgtagtagatgcattgttgctggcttgggaaaattcctcatcctcgtctttatcctttaggggcacacggctcttcgactacgacgcctacaagcccaacttcgagggcaagttccggtgtctggacggctccaaagagatcccgttcgaccacctgaacgacaactactgcgactgtgaggaggacggcagcgacgagcccagcacgaatgcctgcgccaaggggcgattctactgtcgctaccag

SEQ ID NO: 41546 - DNA, 1090 bp, DROSOPHILA
aacaaatccgtgcaccgttgtattggattccaatcgaacagctgacataccttcgggcccttcggcctgggagtagcagcatgaaaaacgttttggatgtcatgtcgatgcagcagcacgtggagttgaacaaggcgcagaccatgaagcccatcgactatcgcaaaatgaacaaacccggcgtggtgccgatgtacatctttgagtgcgctgccaagttgaaaatgaaaccgctgacggcggcctgtgcggccatagtgttccatcgcttcttccgcgaggtcaaggccagcgactacgatgagttcctcattgccgcgggctcgctgtacttggctggcaaaattaaggaagacgaaagtgtcaagatacgcgatgtcatcaacgtggcatactgcacccttaaccggggcaatgatccagtcgacctgaacgatgagtactggtcgatgcgggatgccattgtccaggctgagctgctcatcacgcgcaccctgtgcttcgatctcaacatagatctggcccacaagtacttactccactacatgaagaccctacaagactgggtgggcactgaggtgtggaactcggtgcccattgccaaggcagccgcctcgtatctgcaagactttcaccacagcgccaatatcctcaagtacaagcccacccatgtggccattgggtgcctgtcgctggccctccagacctacggcatccaggtgccgctaaccgacgagtccgacgaatccgccatgtggtacaagcccttggtcaaggacttcacccgagagaaccagtgggagatcatcgagaacgtgatcgaggtctacaagaacgagggcttcctgaatgccacctaatcgctgagagagactgccaaaaccattccttctgccatctgaacttatttattttcccctcgccacctcataaaccaatctcagatactactagacgtacatatgctcaaatgtccaatgcatttacatcatgcccttgccaaaacaaataaattgaccggtaatgaaatgcttatgtgatcgacgggcgaaagtacatttacctatcagcgaagacgatagatctaaag

SEQ ID NO: 41547 - protein, 259 aa, DROSOPHILA
MKNVLDVMSMQQHVELNKAQTMKPIDYRKMNKPGVVPMYIFECAAKLKMKPLTAACAAIVFHRFFREVKASDYDEFLIAAGSLYLAGKIKEDESVKIRDVINVAYCTLNRGNDPVDLNDEYWSMRDAIVQAELLITRTLCFDLNIDLAHKYLLHYMKTLQDWVGTEVWNSVPIAKAAASYLQDFHHSANILKYKPTHVAIGCLSLALQTYGIQVPLTDESDESAMWYKPLVKDFTRENQWEIIENVIEVYKNEGFLNAT

SEQ ID NO: 41548 - DNA, 2468 bp, DROSOPHILA
tgtcgcccacatagatgctgtttctcttgtccggcgaggattcaaacgacgtggaggcggatacgtccatggtcgtgttcagttgggtcagttggaggcctggaagaatcggttgctagtggaaattcggtttcggttgctggcgaggcgacgtttaaacatctggcgaagaactgtggagtacccagagttgaagagcgattatcagagacatgtatatagataatacgtttgccttactctctgcaaactgcaaatttgttttacttttctgcctacgtgtcgtacattgccagttgattatgttcagtcgggttttctcgactgactttaaagtctgcgccacacacgcacacacatttgtgctccacatatttgccttagaatttgtgtaattcacctgggcattctgtgttttcttaatttactcacctgaaaatttgtgtttagtgtgggtgttgttgcactgctggatgtttggggcacattggcagaggccttaattgacgactgtctgctgattgaaaactcaatttgattggcgctgattacgtttttgattcaatgcgtgctcttaatttaaataaaaacccaaaaaactaaagaaattaaattgtgattaaattcttcttgctagcgtcgaccagtgttgcctaatgcttaaaatgcaattataagagcgactctagtgcaagaaacgagtaatcgattctggttcgataggcaacgacttcgataaggcgcaaattaaactagttgtaaaggttttacgctatatgttgtatgcaagaaaatcaacataatttagctataaatataggctacacttatttttaattataagtccaaatttcttagtgcataggagtggaataactaattttatatcagtttttggaatgcccctaacatgtccgtggtattattatttagtaacgtcagggtcacacttttgttttgttttgctttgcaacttgacttttaaaattgcaattgcagcatggccgaagaacccgaggaacccgccaaggtatggattacataaatctattggacatcaggtgcctgattaagctttaactatgtttaatctcccatagagcttcgttatcttcggacgcgatgtggcgcagatcccgtgctttcgtaacagttttctctacggaatcagcggaggaatcggcatcggcttgctgacttttctgggcacctcgcgaacccacctgtccacccacgtgggcttcggctccttcttctgcggcaccatcgcctactggatgacctgcaggtaagtgactgtgattaaaaccgtgcggcgcccttatcacttaattatcaatgtggcatccgcaggtatcaatggtccgtcaggagattcgagcagcagcaattgcgtgaggcgatgagacgacaagccctttatgagggcacccaaagggagagagacttagatctgaagtcggcgtagcataagtcagatccttcattactacttcgatgtttgttttcactctaggataccaagtaatcctggcattgttaaatcccttgtgttgtaaactaccttttgttaccaaactttatagtagccaatatattatatatatgttgtaagtgaaatcttagcttgccactcgtagggaattaattatgccaccatctttgatttgggattgacagaaatcaatccatcattttaatgattgtggttcctaaaacctgttgggctttattgtgctttcgatttgatttaagctgatagagctagttgtttacttttgaagaaccttgaacccattttgacgaccttttaactttttaatagtttttttttaccatttacataaaagcaaaatttacagtctaaaagttgtatattcaatacgttctggtacgtaaaagggttatttaatgcaccatttttacaactttagatagtatactttttacttgagtgggagccatatcacaaaaatgaaatgaaaggttaaaaaagtatctaaaagtaagtttcaattaatattctgaaaaataattgcatttcatgtacgtttctctgaaatacccctaattcgatactatttataaatctggaagatatatagctaggaaatagatttatatatttgcctagtttgaacaccttgtgaacattttgtttaaaaaaaaagcgtatcgtggtactagaaaactttaagatacagataaataacttcactataccgaggttttggtgtttcttgagactgaaggacaatcttcaaaatggtcttaattcttgagatagaaaagctgcagttctcatgctgaatagtgatcagtacgattttatctgacagattgctttcctagctgaccacaccgatctcggatgggtatctgctctaatccgagatagcaggtagtagaactgctgcctcgtaacccctagacatggccatttccacgcacatgtaggcgatcctgca

SEQ ID NO: 41549 - DNA, 333 bp, DROSOPHILA
atggccgaagaacccgaggaacccgccaagagcttcgttatcttcggacgcgatgtggcgcagatcccgtgctttcgtaacagttttctctacggaatcagcggaggaatcggcatcggcttgctgacttttctgggcacctcgcgaacccacctgtccacccacgtgggcttcggctccttcttctgcggcaccatcgcctactggatgacctgcaggtatcaatggtccgtcaggagattcgagcagcagcaattgcgtgaggcgatgagacgacaagccctttatgagggcacccaaagggagagagacttagatctgaagtcggcgtag

SEQ ID NO: 41550 - protein, 110 aa, DROSOPHILA
MAEEPEEPAKSFVIFGRDVAQIPCFRNSFLYGISGGIGIGLLTFLGTSRTHLSTHVGFGSFFCGTIAYWMTCRYQWSVRRFEQQQLREAMRRQALYEGTQRERDLDLKSA

SEQ ID NO: 41551 - DNA, 3300 bp, DROSOPHILA
aggcgtgcacggaatggtgcatcttccggtacggcggccacgtcctccgtcaaactggtgaggcgcacagcccgtgtcttgctagccttcatgcttttcttttcgcctctttgttgtgtatctcgcaagtgattttctgagccgagctggtcggcgatatccgtttcctggtgggcagagcgcccgggggaatccaattagtgttcaggggttgcagactcgcgctctattgatccatcttccgctgctggcgatgcatttgcctctttggctgactggggaactgctgttgcacttggttttcgcaatgataatatacttattgcaggtgtttttgtgcgcggggggagcgggcggaacagctggtgtgtgtatcgagtgttatcgatgtgcgattatcgcacagtcggactgtggcacactgagagcaaattgaacaaattaaaataaaataattttgaaattgcagtttacatattaaatatatttatatcataaaaacgaaaaatcctgtaaaaattaactgaaaattcattatatgttatgaattagtttagaaaaattttcaacaaaaacacatctataaaaatgtacaattaacaaagttttttttttagtgcactttggtttgagtactagtgttgagaaacaattagttaattttgctgactttcaaatctgacacgtgaaggtaaataaattcaaatagaaatgtaactatggatcagcgctttcctgtaattatttattagggttgattatcttgtataaccctttgaaacggaagcattatccttaatcaacactgtgtacttgaacagctgtttggcccgtagttgtaggtactatttttgaaaacaccattgggagttcccacaagacaaacaaatccgtgcaccgttgtattggattccaatcgaacagctgacataccttcgggcccgttagttttcccgatcgccctgcatatgataccatatctcccattacagcgctgcagcccaatcaaaccggtttgtcgcctttcgacttttcggtggtctcagttcacatccatttccccaaccagtccaattgcttttatcttgctcctcgagtgttaacgaaattgcttaaatccacccacattcatcctttcattcagttcggcctgggagtagcagcatgaaaaacgttttggatgtcatgtcgatgcagcagcacgtggagttgaacaaggcgcagaccatgaagcccatcgactatcggtaagttgaatgatccaatctaaagataccaccaatatatacatatctgtgccatctgtgccgcagcaaaatgaacaaacccggcgtggtgccgatgtacatctttgagtgcgctgccaagttgaaaatgaaaccgctgacggcggcctgtgcggccatagtgttccatcgcttcttccgcgaggtcaaggccagcgactacgatgagttcgtgagtaatatatgcccccaaaacgaccccatctcatgagaaactttctggaatccacagctcattgccgcgggctcgctgtacttggctggcaaaattaaggaagacgaaagtgtcaagatacgcgatgtcatcaacgtggcatactgcacccttaaccggggcaatgatccagtcgacctgaacgatgagtactggtcgatgcgggatgccattgtccaggctgagctgctcatcacgcgcaccctgtgcttcgatctcaacatagatctggcccacaagtacttactccactacatgaagaccctacaagactgggtgggcactgaggtgtggaactcggtgcccattgccaaggcagccgcctcgtatctgcaagactttcaccacagcgccaatatcctcaagtacaagcccacccatgtggccattgggtgcctgtcgctggccctccagacctacggcatccaggtgccgctaaccgacgagtccgacgaatccgccatgtggtacaagcccttggtcaaggacttcacccgagagaaccagtgggagatcatcgagaacgtgatcgaggtctacaagaacgagggcttcctgaatgccacctaatcgctgagagagactgccaaaaccattccttctgccatctgaacttatttattttcccctcgccacctcataaaccaatctcagatactactagacgtacatatgctcaaatgtccaatgcatttacatcatgcccttgccaaaacaaataaattgaccggtaatgaaatgcttatgtgatcgacgggcgaaagtacatttacctatcagcgaagacgatagatctaaagtttacaacttatttatacactgattcaataaacaattgttctgtgaaaaatgatattgttaatgggtctttggagttgtgaaatgctttaagattctgaggaaaagcaaaaaggtgtttggcgcttttatttcaatcaaattcattatacttttaagctgttaaaagttttacaaaaaaatattacactttatcaaacaaatttaaataaatcgctctgtatttgattaaattccgggatgggtggcaacccttagccccagcccagcagtgttgactaacgcaggcatgtacaaaaacaatgctagttcgtaaacaaaacatattttttatacattacttggccagagcgaaaaaacaaggacaatatgcgtaagacgtgggtgaagcgagagaatatatacttcaagcccttctacaagcagaagtcgaagatgttcctgctgctgatcttcctggtcggaatttcgttcatcgcgtatcaggtgagagtctcgcaaggattttcctgtgcacggtgtttaatgtgtaaacaataacgataggccttctcgctgaaccagctgcccggagtgcctgctccgtggaatctgcagcagatcaagcgcaagcaccagcagatgatgcagtccctgggcagcaaacagcgcgacgtggacgatttcgatggcggaggcgccgatgcagttgctccggcaggcggggaaacctcacctgttgcgggtcacgaggatcccatcaagattgtcaggtgtgtagtagatgcattgttgctggcttgggaaaattcctcatcctcgtctttatcctttaggggcacacggctcttcgactacgacgcctacaagcccaacttcgagggcaagttccggtgtctggacggctccaaagagatcccgttcgaccacctgaacgacaactactgcgactgtgaggaggacggcagcgacgagcccagcacgaatgcctgcgccaaggggcgattctactgtcgctaccag

SEQ ID NO: 41552 - DNA, 1174 bp, DROSOPHILA
cccaatcaaaccggtttgtcgcctttcgacttttcggtggtctcagttcacatccatttccccaaccagtccaattgcttttatcttgctcctcgagtgttaacgaaattgcttaaatccacccacattcatcctttcattcagttcggcctgggagtagcagcatgaaaaacgttttggatgtcatgtcgatgcagcagcacgtggagttgaacaaggcgcagaccatgaagcccatcgactatcgcaaaatgaacaaacccggcgtggtgccgatgtacatctttgagtgcgctgccaagttgaaaatgaaaccgctgacggcggcctgtgcggccatagtgttccatcgcttcttccgcgaggtcaaggccagcgactacgatgagttcctcattgccgcgggctcgctgtacttggctggcaaaattaaggaagacgaaagtgtcaagatacgcgatgtcatcaacgtggcatactgcacccttaaccggggcaatgatccagtcgacctgaacgatgagtactggtcgatgcgggatgccattgtccaggctgagctgctcatcacgcgcaccctgtgcttcgatctcaacatagatctggcccacaagtacttactccactacatgaagaccctacaagactgggtgggcactgaggtgtggaactcggtgcccattgccaaggcagccgcctcgtatctgcaagactttcaccacagcgccaatatcctcaagtacaagcccacccatgtggccattgggtgcctgtcgctggccctccagacctacggcatccaggtgccgctaaccgacgagtccgacgaatccgccatgtggtacaagcccttggtcaaggacttcacccgagagaaccagtgggagatcatcgagaacgtgatcgaggtctacaagaacgagggcttcctgaatgccacctaatcgctgagagagactgccaaaaccattccttctgccatctgaacttatttattttcccctcgccacctcataaaccaatctcagatactactagacgtacatatgctcaaatgtccaatgcatttacatcatgcccttgccaaaacaaataaattgaccggtaatgaaatgcttatgtgatcgacgggcgaaagtacatttacctatcagcgaagacgatagatctaaag

SEQ ID NO: 41553 - protein, 259 aa, DROSOPHILA; identical to SEQ ID NO: 41547

SEQ ID NO: 41554 - DNA, 4971 bp, DROSOPHILA
gtacgcatacatctgcattgcctcgcgggagggacgatagccaggatatccggtggccgagcgctgaacgggcgccatgatagcatcgtcgtggtagtgatggctgcccgtcaaactcagctggctgtggtggtggtggtgatggtggtgggatggttggtggtgcgaggattggtggtgatgcgaaggattgtgatgttgttgctgctgctgtgtcgttgtcgtcgttatcgaggcggaaactgaggcgggcgctgcggggggattgtaggagccatcgccaaagggccggcgacgcagctcctcgatcctggcctgggtggtctccgcatcctcgaagacgtcgtcgctcatgctgctggcgtcgtcgggatgcgctgatcccgctggcggtcctcccgccccggggtcaccttcgccgcctcccagtcccaccgctgtgctggccattggtttcgattttattggattgtgtcttggccaaaagttgtgctgacgcttttatcctgagctttcactttctcattggtttagattcgggatttgctctgagctttatctaggctttcccctaattaactccgaaactgtctcttttatttgcgcatattgaatagaattgtgtcacattatcatcgacccctcttctgaggatttgtatgacctcctattgcggcgttcctttctcttttctttttataaactctttttttaggcaaaacgactgataaatacaagctattccattgtcctgtttgcgttaatatatggccgtaatgctcaatctactggttaaaaaataaccggaagttttcgttaagctgtgtctctcttttgttactttctctttgcgattttgacacttggcattgcttctcccaatataactgtaactggctagcttttatcgcctctcatagttttgacgttttctctgagctttctctcatcggcatttccgagttttctctttatgactttgacatttaccgttgtccgtcgctcccgtccggttgtgtggcacgtttttctgaatgaatccgctattcggggctttcgcctggagatggggtggtttgccgttgctattattatttcctatatgctataagcttaatattttcgccagccttatcagttggccagttttcctaatcgctattcgttagtttttcgctccgtacaattgaactaggtattggtttttccccttttttgttcggttgtttggttgcttggtgttttgtttgaagccactaattaaatatcatctatgtaaattgtaactagctaaacatattgactaatattttataggttatgcgctaattggtgctgttttcactatgaattaaacattaatctatttatagggttcgcaacaatttgcttggtgtttttctttatgttttggttaaagcttttggttaatttctcgttttcgtcgttaagtgtgaagattctccatgcgtttcgcgtccctcgtcgaaaatattgcgattgatttcaagggaatgggtgttatttcagttgttggtcttggtgttgttgttatttcactatcacagcataaataaaataatgtcatcgtcgttgccgcccccgccacgcgaaccctcggccaacatacaactggcataaaatatctgcagtcggccacttcctttcacatccatcctgagctttcggcgctcttgtgctttctcacactctctcccgcactttctctccctcttgaggatgtggcatttgaagagttcgaagagggtaactagttcagttgtaatcaagttaattatcaaacttaattgaataggaatatggggcgaagtatatgtggcaatttgtgatacaataagtgaagcaggacaaaggaaaatcaaaactcaatatgggatgaaagcaacacaacgataaacgttaacgaaagtataatatttcgttacctggaattcaattcaacatgcagtttaaaaagaatactgtacaaaggattcattaaaaatgcgcttattaaaatttgattaaaagctattttatatttaagctaattggtttaacttctcgccggtttagtaatttgtagaaacgataaaagaaaatagtgtataaggcaacagcgccaaaaaaatgttttctaaaacatttatataccccatttataaataatagaaaaatgtcaagaaattctgaaaatattttaacaaaacatttacattttaaaaacgcacaattaggtgtgtctagtcatcaaagttttgagtctttgctaattttgccaggaaagggtgtgcgacacggctacttgctaagatatgatcccagttctttgtagcacggtaactctgcacctcgcagcactatcgattgtttacatgaaaataatcgagtcggacgactatcgacgtacgcagaattgtaaaccagaagttaattgcaaataaaacgaataataaaacgttccgagaagattattaattaaaaatgactggtcgaggcaaggggagtaaggggaagttggggcgcgacaatgcgaccgacgatccagtcgatctagtgtacgcggctgagaaaatcatccaaaagcgcgttaagaaggtgagatgagcgtaaacaaattcgaaaaaggcgaccaaaacgggatgctccgctaaaaatggcaaatgcaatatgcgcagcacacgcaggatatatgtatagtccacaaggtcacatgtccttcgacattttttggccagaggacatctgctgctgcaaccaccatttgcacgatgcatgtgtgtgtgcgtagtgcgttcgtatgtgtgtgtgtgtgtatgtgaggcgtgtttttgtttcgctgaatggaaaatcaattagttgtctaagaaaatgcaatccacccccactccttcacttactcgattttccagggcgtcgtggagtaccgtgtcaagtggaagggctggaaccagcgctacaacacctgggaaccggaggtaaacatcctggatcgccgcctcatcgacatctacgaacaaacgaacaaatcctccggaactccctccaagcgaggcattaagaagaaggagaaagaacccgatccggagccggaatccgaggaggatgagtacaccttcaccgaaaacgatgtggacacgcatcaagccaccacctcatcggctacccacgataaggagtcgaagaaggagaagaagcaccatcaccaccaccaccatcatcaccacatcaagtccgaacgcaacagtggacggcgctcggaatctccgctgacccaccatcatcatcaccaccaccacgagtccaagcgtcagcgcattgatcacagctcctcctcgaacagcagcttcacgcacaactcatttgtccccgagccggacagcaactcctccagctccgaggatcagccgctgatcggcaccaaacgcaaagccgaggtgctcaaggaatcgggcaagattggagttacgattaagacctccccagatggccccactattaagcctcagccgacccagcaggtaactcccagccagcagcagcccttccaggatcagcagcaagcggaaaagattgccagcgaggctgcaacgcagctgaaatctgagcagcaggccaccccactggccacagaagccataaacacaacgcccgcagagtccggagctgaggaagaagaagtagccaacgaggaaggcaaccaacaggcgccacaggttccttccgagaacaataacataccaaaaccgtgcaacaacctggctatcaaccagaaacagccgcttactcctctttcgccgcgtgcccttccgccgcgcttctggctgccggccaaatgcaacatatccaaccgggtggtgatcacagacgtcaccgtaaacctggagaccgttaccatacgcgagtgcaagacggagcgcgggttttttcgtgagcgcgacatgaaaggcgattcgtcgccagtagcttgagcttcgacccaaacaaatgtcgggaaaacaaaccggaaaactgatacaattgtaaatagacaaaccaaaatgcgagaaagttgagagaagaattatgcagagaaatccacactaaatgttgctaagcattttctctttaggacttaactaatttattgtatttatttttagcgtaggttttagtttgttgttttattacaatgtttaatgtgcaagagtagtttaagcaagcgcaagtcgggtatttactaaatgactttatatatacataaattttcgctcattttttttatcagcattgcaatgattgaatattttcctatttaaattaaaaatttatttttctgcaatatcactttttaagattaatctggttgtcatttagtgaataggcgaaatgctgcggctgcttaacttgccaatgcaatagattgtaaaacttgcagcgtagataaatatgtatgtacatgttacatatatttaccacatattgtatattttttataacactttgaatctgattgaaaacaacacaagacactcaaatgctaagaaaactccatgcgaaaccgaagcaattgttgattacgcttacaaatatatacaatagaagatgcatatattcgagtagtcaccaccacgtttgccgagttggctatcccaatgttgtaattgtttaatattatatttcctcgcgccgactgattttacaaaagaaaaccccaaaaacatatatacaattgtagatttacaaatatttttagactttagctaaccaaaatctctacgtaatatttattttaacatgttctcttagcagtcattcaagactcaagtgctgcctttatgggttcagagcggtgcagtgcacagataattccaaatcgagcccatagactcattacttaaatcctatgtctatttcacaattttttttcacgctatgaaacagaaaactacgtgggagctgcggggaatttacaaactcctgcttatttcc

SEQ ID NO: 41555 - DNA, 1794 bp, DROSOPHILA
cgctcccgtccggttgtgtggcacgtttttctgaatgaatccgctattcggggctttcgcctggagatggggtggtttgccgttgctattattatttcctatatgctataagcttaatattttcgccagccttatcagttggccagttttcctaatcgctattcgttagtttttcgctccgtacaattgaactaggtattggtttttccccttttttgttcggttgtttggttgcttggtgttttgtttgaagccactaattaaatatcatctatgtaaattgtaactagctaaacatattgactaatattttataggttatgcgctaattggtgctgttttcactatgaattaaacattaatctatttatagggttcgcaacaatttgcttggtgtttttctttatgttttggttaaagcttttggttaatttctcgttttcgtcgttaagtgtgaagattctccatgcgtttcgcgtccctcgtcgaaaatattgcgattgatttcaagggaatgggtgttatttcagttgttggtcttggtgttgttgttatttcactatcacagcataaataaaataatgtcatcgtcgttgccgcccccgccacgcgaaccctcggatgactggtcgaggcaaggggagtaaggggaagttggggcgcgacaatgcgaccgacgatccagtcgatctagtgtacgcggctgagaaaatcatccaaaagcgcgttaagaagggcgtcgtggagtaccgtgtcaagtggaagggctggaaccagcgctacaacacctgggaaccggaggtaaacatcctggatcgccgcctcatcgacatctacgaacaaacgaacaaatcctccggaactccctccaagcgaggcattaagaagaaggagaaagaacccgatccggagccggaatccgaggaggatgagtacaccttcaccgaaaacgatgtggacacgcatcaagccaccacctcatcggctacccacgataaggagtcgaagaaggagaagaagcaccatcaccaccaccaccatcatcaccacatcaagtccgaacgcaacagtggacggcgctcggaatctccgctgacccaccatcatcatcaccaccaccacgagtccaagcgtcagcgcattgatcacagctcctcctcgaacagcagcttcacgcacaactcatttgtccccgagccggacagcaactcctccagctccgaggatcagccgctgatcggcaccaaacgcaaagccgaggtgctcaaggaatcgggcaagattggagttacgattaagacctccccagatggccccactattaagcctcagccgacccagcaggtaactcccagccagcagcagcccttccaggatcagcagcaagcggaaaagattgccagcgaggctgcaacgcagctgaaatctgagcagcaggccaccccactggccacagaagccataaacacaacgcccgcagagtccggagctgaggaagaagaagtagccaacgaggaaggcaaccaacaggcgccacaggttccttccgagaacaataacataccaaaaccgtgcaacaacctggctatcaaccagaaacagccgcttactcctctttcgccgcgtgcccttccgccgcgcttctggctgccggccaaatgcaacatatccaaccgggtggtgatcacagacgtcaccgtaaacctggagaccgttaccatacgcgagtgcaagacggagcgcgggttttttcgtgagcgcgacatgaaaggcgattcgtcgccagtagcttga

SEQ ID NO: 41556 - protein, 390 aa, DROSOPHILA
MTGRGKGSKGKLGRDNATDDPVDLVYAAEKIIQKRVKKGVVEYRVKWKGWNQRYNTWEPEVNILDRRLIDIYEQTNKSSGTPSKRGIKKKEKEPDPEPESEEDEYTFTENDVDTHQATTSSATHDKESKKEKKHHHHHHHHHHIKSERNSGRRSESPLTHHHHHHHHESKRQRIDHSSSSNSSFTHNSFVPEPDSNSSSSEDQPLIGTKRKAEVLKESGKIGVTIKTSPDGPTIKPQPTQQVTPSQQQPFQDQQQAEKIASEAATQLKSEQQATPLATEAINTTPAESGAEEEEVANEEGNQQAPQVPSENNNIPKPCNNLAINQKQPLTPLSPRALPPRFWLPAKCNISNRVVITDVTVNLETVTIRECKTERGFFRERDMKGDSSPVA

SEQ ID NO: 41557 - DNA, 2765 bp, DROSOPHILA
tgccattgtccaggctgagctgctcatcacgcgcaccctgtgcttcgatctcaacatagatctggcccacaagtacttactccactacatgaagaccctacaagactgggtgggcactgaggtgtggaactcggtgcccattgccaaggcagccgcctcgtatctgcaagactttcaccacagcgccaatatcctcaagtacaagcccacccatgtggccattgggtgcctgtcgctggccctccagacctacggcatccaggtgccgctaaccgacgagtccgacgaatccgccatgtggtacaagcccttggtcaaggacttcacccgagagaaccagtgggagatcatcgagaacgtgatcgaggtctacaagaacgagggcttcctgaatgccacctaatcgctgagagagactgccaaaaccattccttctgccatctgaacttatttattttcccctcgccacctcataaaccaatctcagatactactagacgtacatatgctcaaatgtccaatgcatttacatcatgcccttgccaaaacaaataaattgaccggtaatgaaatgcttatgtgatcgacgggcgaaagtacatttacctatcagcgaagacgatagatctaaagtttacaacttatttatacactgattcaataaacaattgttctgtgaaaaatgatattgttaatgggtctttggagttgtgaaatgctttaagattctgaggaaaagcaaaaaggtgtttggcgcttttatttcaatcaaattcattatacttttaagctgttaaaagttttacaaaaaaatattacactttatcaaacaaatttaaataaatcgctctgtatttgattaaattccgggatgggtggcaacccttagccccagcccagcagtgttgactaacgcaggcatgtacaaaaacaatgctagttcgtaaacaaaacatattttttatacattacttggccagagcgaaaaaacaaggacaatatgcgtaagacgtgggtgaagcgagagaatatatacttcaagcccttctacaagcagaagtcgaagatgttcctgctgctgatcttcctggtcggaatttcgttcatcgcgtatcaggtgagagtctcgcaaggattttcctgtgcacggtgtttaatgtgtaaacaataacgataggccttctcgctgaaccagctgcccggagtgcctgctccgtggaatctgcagcagatcaagcgcaagcaccagcagatgatgcagtccctgggcagcaaacagcgcgacgtggacgatttcgatggcggaggcgccgatgcagttgctccggcaggcggggaaacctcacctgttgcgggtcacgaggatcccatcaagattgtcaggtgtgtagtagatgcattgttgctggcttgggaaaattcctcatcctcgtctttatcctttaggggcacacggctcttcgactacgacgcctacaagcccaacttcgagggcaagttccggtgtctggacggctccaaagagatcccgttcgaccacctgaacgacaactactgcgactgtgaggaggacggcagcgacgagcccagcacgaatgcctgcgccaaggggcgattctactgtcgctaccagaagcgtcacatcacgggccggggcctggatatctacgtggccagcagccgcattaatgaccacgtgtgcgactgctgcgacggcagcgatgagtggagcacggcgaccaagtgtcccaacgactgtgcgtagtcgcaggccgacgggaccccgttcccactcccattcctcttccatctcctccacctgtgcacctaggacaccaatctcaaggatgaagatgtcgggcggcgcatcacaagcgatattttttgtacgagtacaatagaattgtaatttattttaaaataagtagattgaataaaagaaacgaattccaagaaacacaatgtggcctgttccagttttcacattcaaagaatctgatggatttaatgtgtacaatttgtttaaaactatgtttaatttggtgccagaggagcagctgcaagattagatctttgtggacatgtgaaaaaaagaagctgccattttatccatatatgcttattcattttattaccagactcacaaaaatcagtagaatttacattgggaattccttttttgttttgttttcttttttttgctcgactttctctgcgcgatttttggtttcgaattcgcagcgttttcatttataatgttcaatttacatctacgaccgtctgtaattttagttaatatggttcttcttgcctaaaaatgttttgtgcagtttaatccgtaaaatgtacatcgacaaactctaaagcaattttgaactgcaaattctacaaggtacgaaattttgtgtgtaattaatttttcccttatatgcacagtacgtctcactggattttctcttggtttgctttcttggctggctttcttgtcttgttttggatgataagcggaagcggtaatgatctccacatcgatatacataattagtttaaggaacgcgcgccatcgcatttacaattacttctcggatctgaattggcaaaattcactttattcacttgcatttgcattgagtacttcttctttgacttgcccagcacaatcagagaaaactacgtcgtctatgcctggacgagctgattgctatattgctatcgacgctctcgtctcacaaatttgatactttgcccccagtttgcgatggaaa

SEQ ID NO: 41558 - DNA, 642 bp, DROSOPHILA
atgcgtaagacgtgggtgaagcgagagaatatatacttcaagcccttctacaagcagaagtcgaagatgttcctgctgctgatcttcctggtcggaatttcgttcatcgcgtatcaggccttctcgctgaaccagctgcccggagtgcctgctccgtggaatctgcagcagatcaagcgcaagcaccagcagatgatgcagtccctgggcagcaaacagcgcgacgtggacgatttcgatggcggaggcgccgatgcagttgctccggcaggcggggaaacctcacctgttgcgggtcacgaggatcccatcaagattgtcaggggcacacggctcttcgactacgacgcctacaagcccaacttcgagggcaagttccggtgtctggacggctccaaagagatcccgttcgaccacctgaacgacaactactgcgactgtgaggaggacggcagcgacgagcccagcacgaatgcctgcgccaaggggcgattctactgtcgctaccagaagcgtcacatcacgggccggggcctggatatctacgtggccagcagccgcattaatgaccacgtgtgcgactgctgcgacggcagcgatgagtggagcacggcgaccaagtgtcccaacgactgtgcgtag

SEQ ID NO: 41559 - protein, 213 aa, DROSOPHILA
MRKTWVKRENIYFKPFYKQKSKMFLLLIFLVGISFIAYQAFSLNQLPGVPAPWNLQQIKRKHQQMMQSLGSKQRDVDDFDGGGADAVAPAGGETSPVAGHEDPIKIVRGTRLFDYDAYKPNFEGKFRCLDGSKEIPFDHLNDNYCDCEEDGSDEPSTNACAKGRFYCRYQKRHITGRGLDIYVASSRINDHVCDCCDGSDEWSTATKCPNDCA

SEQ ID NO: 41560 - DNA, 2984 bp, DROSOPHILA
acgctacgtttaagtaattgcgttttggtggacatatgttttacattgagaaatatgcatgtgcgtaggggggggggaggggagagagaggagggtggaccttaaatcatctcctgtttatctggcgaccataaattaaggcattagccgtcgtccttccttcgaattgcatcgaactgtttgcattgcgaccgtggcacttggccgtgcagctgctgccgccaaatgtggggtttacactgcggcccgggttaaccgcaatcgaagtcgtatccttaaagagataacgaccccaccaatcccggccccaccatccgccatcattaatggcccagaagaagtgggcatgtgccccggaactcaaggtacaaccatcgattcattttattgtgtagattttttaatttcaatgaagttttaagtgtattaaggccacatttaaatatataaaaaacatagcatagtaattatacactttattctcagtgcacttttattggcattgtttgatttagtcgccaatcgaaccattttcgcacttggaacttttgagtattggggctagtcgactaagtcggaggagacactggtcgtgaaaatgttgtggctggccaaagaaacgcttttcgtcctggataccaccacccttctctaccacaacttgccacactttgtttgctaatgagccaatttagttgcattgaacgcaattgcatcgtgtttgtgcctttgagtgtgtgtgcctttggtctggccgccgatacttgaaacttggccaatacgttctgggccaaatgccgccttgaggctgaggtgccttgctttgaaatggtaagtagggtccgccagtccactgccaaaagtggcagtgtgcgatggcacctcacattcactaacagcaatgcttgatgtccggtaaaaattaatgctttattcttcaaatgaaaattaaattgaacatattttatataacgtattaagagtaataagaatattaaagctagaacctcttatgcatcacggacagcagatacttgcgacaagcgtccaacgagtgtcgattcaaataggaaaactgactgaaatacttgccacactgtccacattgatgctgccactcgtggtggcccatggtgcgctgatgggagcgcagattggacctgaaatcgcaaagtcatagtgattaaaataataccaactggtacatatgtatataaacttgaaagatcaccactcacctatccgaaaaggctttgcggcaactgccatcaggacacacaaagggcttttcaccagtgtgcgtccttgtgtgtgcagtcagcatccaggaatgatcgaacttcttgtcgcaatcaatgcactcgaattgcccgcccactcgctttaaacgtctcttttccggcatttttctttgctggattggtgggatttccacaatatttgatggcactgtcacattagccaaaattggtcctttccgcttgagtttcgtgcgagtttgcttggactcagccgtgaccgtaatgatgccaaccttgatgccgtttctggtttttggtatcgaatcaaaactttcacctggcattttcagctcccagatggtatgactgagcagagagctttccgttattggtaggacactcatcagttggatgcctagtcgctcctccatttctctccggaccacaatgggtatatcgtcgccctgtcgccaatcgccgctcggttcactttgaccaaaacaataggtgaactttacgttggttttgggctccggttttgtggctaccctgctgtggtggttggtttttggcctgggcattggcggtaagtttggaatgacttgacaaaaatctgtaagttcgaaatgtattagtaccagatggtcgaaaattgcgaatgccttaccttcatatcggtcgtagaatcgttcctgcttgccattatagcgatcggacaagaaactgcgaaaaattcttggcatgattgctaaattcaccttaccaccgagctgctgtcaaattttccgaattttacaggccccgaaaagtcagtgagctacaaagcactgattgacgttgcccactcgattggaaattacattttgccaggacagtaacaatgcacttgaaaaaattgtaccattctggagggataagcatgcataacttgaataagtccatcgagggtatttactccttagattaattacattttctcagcggaataatcgggcttcggtatgtcacttttgaaaagtaaatccctttattttcgtatccaatcagattttatttgtaaaggaaaaaaattagtttactcagtggtctattgatgtttattccatatcatcacaagatcaatctgccacaaagttattttataaaaaatttatttctgaccagacctcaaatttgacaaacaaaattatgccgtcggcaacaaaaagtttcgatttagcaaggggtacgtatgtacgtcgataaaagttatcgggaaaagtgcaatactgttggtgaaacgaaccaggcgggtataaatgcttttataatataaaataatccaaaataaaataattccaaaagtgttatttgtaaataatgctattaaatttaattacttaaatggacaaagtgtagtaaaaaagtaatggcgaacatcggaattaaagcagttaaagtggtggccgcttttttctctggagaacagcttttattccgatagtaatcgaaagattttgaccaaatcgaaatcgaaaaaagttacgattatcatttacgaatttgattttcaaacttgaactaaggttatcttctaatgaaattaaacattgctttggaattttatgtcttttattataaataaattatatttactgtctaaaaatctgttaaatttttaactctaagtgtggattgatttaaatcctcggaaaaagacgaaaccagtggcgttgaccgccgaaagtgaagtaaacaggctgc

SEQ ID NO: 41561 - DNA, 852 bp, DROSOPHILA
atgccaagaatttttcgcagtttcttgtccgatcgctataatggcaagcaggaacgattctacgaccgatatgaagatttttgtcaagtcattccaaacttaccgccaatgcccaggccaaaaaccaaccaccacagcagggtagccacaaaaccggagcccaaaaccaacgtaaagttcacctattgttttggtcaaagtgaaccgagcggcgattggcgacagggcgacgatatacccattgtggtccggagagaaatggaggagcgactaggcatccaactgatgagtgtcctaccaataacggaaagctctctgctcagtcataccatctgggagctgaaaatgccaggtgaaagttttgattcgataccaaaaaccagaaacggcatcaaggttggcatcattacggtcacggctgagtccaagcaaactcgcacgaaactcaagcggaaaggaccaattttggctaatgtgacagtgccatcaaatattgtggaaatcccaccaatccagcaaagaaaaatgccggaaaagagacgtttaaagcgagtgggcgggcaattcgagtgcattgattgcgacaagaagttcgatcattcctggatgctgactgcacacacaaggacgcacactggtgaaaagccctttgtgtgtcctgatggcagttgccgcaaagccttttcggataggtccaatctgcgctcccatcagcgcaccatgggccaccacgagtggcagcatcaatgtggacagtgtggcaagtatttcagtcagttttcctatttgaatcgacactcgttggacgcttgtcgcaagtatctgctgtccgtgatgcataagaggttctag

SEQ ID NO: 41562 - protein, 283 aa, DROSOPHILA
MPRIFRSFLSDRYNGKQERFYDRYEDFCQVIPNLPPMPRPKTNHHSRVATKPEPKTNVKFTYCFGQSEPSGDWRQGDDIPIVVRREMEERLGIQLMSVLPITESSLLSHTIWELKMPGESFDSIPKTRNGIKVGIITVTAESKQTRTKLKRKGPILANVTVPSNIVEIPPIQQRKMPEKRRLKRVGGQFECIDCDKKFDHSWMLTAHTRTHTGEKPFVCPDGSCRKAFSDRSNLRSHQRTMGHHEWQHQCGQCGKYFSQFSYLNRHSLDACRKYLLSVMHKRF

SEQ ID NO: 41563 - DNA, 17255 bp, DROSOPHILA
cttcaaggtagttttacagagcttgaatcatagtttctactcctttcttctctctctctggcctcacttaagtttaaatcctttgcgatcttatcggaaaactcatacatcatttagtgtaggtattcagagtagtggtaattaatgataaaataaaatacaaaataataagagtaaaacaaaaacaagacttaggcgctacgatttaaaaattagtagtttaaattgctagagaataaattaaagacgcctggcgggtgagcgattggtaaatgataaataaaggcaggactactacatcaggatctactgatttcagtgggctaattaaaaccaagagctatatatatatatagacatacaatatatatatatatatatacgtgtggggtgtatgtacagagctacttaaagacaaacgaaacgaataagtacacgattcttcaattactttagcggggcgagggaaaagtgggctgggcacatgggttaattacaatgcgcataggatttatatagtacgtaaagcatatatacaaatccagggcgggccgatttccatggtagcatatataaaatcccaagaacaatttgcagtatttaatattaaagttgtagtacaatttagatcactatagggggttaccaattgaaaaaaactttaagcagaatagtaaatatatcaatatatcagttgaaatcgacccatcctgtttagcatatataccgtgtgtatagatagtttctctatgtggtaaacgatcggctcgcgttaagatctatcactagcatatacagttagttctagtctagtgctaaaagcagcaaacagaaacggctccagtcgggaaaatccatgatcccgaaccctaccctcctggccttacgtatcatcatcagactggcttggttttctagggatggtgctagggaaggtgttggtgtttgggatgctcttgtgatgggttgtgttggctgtgatgcatgctccgtggcagatcactagtccgtgatggagatctgcgcatatcccaccagtgatcgttcgtcgggcacttcgcccggctgcacgccggagctcaattggaaagtaatcgttttcatcgttgcactggcagctatcagttgatccagatgcgttgccatcggttgggtatccagcgcatcaacgagtccggcgtctaccagttctgtagcgataccctcggcagtgtccttgcccacaacgaactcgaagcgaatgtcgtgaagttcacgtcgcaagttgcgcatgcgaaggacaagattgactggtggcgcctcgccggccgcttcgctaggtagtggtaattgagcaatgccagctgttagctcttgggctgcaccagcaccagcagcagctggagctccaggcgtcactgtggctgaggaaacactgtgggttatttcgggagaaggctcttcccggtcgctgtccgatgagtcggctctttccaatcgattcatgggtctatcctcggaatccgagtccgaagatggatgttttctgtctcctgttccggaaccggtggcagagccaccattgtcctcctcttcgctagaccagacccattcgcctgtcaccgtgcgatgcaaacggcccgaggctcctggttggcgtttcgccgccttgtgaaccctggtctccatactgggcccagattgcagcaacgtctgggtgagatatttgcgatccttggccttcttgaagaaagcgtgcttcaaaagctcactagccgtgggacgtttcgatggctccttttgcaagcactcgacgatcatcttgcggaatgtcttgccatacgccttatattgatctttatcgtccgcacccgtgtccaaggtgggcggatcattttgcagggtcagcattagcaccttcatgggcgggtatttatggtatggtgcagtgcccgtggccatttcgatagctgttattccaaaggaccaaatgtccgccttaaagtcatagccatgatcctgctccatcacctcgggagccatccaacacggtgtgcccacaaaggtgtggcgcactttctgcctggacaaatccctgccagtggccagccatgcactcacaccgaagtcagcgatttgaatggtgccatcgtcaccaatcaaaatattgccggccttgatatcacgatggatttgcccgttcgaatggaaatattccaatccctttaggacttccttcagtaccgtggcaatggtggcttcgtcgaagacaccctgtttgcagttggacgttcgcatcttgtgcttgatgatgtccagcaaagaaccgccttctagaagtcttagcaccaaccagagctcttccctaaccacaaatgaggtgtgataggtcaccacgttctcgtgaaaacaggaggacatggcctgaatctccttgagcagctcgtccatcgatgtgttccacttctccaggttgatgcgcttaatggcgcacttctcgttccttggaatacagtaagccccatggacaacggctgtggcacccacaccaatgacgtccctcagctcgtaatcgtccttggagttcggccatgtatatttctctggcggtgccgcagctcctggtaaggttgctgcaccagcaacattattgctagacagattggcgggtatggaggtcatgctcctgctgcttgcggttccgtttccaggtgcgactgtgtgaggcggcggggttcctggacgtcgtcggttgttaatagccggctgactttgcgatcttggggtattccgcggacggggttgcttggatatgggtggggttttctggggctcctccttttttatcggatgaaactcctcgtcctgctggcggtaaacggatggatgctcgttctccgattcccttcgttgttcttgctccgtttgctggactttatagctgcccgagttggaactctctctgggtccttctgattgtttctttttaggattatgctgctgctcttccttcttggcaaaacatccaaagattcctgtatccttcggatctctttcttgggattctttgctttggttctggttgttgttgttgttggcgatgtgtgccacctctgcaagtggagaaaaaaatcagaacggggtaaagttagggaccttgccttggtttatcgttaaacaaatgtcaactgatctacgtggaagatgatcaacgagctgcccaaggtggattcaggaagtttttgggaaaatctagttgtgaatatcgggatttaacgaaggaatcccggttccgaatgcaaggtgtggaaagggattgattaccggattaaagtgtatgatgagttagtaatcacttcaatttagactataatacattcggaagttgttaaaaagttcatattgtcgcacacgtacattgaatgaatacaacaaatatttgggggaattaccctgaattgtttacaaaaacgtttgtttaacgttcgacacatgtcttactgggaatagttatattcatacccgctttcttcccccttcacaatatgataaatttttccacgttttgctgataagattttactgcatgtatattatgtgtggagcactatctgagattccgactgttcggctattgtttaacttttttcgcccacgactgtattcataagtgcgatctgcgctctcttaaattgtctttctcttcgacgctcatgctctcttccacgcaacataaaaaaagttcaatcgcatggaatgaacagagagagagagagagaaagagagaagtgtgcgagagggaccaatgaccgcattgagctatttatagcaacaaataacgacaacaaaaataacagagctatacaacaaagataatgtgtgtggaaattgtaattaagttttcaactaaatgtttacaatttcagctttcctttatttgcctccttcattttgattacatcgaaaaacccgaacacgataagcttgcggttaaaaacggtaagaagaacaagagcaattcgataactgtgacagcagcgataaagaaaacgcgtttccagttatcggacgtgtcatgtgccacttaattaaaccaactaactttttggaccaacaacatacttggcgaatttcgcaatttaacacttaggccaattcaaataaagaataacgccgcaggaaaacaaaaaatatctaaatgtttacacaacaaacaaaatgcgaagcggggggagacaggaaatggcctttaaaaacacttggcaaccaaaaataaaattaagaaagctaatttaagcagaaaaccattttaaaatggtagaagagaaagctaagttaagctaattttcacagatacacttgaatacttttcttatgacagtgattgaagatttaaaacaaaacgtcgattttggaatttgaaaactcgatgacaagtcaaaaactcaaaacaaaaacagaaaactatgaagatctaaacaaaaagcgtttaaacaaaactcaaatttaagcttaaatcaatgacaaatatgaatttaactggaaagtgtgagtaaatgattttatttatgcagacaaatttcacaattaatcaataccaagagtagttggagaaagagagagagagaagagaacgcgggagagacacacgatcatgtgcaactgataagcattgtcacacgactttacacacacacacacacacgcacacgtttggaagttcaataaattttcatttagggctttattgatttctcggcaaggaaatcaaaacaatttacgccaaatgctgaagaaataattacacgattctcgttgctgctactttttttttgtattctgctccacacgccggcgcgactgcgactagtgtcgttttttcggcgtagcgatcgcttcaaaagccgcgcaacaaatgagcgcacaaaagcagaacaacaaacgcaatggcaaagccaatagcagcgcaggcgacgtcgacgtcgtaacaacggcttgtggcaaaaacaacatgaatatgagagaaaagcacagaaagttgtattatgcgagcatcggataccctaccactaaataatttcgtcttaaagctttgctttccagaattctgcggatttaaatgtcttatatagattcttaaatcaagatctccacgaatatgggggttagtactttgaaatatgcataagccaaacgactgaagggtattatgctagtgtggaaagctgaaactagaaatatacaaaaataaatttattgagtaaatatcaacaacagaaaagaagggcggtggggcgggggtgctggttgagaatgaggaagcagagaggtagagagcgccagtgagagcgggttaagagccgcacagtgggcgtcatagatgaaaactatctgttattagcgataaaaaattgtttcgataaaaaaaaaaattgaataaaaactgtaatttcaaaatgctaaatatgaacctcaattttgtttctggtaaaaataaattggaataatagttcaaaaatatagaaactacttttttctacattccatgttatttgcacgatgtttaggcgatgctgacccactggcaattgcacaatttgtaaggtttttcttttgtttgcccccaccaattttccctgcgcctcgtgtactcggattttatcagctctgacgcgcacgataagttaaaaagtttccagcggcaataataacaacaagcgagaacaattagcaacaataaagacccagagtcccaaaaagtggagcatagatacagcagacatatgtatgtgctttccataccgcacccagatacaaaagtggaatccagtatctcactctctctcgcttttactctttttccattccgttatcttgctgggcaagataactgggttaacatactggaaagggggttaatttgtggggggaagcccgcacagtcatcatggaaaattcataaattgcatccacaacagcccatccataaaacccaggcggacatctagatagatacaaatgtatctataggttgattatgggatcgtcagtttgcatttggccatagcgctaaattctgttctgctctgcataaaaatgcgccatggtcgaagaacgaagactgaagacttataaaaataagatattcgcgcgcgcacacacacaatactgatactgatttttgcgtggtctatttatttttagaacgtctccgtctcgttggctatttgcatataatttccaatgcagttcggccatggcaaagtgtctcgccgtgcggaaagaggcaggtttttgggtgcgtatgaatccaaatggatcggaaaatggaaagcagctcaagagaaagattcgaaatatactctattctaatcttaaacaaaattgtgttcaagaatttgcaaaaggtttggttaccacattcaaagttgtttggtaatacttagagtggctctgagcattggtaaagtatttggtaactcttttattttttaaataaatttaatgtaatactgcgattttcaattgagttttcgtatagcttgtgttacttctgttaatggtagtaattaactataaattgtttcattcaaaacaattaacgaaattttccacacatataattataatttaggtgtactaaagttggcaatttaagaatcagcgtgattcagttacctaatcacctcacaatccagctaatggatcctctcattagctcaggtaaatgaatacgcataaatatctcattcgcttaacacattttccgtttattgcactctgttgcgttttgcaaatatgcgacagccttaatatagaagaatcagataaattacaaaaatacacgtgagtgtatttataaaacgtctcgatggaaatgaatttaacgacatttgtaatttcaatattgacacattaacgagttgcttgaactttgaattgcagttgcaatatcgcttcgcattaattgttgacacagttcgcactgcaatcgcgcgcaagaatgaaatacaaatgactagatactatatctatactatgtatgtatccgttagttgagtagatgagtgcgcggctatgagtactgagccgtgccaagtgcccaaagtgactgtttgtttagattagatttttaatttggccgatgccagcgacttttcagcacgtcatgtggaagaagagtaattgattcctggtttttgcatttagttgctgttctgatttgggaatatagtatttgtactggcattgatgaattcatatagcgcatactcatttcgatcttttcgtgttttggttctcgctgttggttccaaatgatcaacaaatttaagaacttttcacaggatatactataatactgcatatactgacaaaatttggaaaatcccctgatctatgtattttgtgaatcctcaactctctttgctcagtaagtgtttttgctttggaagccaaataaatcctaataaagtcgtttttgctgagtaaattataaatttcgttgtgacatgtttataagctttttgtggcaattattttttaataattatttaattatcccgaacccgactggatataaatcacaagcagtataacggggattcccctgaccgaattcagttttggcaatttaagttggtttgccaaattcgcatttaaaattcacactcctatctatcaaataggtatcatttatttagctatttgcataaggatacgtgaatacacgcacatacagtatttttggattataaatgacaaatgtggaaaataactttcggcgataacatgaatttcaaattagtttgtgcttgtgatttgctgaaaagttgagtgtcgtaatcgtgatttatatagttggatttttcaaaaatttcaacccactttgcttgaggcacactaaattcagcaactgcattttgtctggttgtcactatttttttttctcaagttctgaaatgattttagttctggctgtaaattgcttttaagccaagatctttagccacagatgtagattcgatcacacgcgacactcgagaatgactgagttgagttatcaacggaactgcgattgggattcgatccgattgcagttcgccaaatcgcattgctcgcgatcgctgaatgggccgctcctccagcgcgaaaatcacaaattcgactgaacttcacaaatcgttgtaatcaaacatttaaaatgaactgttttttccaccccctcccctttccatccattgctttcgtttcgtttagcaataaacaacaataaaattaaatgagctctacaaatggcggaacacgacgacaggcgatactatatactatagtaaaaacgccgttgccgatcgacgaaataaacgtacgaaatgtgcgaaattttgccgcctccatcaacgcgcgttggcgttagttagtagtagttagtatccgcctctgtatccccatcggtgtctttgtatctctatctgtatctgtaacaccaggtgtatctatgtatctacgtatgtcggttgacgtaagctcggatttgccgggctttatggccaaagcccagctgataactaacatgcatgagtgattgccttggcttccacttaaaatttaaataccttcggcaggggattttcgggaatttgcataggcaattgttcctagttccgttctagcgggttctacaaatttcgtttgatacgaaatagaaaaacaacatatcaccaacttttataattaacaggaagtccttgtgtcgcgaattgtgagtaaaagttgctttttacaagtaagtactaggatattcatagatctataaatgtagattcttcatatcttggagatacaacgtatctctttctatcctcaagaggactgtctttggtaagacctctcttttcttatagacgtctttcaaccatgtttaccctggtttttagcagcactgtacccaggtaattcttcttcatcgacaaagacatgcgcaagtttgatgttattattattttagcaatttgcatacggcttatgggatgtgtatttttaaattcttgtttatagtcaaagtgtgctgccttattttcctactttttgctttaatcttatttttaacaagggaatttgttgtatccaagccaacagagcttgtgtatcgaaatgtgtgaaatctgtcaggctgtgcaaaatcgtaaatatatctataattgtacgctgggttactttttatgcgcaccggcgattcgagtcaagtgatcgaacgccctcaaaaagttttgacactcgaagagcgcaaaaaaaaaagaagccgaaaaaaccagcgatttaattagcgcccaatgccattcgacacgtgtgtgggtgggccaaaggttgaaccccatattcctgagccccaaatatttcgctttctacatacatatgtagatatactactcacaatactaatactaggcgttggtcataaactctgtgaaatttttcacttgcgtgacgtcggtgacatcaaaatgaggaaaactcattaatgaccacgagctgggggccagctatgatgaatgaaccgaaacgaacctatttagtatactaaaaactacagtggatatacttttgtatatttgtatacaaccagctatagaaaaatattattaaaatgcatattttctttatagtcttgtactagtaaaatgttttctaagcaatcgagatacatttaatgaacaaacttgctttaaaaagtctaatactataaaatcccatgaaagatatatttttaaaagtatattgcagatcgacgcgttgttcgtgaaactctatacatttgtataaacaaatgcgcatagtatatttcttaaaaaaaattcaaaatatgtgccatgtgccatcgcccatcagcgaaatcaatgctcacatgctcggttcaatttgctggtcaacatctcatgtgatttctgctcagtcggtcgatttctcaaggcaaggacgtttgggacttttgcactcgcaagtcattttttcgcaagaaattaaaaataaaaaaacagcagtaaataaatcaatattcttgtacgcaaaacattttgtcgagctcgagggtatttcagttcattgagttcaaaaagctgcgcaaatgcaggaagttaatgtattcggaagtcatatgacaaacataattgtcgcgcattattattcaaaactaaaactaaatgagccgcgttaattgctcttttgttttattgccagagacagcaaggttttgtttaaataaaaaacaaattaagcgtgtcaaaaatgtgcagcgatcttttgagaaattttgtaaagacaacccaacatcaattcaagcaattaagaattaagccttcttgtttcaaaatcaataagttgaagttggaattgcttgtgtacctagttcagtatggagatctcatatgaagtaaccttgccacaagtcgcacaatcgcggggcttaatgttgccgcccctcgatatgcaaaagatgagagatatatgtacataaatcgtaaagccgagacggcgcgttgacaatgcctaaaaatagcaatcgcaattgaaatttcgttccatattaagcgtggagcccagtgatagtttcgttctttccctggtggtcattgtggctaaatttaaatctctgaacgtcacatgagtgggtaggaaatggtgtacgggattgtactatagtgcggattggggcaagccttctcctttggtgcagaaattgtaaattacagagcgacgcaagttcaaagtcaaaatagcaattgaacgaacgagcgaacgacggaggaggaacaagtccgcatgtcagtcagtcagttcagttcagatcgtggcgatgctggtgatcatcatcatgtttccgctgatcgtacaagatcattatgccaatttgttgttgtttttccgctcgaccgagcatgcaaacaaattaagactgagggcgccgtgccccgactagcgaaatttaattagcattgcctcactgtgcccgcattcaatgcactggcaaatgatattttgaattattttcaatgattactctataggaaatgcagaaatatatgcagcaatatcacactcacacggcagcattccaagtagtaacgaagtgcttcacaagagtaaactagctgtgctcgttcgattagaacgagtggcgagtaactagatggactagttactttcaaggcgtaatattatttaacatgtgaatgatgtagctttcatggaatgaccatgttatgcaattcaattaccatttttcccagtgcatgtcaccgtcttttttttttgcgactgaaacgctttcgaatgccctcccacacatttccgcgtgctagcagtgaggcaaattgagcgattagcgccgagcagaacgtgatccaccggattgattccccacccccaaaagccccgaaaaaaccccactgtgccttctacctatatcaatttaaattcgattttagatcaccatttagatttcacagtcgccgattgcatttcgctttaatgcgtttcgtctgccgaacgagacgaacttctatagcagcgtgctttcttaatgactttattatgaaatccccattacgatgactaattgttgtgaaactaaaatatttgtaaatcacgctaaaccttaatgcatacaacaaacaaaccaaaaactaactatctttaataaataaatcttctagttgcacttttatctaagaagccagttaatgcttgccattctagtttaattttatggatctactatataaaaagttaggttcacagtatgaacttaccagttctcctcttaaaacctaaaaaaaaaatgaaaagaacattttagaaattgttaatttagatagcgattaaacaaatggtttcaatgggggcgtaaataaaaaactattgaacaagaaattataataaataatgcacgataaagtgtacttatttgaaaataatttattaatcgcaagcaatcatgcattctaggtgaaaatctccatcaacgttcatcatgtaagggatcagagccaagcgaatggtaaataattttcaagagggggcgacaaataaataataaataattagagcacataaattttgatttgtaaataatttgcgaataatttattaacgtttttcccaacacttttcgttggcgggggggctaaaaataaacgagtctcgaatgtgcagccaacaaaacttatcttcatgccaataaatataaacttatcccgcatgcaaataaattatgagcagccgatggccaccagtgcagcatcgcatcgagatgccaccaatttctgtggcgttttcttttggcggtagaaggggggggggcgagagagaggcgcaggtgtggcacctgttgccaccaattaagcgaatggcgtacaggaatattaaaatggccaaataggtcgactaatttctaaccaactgctgccaaagaaaatacaatgtgagcatcgccagaatgcatagtaatcaattgcgcaaagtctcttatatttttctaagaatttcccttttatggtctttgacagagaataaaaccaaggcgacatgtgctaaaatcctattattgacgtctttgccacattttggtgacgtctgagcttcgatacttcaaaataaatattttaccagtcaatacagatgtttgttcgttttgttatttaccccaaataatagtaataataataaagaaaaaacctaaaaaaaaaataaccaaaaaaattcaagtaagcagagatgccttggtctaaatcttacgattctcattagtaatctttacctataaattaatttttcatgtctatgctattcttaagatatgcaaccaataattccaaaagatacacatcaaaatgacaacgataggtttttcaaaacattaatcacaagcactgtgctattttctttacgaactgtgatatcgctttttcaatagacaaaacagctgcgtactttaataactgccataaattataaacaaaaggttatgctgcgcatttgccacatacaataataataataacaaataccagtggacaaaaacaggcggcacgtgctgtaaaacccattaaaaacattttctagccgcataaaacgagagcaaaatagaaaattgtgagcgcattaagttcgaaatctgtgtggacaacaaaatgacatgcaagacaaacaaatgcgcttaaatgtgtgacatatgttgagatttcagacgtcctcacagcaaatacaaaatgtgaaatgcgtggtaaatgcaaaaaaaaaaacaaacatctaattatttgagtgatttaggggaataaaaaggggaattaatgtgttacctatcataattttaaatacaatattctactaaattcttctggttgtatgctctttcatcaatcttatcgcctgattgcatttatatgagaggccccttcaactaatcgtacttcaagtgccactaaatatagtacaagctgtcagagtctgaccccacaaagaactagccaggaatgtcatacaaacaataacaaataaaaacactcaatcaatagaattgtataaatattattagcaatagtattcaaactgaaagatggtcagggtatgtgattgaagcacctgtatgcaacatgtaactacggattatacaatattgattgtaatattgaattgtaaaatggacatggaatgcgttgaatgtgttggaagtgtgagtcccgagcaagtggcaattagatgggacgacacttgcacgtggttctcacgatgtcacatggccaatagacaactaatctaagcaatcatcgaagatgggcgtccattggacggcgcatcgagcataaattgacgacacgggatgcaactaattagaaaggcaaattggcaatcggcaggacgggcagttgccacttggtcggacaacaggtgtaaatggcacgattatggcactgtgtgcattgcgcctcaaaaggcccgttgatcaatcaaattagcagcggtttccaaatcccattgttattggcattaaatggcgattttatttgccacagccacgcgactctgccacgcagctggcatgtgaaattctttggctattagagcggtgtattggcccatagcaaatttgaaactctttttatttggcacatcttcacaccttccttaccatcatcgaatcgattaaaacgaatttctagcgaatcagaaaagggttctcacgtgaaaagtaacatttttgaaactgcttaaggcaaataaatctagacattttgcatattatgaatattagaatatcttttgataattttcagtgagaaaaaacaatattttagccagtgaagaagttagttactttcagtaaaggtgttgattgttgtggctatttgctttttaattcccgatttgcgtttcagagcaatattttctaatagtctttgtatttagcagtttgtttttgttaattgtgtaatcattggccgacaattagcgtattgacgctaaagggtaggatatgtgtgtaaactagtaggcatttattaaattctaagcaaatcatttgcattttttacataagatagatattatttatttataacaacactataggttatgtctagtttgaaatatcttaatattcaaaagacagcatttagatttctacaagattctaaaatccagtgtggtaagtgaccacatatgtacctactaatccttttaaaccaaacacttgaaaagtcatttctagtagcttagtcttttttttttggtatgacaataacaaaagagcttccgcatggatcacaaattgaatctaccctcttaactgaaattatggttaaccttcaggaattagtgtgtgaaaattaaccttagtgatgtgtaccgacaaaaactagttgcaataacagccggcggcaataaaagatgataacacgctaaatgaatgcatattgcataatctttcgctgtccgtccctttcgctgaatgcaattgaaaatgcaaattgcgcgggaatttgaaagaacagctgctgcacccacaactgcgaaaatgtccgagtgaaatgggaaagcagaaaaaaataatcgccactaattgaggacccgtccatttgaagttcgtatcaattaagagaaatgcaagcaattcaatcaagtcggccagtgtcgcaatatggctggacgcgagtgtttccaatatgctacgcgtgtgttccaattccagttgaacgcacagcagcggtgagcgcaatcgtactcaaaattccatacttattctggaaatttcttgcactccgcataattgaataatgaatgggtaaagtaatagattgattacacttttaaatgaagacaatttgcttaaactattaaaacagttcggaaatacaattcaaattactttatgggacaagaaataatttttaaaatgcttcctagcctccaaaggtattcataaaataacatttattaccatagttgaaatttatttgaaatattccaccaatctgtgttaggcaccttacttttttgacctttactgtttgtgacacgcataacctcacacaaccacaagcacagttactgagtcaccgtcgctcgcgctctcttcccactctctcgctctctttggcacagatgacaacaagccggtattttcatacaaattttcgcaacgaatgaaatgctaaaaagcagaaggccaaaaagcagctcaaactcaagaaatcaaacgaaacaacacagaatgagcaacgattcttttttagaaccagttgcaaaatcagaaaaatcaaagaaatgtgatttttgggggtggggtggaaagagagagaatgaaaaccaacctgttttccctttgcaaaatcgatgaaaatccaatcgccgaaaaagcaatttcacacgggaacttatcttgcaccgatttcgtattattcacaaattgattttctgactttcgtcgcctcttcctccacttctgcgtgcaacttttaattgtatttgttgcgaaaaaattccactgctctctcagcgtgacgaaacgtttttcgatgttgttcttgcttttggctgctttgctggcaatccaccgattcactggaatatatacgccaaccgggctatcgccaatatcttcgggggatatatttcggctgatttctttctcctttcgagtgcaaactacacgaaaaagtcaaaaagtcagcttagcgaagcgattcgacggcacgaaataaatatacaaccaaaattcagctgccgcacgatccgttctcatcgtttcggtgttcccttccgctgttccccgtttgtttaccatctgtacccaaaaagcttgactacagggcgctgttaagcgcaaatgctgttgaactgagcgcgcgattcaaatttgtagggagtgagagtgtgttacaagacgtgtgatgttaatgtcctggataaactatttatttattcaattcattcatttattaactttcattcaatttcatccgtttaagtttattaaagtatatttaaagttatattattatttataagtgcgtattgataaaggaaaatgaattcttttttgagtgaagtaaaaaacatgggatttatatatattttatatattttgaatattttctaaaagtggtcattaaagtggacaatgctctaagcaaatgtttagtttttgtctttactttattgtaatatttaccaacaaatgattaatcccaactagcaagctttgctgagtcaccgtacccgctcaaagtgaaaagcgtttaaaaacggcaagcttgagcgctgtaagtgcctagcagaatgttagggcaatgttacacctccacccaccgccatccacttatgtaagctgggagtgggtctaggtcaaggtcacaggggccggtgcacgcccttgacagccgaacagcctccgaaccaagatctatgtgctccagattattacataataaaaaatggcttacagcgtgggagctggcgaacttaaagttaagagtttggagtcctggaaaatttgaggcattttccggtaatcataatcaccgtctatctggggacaggatgttttggatcttcggcaaatgaccaaaatccaatcagtcaacgctttgcgtcaacgtctctgacaaaaaccaatcaactaagtgtccgagcgccacgaattagcataagaaagaaagtccggccgagactgctgggataattccaacggatgagtgctagaagtgtgggttttggtccaa

SEQ ID NO: 41564 - DNA, 2502 bp, DROSOPHILA
gctgaattttggttgtatatttatttcgtgccgtcgaatcgcttcgctaagctgactttttgactttttcgtgtagtttgcactcgaaaggagaaagaaatcagccgaaatatatcccccgaagatattggcgatagcccggttggcgtatatattccagtgaatcggtggattgccagcaaagcagccaaaagcaagaacaacatcgaaaaacgtttcgtcacgctgagagagcagtggaattttttcgcaacaaatacaattaaaagttgcacgcagaagtggaggaagaggcgacgaaagtcagaaaatcaatttgtgaataatacgaaatcggtgcaagataagttcccgtgtgaaattgctttttcggcgattggattttcatcgattttgcaaagggaaaacagaggtggcacacatcgccaacaacaacaacaaccagaaccaaagcaaagaatcccaagaaagagatccgaaggatacaggaatctttggatgttttgccaagaaggaagagcagcagcataatcctaaaaagaaacaatcagaaggacccagagagagttccaactcgggcagctataaagtccagcaaacggagcaagaacaacgaagggaatcggagaacgagcatccatccgtttaccgccagcaggacgaggagtttcatccgataaaaaaggaggagccccagaaaaccccacccatatccaagcaaccccgtccgcggaataccccaagatcgcaaagtcagccggctattaacaaccgacgacgtccaggaaccccgccgcctcacacagtcgcacctggaaacggaaccgcaagcagcaggagcatgacctccatacccgccaatctgtctagcaataatgttgctggtgcagcaaccttaccaggagctgcggcaccgccagagaaatatacatggccgaactccaaggacgattacgagctgagggacgtcattggtgtgggtgccacagccgttgtccatggggcttactgtattccaaggaacgagaagtgcgccattaagcgcatcaacctggagaagtggaacacatcgatggacgagctgctcaaggagattcaggccatgtcctcctgttttcacgagaacgtggtgacctatcacacctcatttgtggttagggaagagctctggttggtgctaagacttctagaaggcggttctttgctggacatcatcaagcacaagatgcgaacgtccaactgcaaacagggtgtcttcgacgaagccaccattgccacggtactgaaggaagtcctaaagggattggaatatttccattcgaacgggcaaatccatcgtgatatcaaggccggcaatattttgattggtgacgatggcaccattcaaatcgctgacttcggtgtgagtgcatggctggccactggcagggatttgtccaggcagaaagtgcgccacacctttgtgggcacaccgtgttggatggctcccgaggtgatggagcaggatcatggctatgactttaaggcggacatttggtcctttggaataacagctatcgaaatggccacgggcactgcaccataccataaatacccgcccatgaaggtgctaatgctgaccctgcaaaatgatccgcccaccttggacacgggtgcggacgataaagatcaatataaggcgtatggcaagacattccgcaagatgatcgtcgagtgcttgcaaaaggagccatcgaaacgtcccacggctagtgagcttttgaagcacgctttcttcaagaaggccaaggatcgcaaatatctcacccagacgttgctgcaatctgggcccagtatggagaccagggttcacaaggcggcgaaacgccaaccaggagcctcgggccgtttgcatcgcacggtgacaggcgaatgggtctggtctagcgaagaggaggacaatggtggctctgccaccggttccggaacaggagacagaaaacatccatcttcggactcggattccgaggatagacccatgaatcgattggaaagagccgactcatcggacagcgaccgggaagagccttctcccgaaataacccacagtgtttcctcagccacagtgacgcctggagctccagctgctgctggtgctggtgcagcccaagagctaacagctggcattgctcaattaccactacctagcgaagcggccggcgaggcgccaccagtcaatcttgtccttcgcatgcgcaacttgcgacgtgaacttcacgacattcgcttcgagttcgttgtgggcaaggacactgccgagggtatcgctacagaactggtagacgccggactcgttgatgcgctggatacccaaccgatggcaacgcatctggatcaactgatagctgccagtgcaacgatgaaaacgattactttccaattgagctccggcgtgcagccgggcgaagtgcccgacgaacgatcactggtgggatatgcgcagatctccatcacggactagtg

SEQ ID NO: 41565 - protein, 552 aa, DROSOPHILA
MTSIPANLSSNNVAGAATLPGAAAPPEKYTWPNSKDDYELRDVIGVGATAVVHGAYCIPRNEKCAIKRINLEKWNTSMDELLKEIQAMSSCFHENVVTYHTSFVVREELWLVLRLLEGGSLLDIIKHKMRTSNCKQGVFDEATIATVLKEVLKGLEYFHSNGQIHRDIKAGNILIGDDGTIQIADFGVSAWLATGRDLSRQKVRHTFVGTPCWMAPEVMEQDHGYDFKADIWSFGITAIEMATGTAPYHKYPPMKVLMLTLQNDPPTLDTGADDKDQYKAYGKTFRKMIVECLQKEPSKRPTASELLKHAFFKKAKDRKYLTQTLLQSGPSMETRVHKAAKRQPGASGRLHRTVTGEWVWSSEEEDNGGSATGSGTGDRKHPSSDSDSEDRPMNRLERADSSDSDREEPSPEITHSVSSATVTPGAPAAAGAGAAQELTAGIAQLPLPSEAAGEAPPVNLVLRMRNLRRELHDIRFEFVVGKDTAEGIATELVDAGLVDALDTQPMATHLDQLIAASATMKTITFQLSSGVQPGEVPDERSLVGYAQISITD

SEQ ID NO: 41566 - DNA, 3052 bp, DROSOPHILA
tgcaatatcactttttaagattaatctggttgtcatttagtgaataggcgaaatgctgcggctgcttaacttgccaatgcaatagattgtaaaacttgcagcgtagataaatatgtatgtacatgttacatatatttaccacatattgtatattttttataacactttgaatctgattgaaaacaacacaagacactcaaatgctaagaaaactccatgcgaaaccgaagcaattgttgattacgcttacaaatatatacaatagaagatgcatatattcgagtagtcaccaccacgtttgccgagttggctatcccaatgttgtaattgtttaatattatatttcctcgcgccgactgattttacaaaagaaaaccccaaaaacatatatacaattgtagatttacaaatatttttagactttagctaaccaaaatctctacgtaatatttattttaacatgttctcttagcagtcattcaagactcaagtgctgcctttatgggttcagagcggtgcagtgcacagataattccaaatcgagcccatagactcattacttaaatcctatgtctatttcacaattttttttcacgctatgaaacagaaaactacgtgggagctgcggggaatttacaaactcctgcttatttcccatgggtcctgtgcgtatgtttctatttgtcttagctctttattggctagttttagttacggcgtaaattccacacaaaacagcaattcaaagcgtatattttaagctttttaatatagtgtttaacattaatgttattgccggtattgattgtacataataaattaaatagaagcaaccaattttccaatgtttaggtattgtctacaactgagattaattttcatataatatccagtaaatatcatcaatctgcgttgggttaaattaaacattaggagtaaggtacacgaatccgctagtttgtacacgggtctatatgtcgaggtctatgttaaggcggtctcataaaggccggtacctattgatgaaggagttgatgataggcgccaccttctctggctcgttaaggtggacatggtgagttccttcaacctcgtggtattcgaacagaggattcttctgcagctccgctaacacttcatcgaagtactccttgcgttcgtagtagggagcctgcagggccttgataaagagatgcgggcacttaattctgcgcgccatctccattggcacctcctggtgcaacgtgtaaaatagtgatgacttcagtcggttgtcgcgggagaagtaatacttgtgaggctcgtgcgtcgatggtttgcagttccgctgcagcagatacttgcaggcatcaattgagacggacttatttgagccctcgtgcagccgggttaccaactgatcccagtcataggcaggcggctcagacccactcttcagacgtcgttccagcttcagtgcggactcaattcgctcggtaagcgaatccacaatgccgcgagcacttcgaactggcggcttcagcacatccagacccacgaacagatcaactttgtcaggaaacagagcactgaacacaaagccattgatggagctcatcgagtgggccaatatagagatcttgtcccagttgtactcctccattagtcggcgagtgatcagcacgaggtcaatggagtggtaggaagtgccaggtggcagccaggaggacaacccatgtcctggtgcatcgatgcttaggaaagagaggtgggacggcaggagaggagccaaagtatcgaaggtaccggcattatcctgccagccatgcatgccaacaatgggtcgtacgtgcttcggtccataccatttgcccgagatgtgaccccatggaactggtatgctgatttcatcgaactgcgaagagaaagccaaggtgattattaaatgaaaaccaaaaggattctaccacctacatgtttgttgaggattttgaagggctttgtgggcccactgctggagtttcttacatttggcaactgttttagcaggaacagacctctggacaccttcatttcaaggtaagatattttctacttcctctgagtaatgtcacgttcttcttcctcgatcaatagaatgatactgatgttctggctttgatttcaccacacatggatggtcggcggcgatgccaggtgaactttgatcttgatacgtaatatctgagaaaactatgtttcagcaaggtttttaatcttgtcattcgctggcggctgctggctacgaacaacactggtccaaaactcgcttggtatgttttacaacactatatcttcgtttatatgtcgacatttcgagataagttcacaatacataagtttgttgtaagttagttgtcatcatttatttatgaaatcaaaggctgatgatttaagtcatatctttccaacatacactaataaaattcatttaaaacattaaatgtaaacttcgtgttatatccgccgcataaacaatgccgcccatgtgcaagtttagtgaacagctgtagtaagtgtttatttttcgttcgctcgatgctttcacctgtttgttgggcgcattggtaataaaattattcgaatgaaatcaattctgtattaattaggagggagcacaagtatattaaacaaattgcaaaaaaatctgtgacacaaagacaacgtgagttatattgattcattaaagcgatcaccatgacctttgaatctaatgaagcatcggcatcgattcggatattatattatatattatattggattaattgttatgatttctctttaatgtttactttcgtattttctaagtatgtatgtttccccgcctgtttgccttaactaatcgcagtgctaatctccacaggtcgttactgataagggccgaaatcggctaaactttggaattggtgctcattcgctttttggccactttcgagcgcagaaatggacacggacgacaactcaagtggcactattaccggcagtgatcttggccagcgttatcggcatgcaggcgacttaactggcgaagccc

SEQ ID NO: 41567 - DNA, 993 bp, DROSOPHILA
atgaaggtgtccagaggtctgttcctgctaaaacagttgccaaatgtaagaaactccagcagtgggcccacaaagcccttcaaaatcctcaacaaacatttcgatgaaatcagcataccagttccatggggtcacatctcgggcaaatggtatggaccgaagcacgtacgacccattgttggcatgcatggctggcaggataatgccggtaccttcgatactttggctcctctcctgccgtcccacctctctttcctaagcatcgatgcaccaggacatgggttgtcctcctggctgccacctggcacttcctaccactccattgacctcgtgctgatcactcgccgactaatggaggagtacaactgggacaagatctctatattggcccactcgatgagctccatcaatggctttgtgttcagtgctctgtttcctgacaaagttgatctgttcgtgggtctggatgtgctgaagccgccagttcgaagtgctcgcggcattgtggattcgcttaccgagcgaattgagtccgcactgaagctggaacgacgtctgaagagtgggtctgagccgcctgcctatgactgggatcagttggtaacccggctgcacgagggctcaaataagtccgtctcaattgatgcctgcaagtatctgctgcagcggaactgcaaaccatcgacgcacgagcctcacaagtattacttctcccgcgacaaccgactgaagtcatcactattttacacgttgcaccaggaggtgccaatggagatggcgcgcagaattaagtgcccgcatctctttatcaaggccctgcaggctccctactacgaacgcaaggagtacttcgatgaagtgttagcggagctgcagaagaatcctctgttcgaataccacgaggttgaaggaactcaccatgtccaccttaacgagccagagaaggtggcgcctatcatcaactccttcatcaataggtaccggcctttatga

SEQ ID NO: 41568 - protein, 330 aa, DROSOPHILA
MKVSRGLFLLKQLPNVRNSSSGPTKPFKILNKHFDEISIPVPWGHISGKWYGPKHVRPIVGMHGWQDNAGTFDTLAPLLPSHLSFLSIDAPGHGLSSWLPPGTSYHSIDLVLITRRLMEEYNWDKISILAHSMSSINGFVFSALFPDKVDLFVGLDVLKPPVRSARGIVDSLTERIESALKLERRLKSGSEPPAYDWDQLVTRLHEGSNKSVSIDACKYLLQRNCKPSTHEPHKYYFSRDNRLKSSLFYTLHQEVPMEMARRIKCPHLFIKALQAPYYERKEYFDEVLAELQKNPLFEYHEVEGTHHVHLNEPEKVAPIINSFINRYRPL

SEQ ID NO: 41569 - DNA, 7380 bp, DROSOPHILA
tgttaccaaactttatagtagccaatatattatatatatgttgtaagtgaaatcttagcttgccactcgtagggaattaattatgccaccatctttgatttgggattgacagaaatcaatccatcattttaatgattgtggttcctaaaacctgttgggctttattgtgctttcgatttgatttaagctgatagagctagttgtttacttttgaagaaccttgaacccattttgacgaccttttaactttttaatagtttttttttaccatttacataaaagcaaaatttacagtctaaaagttgtatattcaatacgttctggtacgtaaaagggttatttaatgcaccatttttacaactttagatagtatactttttacttgagtgggagccatatcacaaaaatgaaatgaaaggttaaaaaagtatctaaaagtaagtttcaattaatattctgaaaaataattgcatttcatgtacgtttctctgaaatacccctaattcgatactatttataaatctggaagatatatagctaggaaatagatttatatatttgcctagtttgaacaccttgtgaacattttgtttaaaaaaaaagcgtatcgtggtactagaaaactttaagatacagataaataacttcactataccgaggttttggtgtttcttgagactgaaggacaatcttcaaaatggtcttaattcttgagatagaaaagctgcagttctcatgctgaatagtgatcagtacgattttatctgacagattgctttcctagctgaccacaccgatctcggatgggtatctgctctaatccgagatagcaggtagtagaactgctgcctcgtaacccctagacatggccatttccacgcacatgtaggcgatcctgcactcgtcggtcgctcgtcttatctcacaaaaataaaagtcggcgtttggatggattgctcggctggctgttggcacattcattacgttttcgttgacggcgcgagacggttgtgttgttttttaatcggcgggcacatgaggttgtcggttctctaattttgaaataaaaaacttgttttcgctttacattcaaggaacgcacctcctcccctccatatatgtaaacgagcttcgtaattgcaggctaacacttatataggcattggtactgagatacagcgagataccgtgagctacagatacatagcacttcacgatgtctaactcggttttggtgtttttcgtgaatggaaagaaggtacttaaagatactcggatgccttgcgtgtctttccttaaagtcggcccactcctactatatcgattccctttattgttttattgccctaattgcgtttaactggcattcgatggaatttgccttcttgctcaattgaatgtgtcgaatgtatatagtatttgctgtgcatatagtgataacaattgacccccatgtgaagcctcgttgtttgctggtggccccttatcgcccgatcaagatggtgcacttgccaatcgcgcatgggagcagtgctactcggatgtgggtgagctgggatcgtcatgggcatttgtgtctgccagatagccaggccctctaatccgcacattcccaccggctgtgcggtgtttacaatccagtgagctcggctggattattcagataaagctggccatatttagcatctggtgttggtggagtgcagttggagttctttactttgtgctcacagcttgcgcacaagtgaagtaaataataataaataaccagttgctcgtgcgcccggcatttgatagtgatagatagcaatctctgtttgctcagggctggcagagcagataacactttcgctgttttaagtttaaacaaagtcacagttttgacaaacaattgctttaaaccatataaacttataattatagcaattataattaagtaggtacagatcttaaagctacaagatacaagatacaaattttcccattaatggataaatggcattagatacttttgggaaattgatttcgtttttttcattttattatatttatacatttcttattccaggtgaccgaagtgtcgcctgatccggagtgcacgctcctcacattcctgcgcgaaaagctgcggctgtgcggaacgaagttgggatgtgcggaaggcggatgcggcgcctgcaccgtgatggtgtcccgcctagaccgtcgggccaacaagatacgtcacctggcggtcaacgcctgcctgacgccagtgtgctcgatgcacggatgtgcggtgaccactgtggagggtatagggagcaccaaaacgcgtctgcatccggtgcaggagcgactggccaaggcgcacggatcccagtgcggcttctgcacgccgggcattgtgatgtccatgtacgcacttctgcggaacgcggagcaaccctctatgcgagacttggaggtggcattccaaggtaacctgtgccgctgcaccggctatcgacccattctcgagggctacaagacgttcaccaaggagtttgcctgcggaatgggcgagaagtgctgcaaagttagtgggaaaggatgcggaaccgatgcggagaccgatgacaagctcttcgagcgcagcgaattccagcccttggatcccagccaggaacccatcttcccaccggaacttcagctgagtgacgccttcgattctcagagtttgatctttagttcggatagggtgacctggtatcgtcccaccaatctggaggagctgcttcagctgaaggccaaacatccggctgccaagctggtcgtgggcaatacggaagtgggcgttgaggttaagttcaagcacttcctctacccgcacctcattaatcccacccaggtgaaggagctgctggagatcaaagagaaccaggatggcatttacttcggtgcggctgtcagtttgatggagatcgatgcgcttctgcggcagagaatcgagcagctgccggaatcggagaccagattgttccagtgcaccgtggatatgcttcactactttgccggcaagcagatccgcaacgtcgcctgtttgggtggaaacatcatgaccggtagtcccatttccgatatgaatcctgtgctctcggcagcaggagctcaactggaggtggccagttttgtggatggaaagctccaaaagagatcagttcacatgggaactgggttcttcactggctatcgcaggaatgttatcgaagcccacgaggtgctgctgggcatccactttcggaagaccactccggaccagtatatcgttgcttttaagcaggccaggagaagggatgatgacatagccatcgtaaatgccgcaataaacgttcgctttgaggaaaaatccaacattgtggcggagatctcgatggcttttggtggaatggcaccaaccacagtgctcgctcctcgaacttcccaactgatggttgggcaggagtggagccaccagctcgtggagcgcgtggcggagagcttgtgcacggagctgcctttggctgcctccgctccgggtggcatgatcgcctatcgtcgagctctggtggtgagcctgttcttcaaggcctatctggccatttccctgaagctgagcaagtcagggatcacatcttccgatgctctgccatcggaggagcgaagtggtgccgagacattccacacaccagtactcaaaagtgcccagctcttcgagcgcgtctgcagcgatcaacccatctgtgatcccattgggagaccaaaagttcatgcggctgctttgaaacaggccactggtgaagctatctacacagatgacattccccgcatggatggtgaagtttatctggcctttgtccttagtaccaagccacgtgccaagatcaccaagctggatgccagtgaagctctggccctggacggagtgcatcagttcttttgctacaaggacttaacggagcacgagaacgaagtgggacccgtctttcatgatgagcacgtctttgctgctggagaagtgcattgctatggtcagatagtgggcgccatagctgccgataataaggcgttggcccaaagagccgctcggctagtgaaagtggagtacgaggagctgagcccggttatcgtgaccatagagcaggccatcgagcacaagtcctatttcccggactaccctcgattcgtgaccaagggcaatgtggaggaggctttagcccaggcggatcacactttcgagggcacctgtcgaatgggcggacaggagcacttctatctggagacccatgctgcattggcggtacctcgtgacagcgatgagctggaactcttttgctccacgcagcatccctcggaggtgcagaagctagtggcccatgtaaccgcacttcctgcccaccgtgtcgtctgtcgtgccaagcgtttgggaggcggtttcggcggcaaggagtccagaggcatctccgtggccctacccgttgccctggccgcctatcgaatgggtcgtcctgtgcgctgtatgttggatcgcgatgaggacatgcttatcaccggcaccaggcatcccttcctcttcaaatacaaagtgggcttcaccaaggagggtctgatcactgcctgcgacattgagtgctacaacaatgccggttggtccatggatctgtcattttcggtaagagtggtgggtttatggaaaatccatatgtaggtttctttatgcataccatgtttgctcaaatatccatgtgttgtattttccattgaacatctggttagtgtgggaatttctaggacccctatatgttatcatcctgagtgcaaatagtttgaaacttttaagaatgtttaggtctaatcaggaaagcaagcaccaggattatattgacataaacaattataaataataatctaaaaattcttaaaaatgatctaatatataaatcctatgtttaggttcttgagcgcgccatgttccactttgagaattgctacaggattcccaacgttcgcgtgggtggatgggtctgcaagacgaacctgccctcgaatacggccttccgtggatttggaggaccacaaggcatgtacgccggtgagcatatcatccgggatgtggcccggatagtgggtcgcgatgtggtggatgtgatgcggctgaacttctacaagactggagactacacacactaccaccagcagctggagcacttccccatcgagcggtgtctggaggattgcttgaagcagtcgagatacgacgagaagcggcaggagattgctcgattcaatcgggagaatcgctggcggaaacgcggcatggcggtggtgcctaccaagtatggaatcgcatttggagtgatgcacttgaaccaagcgggatcgctgatcaacatctatggtgatggatccgtgttgctttcgcacggaggagttgagatcggacaaggtctgaataccaagatgattcagtgcgccgccagggctctggggattccttcggaactgattcacatttcggaaacggccacggataaagtacccaacacttcacccacggcggcgagtgtgggatccgatttgaacggaatggccgtactggatgcgtgtgaaaagttgaacaaaagactggcgcccatcaaggaggcattgcctggaggcacctggaaggagtggatcaacaaggcgtatttcgatcgggtcagcctctcggccacaggattctatgccatgcccgggattggatatcacccggaaacgaatcccaatgcccgcacctatagctactacacgaatggcgtgggagtcactgtggtagagatcgattgcctgactggcgaccatcaggtgctcagcacagacatcgtaatggacatcggttccagcctgaatccggctattgacattggtcagatcgagggagcattcatgcagggctatggactgttcactttggaggaactcatgtactcaccacaaggcatgctttactccagaggtccgggcatgtataagctgccaggatttgccgacattcccggggagttcaatgtcagcctactgaccggtgcccccaatccacgggcagtctactcttccaaggcagtgggtgaacctccgctcttcattggatcatctgcattctttgccattaaggaggccattgcagctgctcgcgaggatcagggcttgagtggtgacttcccactggaggcgccttccacatcggcacgcattcgaattgcttgtcaggataagttcacggaactggtaagttacccttggattagtttataacattaaactaacttttattattaatttattaattatagcttgaaatacccgaaccaggatcatttacgccatggaacattgtgccttaaaattgtttttattgtttgtactgcttaagcatttaaaatgacgattttatttgttaatttgtttatatatacatagtgaattaaatgttttaaaaataattgagtcgtttaatgtgtaaactaagctggagagctgtttgaacaaatttatataccactgattaatattaaatattccttttagattaagaaaaattcaatggttacttttttgttctatctattattcaatagaatctcgtggcatgcaatgcattctgattttcaattgaaaagtcttagtcactatttattttgagtatattaatgaaagttgagcaagttttccgatgaattgaaatatgagttccgatttcggcgcgactgctaaccgaaaatataagctcaatcaaaagaagctttgtatggaactcaggttatgagacgagatcttcgcgagcatctcagtcggcaatctgacgtcgtagagctcggacatccgagatgggaaagctatcatttggatacagattgattttagagttcgtcttaatttcgacgttagcgttcgtatcggcagaacaattgttgctatcactacaaccattattacaatagatatgcacagaatgcgccttggaacgcagtggctccatcgtatctatcgattgacatatacggaaattgccaagcccacgatcgtccgctgattggtaagtgtgtgcggtacgtggattgcattagtgccatgcaggcagtgccccgggtgacaccactactctgtccgtcatcgtggcccaatcagttggtttgctgtccacacggcggatacttgttgccgccgcccagcatctcgaagagcgaacaaggtgcgtatgaaaggaattcagagaatccagaacttatatcttttgccagcctgtgccaatgcctatccaagagctcatcacaagcgccgtcgacgccgtcggaatacgaaccctaaactggatcaagtggaactagttgagccaattataca

SEQ ID NO: 41570 - DNA, 4224 bp, DROSOPHILA
cgagacggttgtgttgttttttaatcggcgggcacatgaggttgtcggttctctaattttgaaataaaaaacttgttttcgctttacattcaaggaacgcacctcctcccctccatatatgtaaacgagcttcgtaattgcaggctaacacttatataggcattggtactgagatacagcgagataccgtgagctacagatacatagcacttcacgatgtctaactcggttttggtgtttttcgtgaatggaaagaaggtgaccgaagtgtcgcctgatccggagtgcacgctcctcacattcctgcgcgaaaagctgcggctgtgcggaacgaagttgggatgtgcggaaggcggatgcggcgcctgcaccgtgatggtgtcccgcctagaccgtcgggccaacaagatacgtcacctggcggtcaacgcctgcctgacgccagtgtgctcgatgcacggatgtgcggtgaccactgtggagggtatagggagcaccaaaacgcgtctgcatccggtgcaggagcgactggccaaggcgcacggatcccagtgcggcttctgcacgccgggcattgtgatgtccatgtacgcacttctgcggaacgcggagcaaccctctatgcgagacttggaggtggcattccaaggtaacctgtgccgctgcaccggctatcgacccattctcgagggctacaagacgttcaccaaggagtttgcctgcggaatgggcgagaagtgctgcaaagttagtgggaaaggatgcggaaccgatgcggagaccgatgacaagctcttcgagcgcagcgaattccagcccttggatcccagccaggaacccatcttcccaccggaacttcagctgagtgacgccttcgattctcagagtttgatctttagttcggatagggtgacctggtatcgtcccaccaatctggaggagctgcttcagctgaaggccaaacatccggctgccaagctggtcgtgggcaatacggaagtgggcgttgaggttaagttcaagcacttcctctacccgcacctcattaatcccacccaggtgaaggagctgctggagatcaaagagaaccaggatggcatttacttcggtgcggctgtcagtttgatggagatcgatgcgcttctgcggcagagaatcgagcagctgccggaatcggagaccagattgttccagtgcaccgtggatatgcttcactactttgccggcaagcagatccgcaacgtcgcctgtttgggtggaaacatcatgaccggtagtcccatttccgatatgaatcctgtgctctcggcagcaggagctcaactggaggtggccagttttgtggatggaaagctccaaaagagatcagttcacatgggaactgggttcttcactggctatcgcaggaatgttatcgaagcccacgaggtgctgctgggcatccactttcggaagaccactccggaccagtatatcgttgcttttaagcaggccaggagaagggatgatgacatagccatcgtaaatgccgcaataaacgttcgctttgaggaaaaatccaacattgtggcggagatctcgatggcttttggtggaatggcaccaaccacagtgctcgctcctcgaacttcccaactgatggttgggcaggagtggagccaccagctcgtggagcgcgtggcggagagcttgtgcacggagctgcctttggctgcctccgctccgggtggcatgatcgcctatcgtcgagctctggtggtgagcctgttcttcaaggcctatctggccatttccctgaagctgagcaagtcagggatcacatcttccgatgctctgccatcggaggagcgaagtggtgccgagacattccacacaccagtactcaaaagtgcccagctcttcgagcgcgtctgcagcgatcaacccatctgtgatcccattgggagaccaaaagttcatgcggctgctttgaaacaggccactggtgaagctatctacacagatgacattccccgcatggatggtgaagtttatctggcctttgtccttagtaccaagccacgtgccaagatcaccaagctggatgccagtgaagctctggccctggacggagtgcatcagttcttttgctacaaggacttaacggagcacgagaacgaagtgggacccgtctttcatgatgagcacgtctttgctgctggagaagtgcattgctatggtcagatagtgggcgccatagctgccgataataaggcgttggcccaaagagccgctcggctagtgaaagtggagtacgaggagctgagcccggttatcgtgaccatagagcaggccatcgagcacaagtcctatttcccggactaccctcgattcgtgaccaagggcaatgtggaggaggctttagcccaggcggatcacactttcgagggcacctgtcgaatgggcggacaggagcacttctatctggagacccatgctgcattggcggtacctcgtgacagcgatgagctggaactcttttgctccacgcagcatccctcggaggtgcagaagctagtggcccatgtaaccgcacttcctgcccaccgtgtcgtctgtcgtgccaagcgtttgggaggcggtttcggcggcaaggagtccagaggcatctccgtggccctacccgttgccctggccgcctatcgaatgggtcgtcctgtgcgctgtatgttggatcgcgatgaggacatgcttatcaccggcaccaggcatcccttcctcttcaaatacaaagtgggcttcaccaaggagggtctgatcactgcctgcgacattgagtgctacaacaatgccggttggtccatggatctgtcattttcggttcttgagcgcgccatgttccactttgagaattgctacaggattcccaacgttcgcgtgggtggatgggtctgcaagacgaacctgccctcgaatacggccttccgtggatttggaggaccacaaggcatgtacgccggtgagcatatcatccgggatgtggcccggatagtgggtcgcgatgtggtggatgtgatgcggctgaacttctacaagactggagactacacacactaccaccagcagctggagcacttccccatcgagcggtgtctggaggattgcttgaagcagtcgagatacgacgagaagcggcaggagattgctcgattcaatcgggagaatcgctggcggaaacgcggcatggcggtggtgcctaccaagtatggaatcgcatttggagtgatgcacttgaaccaagcgggatcgctgatcaacatctatggtgatggatccgtgttgctttcgcacggaggagttgagatcggacaaggtctgaataccaagatgattcagtgcgccgccagggctctggggattccttcggaactgattcacatttcggaaacggccacggataaagtacccaacacttcacccacggcggcgagtgtgggatccgatttgaacggaatggccgtactggatgcgtgtgaaaagttgaacaaaagactggcgcccatcaaggaggcattgcctggaggcacctggaaggagtggatcaacaaggcgtatttcgatcgggtcagcctctcggccacaggattctatgccatgcccgggattggatatcacccggaaacgaatcccaatgcccgcacctatagctactacacgaatggcgtgggagtcactgtggtagagatcgattgcctgactggcgaccatcaggtgctcagcacagacatcgtaatggacatcggttccagcctgaatccggctattgacattggtcagatcgagggagcattcatgcagggctatggactgttcactttggaggaactcatgtactcaccacaaggcatgctttactccagaggtccgggcatgtataagctgccaggatttgccgacattcccggggagttcaatgtcagcctactgaccggtgcccccaatccacgggcagtctactcttccaaggcagtgggtgaacctccgctcttcattggatcatctgcattctttgccattaaggaggccattgcagctgctcgcgaggatcagggcttgagtggtgacttcccactggaggcgccttccacatcggcacgcattcgaattgcttgtcaggataagttcacggaactgcttgaaatacccgaaccaggatcatttacgccatggaacattgtgccttaa

SEQ ID NO: 41571 - protein, 1335 aa, DROSOPHILA
MSNSVLVFFVNGKKVTEVSPDPECTLLTFLREKLRLCGTKLGCAEGGCGACTVMVSRLDRRANKIRHLAVNACLTPVCSMHGCAVTTVEGIGSTKTRLHPVQERLAKAHGSQCGFCTPGIVMSMYALLRNAEQPSMRDLEVAFQGNLCRCTGYRPILEGYKTFTKEFACGMGEKCCKVSGKGCGTDAETDDKLFERSEFQPLDPSQEPIFPPELQLSDAFDSQSLIFSSDRVTWYRPTNLEELLQLKAKHPAAKLVVGNTEVGVEVKFKHFLYPHLINPTQVKELLEIKENQDGIYFGAAVSLMEIDALLRQRIEQLPESETRLFQCTVDMLHYFAGKQIRNVACLGGNIMTGSPISDMNPVLSAAGAQLEVASFVDGKLQKRSVHMGTGFFTGYRRNVIEAHEVLLGIHFRKTTPDQYIVAFKQARRRDDDIAIVNAAINVRFEEKSNIVAEISMAFGGMAPTTVLAPRTSQLMVGQEWSHQLVERVAESLCTELPLAASAPGGMIAYRRALVVSLFFKAYLAISLKLSKSGITSSDALPSEERSGAETFHTPVLKSAQLFERVCSDQPICDPIGRPKVHAAALKQATGEAIYTDDIPRMDGEVYLAFVLSTKPRAKITKLDASEALALDGVHQFFCYKDLTEHENEVGPVFHDEHVFAAGEVHCYGQIVGAIAADNKALAQRAARLVKVEYEELSPVIVTIEQAIEHKSYFPDYPRFVTKGNVEEALAQADHTFEGTCRMGGQEHFYLETHAALAVPRDSDELELFCSTQHPSEVQKLVAHVTALPAHRVVCRAKRLGGGFGGKESRGISVALPVALAAYRMGRPVRCMLDRDEDMLITGTRHPFLFKYKVGFTKEGLITACDIECYNNAGWSMDLSFSVLERAMFHFENCYRIPNVRVGGWVCKTNLPSNTAFRGFGGPQGMYAGEHIIRDVARIVGRDVVDVMRLNFYKTGDYTHYHQQLEHFPIERCLEDCLKQSRYDEKRQEIARFNRENRWRKRGMAVVPTKYGIAFGVMHLNQAGSLINIYGDGSVLLSHGGVEIGQGLNTKMIQCAARALGIPSELIHISETATDKVPNTSPTAASVGSDLNGMAVLDACEKLNKRLAPIKEALPGGTWKEWINKAYFDRVSLSATGFYAMPGIGYHPETNPNARTYSYYTNGVGVTVVEIDCLTGDHQVLSTDIVMDIGSSLNPAIDIGQIEGAFMQGYGLFTLEELMYSPQGMLYSRGPGMYKLPGFADIPGEFNVSLLTGAPNPRAVYSSKAVGEPPLFIGSSAFFAIKEAIAAAREDQGLSGDFPLEAPSTSARIRIACQDKFTELLEIPEPGSFTPWNIVP

SEQ ID NO: 41572 - DNA, 2537 bp, DROSOPHILA
tgcatacatatatacatatgcacatacatatgtaaaattactgtacacctgtttagaatcagacgccaaagtgaacggaaaaacttttgcagtaatgtgagtgagtatcttcaaaacggctcttcatgtttggctctggcttcttatttttcttaaatatgtttcaattcatttaacaagtaacctttcaagctgccagcagcctttttactacattttagttaacgtttttacactccttgtactattttccatttttcttgcctgaacttgtcaagctttcatggtggcaacacttgttcaataagtgatgcagcatttgccattgcttataccaattgtagccccccacagtctaaaaagttatgaattgaaaaagccaattatgtttggccaaattcctatgccacacagttgagcacttaccttcttcagagttcgtattgtataagtaagtaaaacattttgaacattttgggcaccgcagaagattctgcagattggacgccacaaacttgggatcaaagggctttattccactgtcgtcggcaatcatgatcgaatcttagcacgagccgacgggaaatactgcactttaattactacacttttatttaattcccgacttccaagctgtcacacgaagaacagttattcaagcacgccggcgaaaaggaagagggagatggtgatggcagcccttcgatgacagtatcgataagattgctccaaaaaatatcgaaggcaattatcaataaagtgggaacagttagtctcagtaaaagtgggaagagtatttgatgggcattgtcagtgaatagttcaaaaatgatctctttaaaaggcatattccaaataaatagataattatacttactttaacataataaacggacgacaccaatctcttcccaataaaagacttttttcccttaagcacctttattttaacatactacaaatttgaccaaataccgctgtcgaatcgattaactccaagttagccgaacatggaatccaaaagagtgttctcccgctcccgtcggttagcttcatcctgcctaaacctgcgcaactcctcgtaaacaggatcatcagtttccagttcatagcgacacagaggacaggaattcgtctgcaagattcaaaacagaatatagttaataggaacatttttaaacataagcataagattctattttgataacttatctacgtatgtatgtaccttcttcagccagagcaggatgcactcctcgtggaactcgtgcttgcatggaaggatcctgtacttctggccctcttcagctggctccttgcacacagagcactccaaatcgccgccctcgtccgatttgacgatttcatgaactggtagctccagaatggctcgcttggaggcctctggcacctcgatctccatatcgatgccattcatgatggccaaaacctgaaggcgctttagatttctggccaaatcgtttgcgcccagtggtccagtgggttcatgacccagttcctcgaagtagtcggacatggctgaaattgttgtagcagaaattcgtagatggtagcttgatggcaaaatcctcagatcctagatatatgtatactttcgaaactttccacttgataattttgtacctacatacatatgtaaatatcataactattaggagccaaatgtgatttttattcgagtttctcgtatacaattgataacagtctatctgggttaaaactccatttaaattaatttgttgcagcaactttattgctaagtatctaagaggtctttgcatttaaaacgctagcaagtattggttttttttctaggactaaaattcttcgtttagtggctggcagcccagcaatgctctttaaaaagtctaaaattacaggcatacactggcttctttattacgtgagctaggacaaagtccacccaatcaatgcttcactgtacttgttacttattcattattagttctgccaaagaatgcttaagcagtaagaatatcttattctgtcatcttctgagcttcataaagatgaatatttgcaaaggagttttttttttaaattaactttcaatttgatttaaattaaaaagtaaacaatgcttttccaactggaatcccaaaaccaaaccaaaacaaaaccaattccattccaatgaaaacacaaaactaaattccttttcgtttctatttttttgtaattttccttttttactatacgaagtttaaaattattcatttttaaagtaattgatttacgatttacttcaaggtagttttacagagcttgaatcatagtttctactcctttcttctctctctctggcctcacttaagtttaaatcctttgcgatcttatcggaaaactcatacatcatttagtgtaggtattcagagtagtggtaattaatgataaaataaaatacaaaataataagagtaaaacaaaaacaagacttaggcgctacgatttaaaaattagtagtttaaattgctagagaataaattaaagacgcct

SEQ ID NO: 41573 - DNA, 444 bp, DROSOPHILA
atgtccgactacttcgaggaactgggtcatgaacccactggaccactgggcgcaaacgatttggccagaaatctaaagcgccttcaggttttggccatcatgaatggcatcgatatggagatcgaggtgccagaggcctccaagcgagccattctggagctaccagttcatgaaatcgtcaaatcggacgagggcggcgatttggagtgctctgtgtgcaaggagccagctgaagagggccagaagtacaggatccttccatgcaagcacgagttccacgaggagtgcatcctgctctggctgaagaagacgaattcctgtcctctgtgtcgctatgaactggaaactgatgatcctgtttacgaggagttgcgcaggtttaggcaggatgaagctaaccgacgggagcgggagaacactcttttggattccatgttcggctaa

SEQ ID NO: 41574 - protein, 147 aa, DROSOPHILA
MSDYFEELGHEPTGPLGANDLARNLKRLQVLAIMNGIDMEIEVPEASKRAILELPVHEIVKSDEGGDLECSVCKEPAEEGQKYRILPCKHEFHEECILLWLKKTNSCPLCRYELETDDPVYEELRRFRQDEANRRERENTLLDSMFG

SEQ ID NO: 41575 - DNA, 3323 bp, DROSOPHILA
gcagcgggaatacgaagcagatgcaagcacggatataaaattctacaacccgcgaaacacacatgccgtggatctttatttccgtggcgagaaaaccgccaaggtgatgggaagcctcgcagccaagaactcggaggtgggaagcaaactctcaggtgttctggttaagcgcgactttaagtaccacctcttggctccttctgatctgggcagtaagtaatagttagttagtttctttgtaaaaatgtcgattcatttaaataattcccacagaatacacggatatgagcatgtctgttgtaacccaacgccagtcgattccctggggcagctcgctgagcactctagagctactgctggatcgcattggagccggatgcgttgaggtgctggaggcggagcgaaagctgcgcgtgttcggctgcatcgagctaactgtggagcagaaaatcattgtgatggagtggcaagcgacgcatgtgaatgatgtgtacgccgatgccgttcttgcctgcatcatgcaatcggagttgggcggaacaaatctgaagggtgccacaaagcaaaccaagtcagaggactcgcgctttcgggagtgcctaatcgagacgctacaggacaccttcggcgacaactgcgtgccaaaaatgttcgagggcgatctgctgccagtgacggtgagcggtaaacgtgcggaaataaatctggaaaccctggtgagtgttcgtcgaaggtgctttttaaaatcgaaaaatatcgttaatctacaatctttccaggccatcagctgtgccgaggatgatgtgctgcgacaaatgctcaatacgacggttcagaagttacaccagaccctagtctccgctctttgaaaaccattctattccgcttaataaatctccttgtgttgaaatgttctttttattaattgattcaatgttgaaagtactatagtatgcatgagcgaaatggtgatttttcatttgtttcagccagagtagtttcagcgctgggtactcttcgcaatctgctctttgagcatgacaatactgacccgttgctcggagggcagctgcgcaatctgttcgtcggacagctgcagtacctgcatgatgagggcagccttctcctggtcggaggcatccgagggcaggactccatgggcgcctagtctgctctgcaactgctgagcggccgcctgctgttgttgtgtcggtggcggcgcttgggggattccttgtggcggcgcctgctgctgaggaccaggtcctgcccttaacctgggatccatgggacgctggcgcggatcgctgggatagggggccggtggcgcctgcggaacgccctgctgctgctgtgggggcatctgggcacgagctcggggatccatcagcggcggtggcactggattgggtagagaagctcgcaaatcctggtccatgccacggcccatcatcctgggatccatcggcatgggtccacccggcaccatgcgcaaatcgatatcgttcggatggacattggccgggaagccaggtccgggaacgggcattggtggctggggagcctgttgctgttgctgcgggatctgcacctgctgttgcggaacctgttgctgacccatcatggtgtgattccccggcccctggtgcggattgccgcccaagacggggggcatttggttggccttgaagagcatcccgagcgcctgctgagggtccacgatcctcataaccaccatggcctggagcaaagcgtacgccaactgaggattgagcattagcatctggcgtgcctccgatggattgctcacgatgcagagcttcatctgcttcatcagctcgtacatttgctccggcggcaaggaagccaccgttttggtgatgagctcgggagcatcctctggttcgcagggctcgccatagggattctccacctggggtccctgaagcagctgctgcatctccatgcgcgacttctccgtacacgcgttgtccactcgcagtgttctgccgccgatctcatagccattcagattccgcatggcacttaaagccgtctcctggtccttgtactcgcagaagccaaagcccttgggtttgccactttcccgatcaaagaccagtctgggggattgagaataggaggtttacagtgagatattgcatggctctaagtagggaactcacttcagtgacaagaccgggcccacttcgctgaaaatctcctttagcttctcctcggtggcctcgtagggtatgttccccacaaaaaccgaccgcatggacttgtccattatactttgttcctgcgccttatctgccatatctgttgtttgttattatttactgcacaaactcgacaaaatcttagcaaacgttgacaaacttgtctaaaaaattccctgcgttccggcttgctgtttcttcttcttccttgaataatttcccttaccagggattcatacttttcatatactttttgggaaataaagcggtatgggacgcaaaatattaaacaaagtgtaataacagatacgcaagccattttattttattttcttatctaaacacctgagaaaataattaacagtattggtctaatttttgggattctcatccattgccatcacttagaaacgtagtatttagcaagaaaatagctaaatgccctgcttagccaaaaataccaccactgctagtgctggtaagttcccgcagcccgcatacgttttgcagcactccaacgcctggtgttgtaatttttcttgtcgcaaggtgaaaacgatttaaacggtttttgatagtgaaaagtgcaccaatatgcacgaattgtacaccaaattgtagatgaaagtggcgtttattcgttttctatgcggcaatagacaaaaaacggctcgaagtgcatgaaaaacgtgcttgaaaatattactttgtgtgtagccacacgcactccaacacacacaaacgcacacacacacagacagagggagataaacgcagcgatggcctcgcagtcgcactcgcacatataaaaagctcgcttgtatattggaagaaggagcgcacaaagcggaagacgagaggaaagatttctgtgtcattgaacgagaaaaagaagagaagagagcctcctggctcctggtcctcctgttccagttcctcctccaactccacttcctcttcatctttaagcggccgcaggtgcaccacgctctttacatttccaaggatacgctctcagccgctctctctctcgatcgatactggtaattagctggcgtcctctctttgtggaagtgtcattccattccatggacgaaa

SEQ ID NO: 41576 - DNA, 1200 bp, DROSOPHILA
atggcagataaggcgcaggaacaaagtataatggacaagtccatgcggtcggtttttgtggggaacataccctacgaggccaccgaggagaagctaaaggagattttcagcgaagtgggcccggtcttgtcactgaaactggtctttgatcgggaaagtggcaaacccaagggctttggcttctgcgagtacaaggaccaggagacggctttaagtgccatgcggaatctgaatggctatgagatcggcggcagaacactgcgagtggacaacgcgtgtacggagaagtcgcgcatggagatgcagcagctgcttcagggaccccaggtggagaatccctatggcgagccctgcgaaccagaggatgctcccgagctcatcaccaaaacggtggcttccttgccgccggagcaaatgtacgagctgatgaagcagatgaagctctgcatcgtgagcaatccatcggaggcacgccagatgctaatgctcaatcctcagttggcgtacgctttgctccaggccatggtggttatgaggatcgtggaccctcagcaggcgctcgggatgctcttcaaggccaaccaaatgccccccgttccgcaacagcaggtgcagatcccgcagcaacagcaacaggctccccagccaccaatgcccgttcccggacctggcttcccggccaatgtccatccgaacgatatcgatttgcgcatggtgccgggtggacccatgccgatggatcccaggatgatgggccgtggcatggaccaggatttgcgagcttctctacccaatccagtgccaccgccgctgatggatccccgagctcgtgcccagatgcccccacagcagcagcagggcgttccgcaggcgccaccggccccctatcccagcgatccgcgccagcgtcccatggatcccaggttaagggcaggacctggtcctcagcagcaggcgccgccacaaggaatcccccaagcgccgccaccgacacaacaacagcaggcggccgctcagcagttgcagagcagactaggcgcccatggagtcctgccctcggatgcctccgaccaggagaaggctgccctcatcatgcaggtactgcagctgtccgacgaacagattgcgcagctgccctccgagcaacgggtcagtattgtcatgctcaaagagcagattgcgaagagtacccagcgctga

SEQ ID NO: 41577 - protein, 399 aa, DROSOPHILA
MADKAQEQSIMDKSMRSVFVGNIPYEATEEKLKEIFSEVGPVLSLKLVFDRESGKPKGFGFCEYKDQETALSAMRNLNGYEIGGRTLRVDNACTEKSRMEMQQLLQGPQVENPYGEPCEPEDAPELITKTVASLPPEQMYELMKQMKLCIVSNPSEARQMLMLNPQLAYALLQAMVVMRIVDPQQALGMLFKANQMPPVPQQQVQIPQQQQQAPQPPMPVPGPGFPANVHPNDIDLRMVPGGPMPMDPRMMGRGMDQDLRASLPNPVPPPLMDPRARAQMPPQQQQGVPQAPPAPYPSDPRQRPMDPRLRAGPGPQQQAPPQGIPQAPPPTQQQQAAAQQLQSRLGAHGVLPSDASDQEKAALIMQVLQLSDEQIAQLPSEQRVSIVMLKEQIAKSTQR

SEQ ID NO: 41578 - DNA, 7515 bp, DROSOPHILA
ggcaaggttctgaagaacggtttgctgagcctggagaaggaattcccgcatatcttgaactccacccgcggtcgtggaaccttcttggcagtcaactgcaccaacaccaaggtgcgagatcaaattatcggcgcactcaagttgcacggcattcagaccggtggctgtggggaaatttccattagattccgcccagctttgatatttaaggaataccatgccaacatcgtcctcgatcgcttccgcaaggttcttcaaggtatttaagaagaaaaagatacgaaaaagatttaatgattgtgctctgaaaattgcaatgcgtgcaatataaaccatatgttatcgaaatgaataataaagtaaattaattttatccctctgttagccatggcgtatgtttatcgatttctgttcaaggttgggacaccatcaagcgtttagcttattttttcacatatgatagagcactcataataaatttatgatataaccaacaaaaaatatattagcttccttagagaaaaaaagataggctaatcttatcgaaatgcagagtattagatatatagaactggttataatgctgcaataaaattttattgttgagtgctttttctcctctttattggaacgtatgctccatgattcctctactctgctagttagctttgtataattaaatacaaaatatgtttaatggtctcacatggaagaccataatacttatatatataatacttactccatatggttttcaataaattgtgtgacagaaacgctttgtttatgatcattttattatgaaaattttaaaacctcaacatgggtgttttggaacggtcataatagatattgtttaatattataattaaatattataagaattgtttattattagaaagaaatatacataatggccatactgaaacaaaacaatttaattcgcaattactctatacacgtttaaatgattattgcttgcttttcaatagtaattaagttaatgagactgtggatcacactgtaataatcgtactattgatggatcacttttggctccttctatgaactcttccaagcttaatttcccatccttgtttcgatccatttgacgaaaaatcttgtcggttcgtttctcaggagtactctcgtcctctggcattttcatcaccgagccgaccattttatatattgcctaagcaaagaaaaatgtggtaattgattagacttatatttttgatttgatctgagggaagcagaaacgtactgtaacaatttctagcatttcctgccgcgatatgtatccgttcccatcaagatcgtacattgagaatgcccatttgagtttctgctcgagtttgccccgcgatgtgacacttagtgcacacaagaactctctaaagtctatagtgccatcgccgttggcgtcgaatgtccggaagacatgctctgcaaactgaaaatataattgcatttaatgtgtaaattcaaatacctgagtaaagtcagagctcttaccttgctagcgtcaccatatgggaaaaagttcccataaatctttttaaactcttctactgataaatgcccactagggcagtccttaagaaagcctttataccattcttgaatctcagcgtctagataaatataaattataataaagtttagtttagttaacaacaactaagtgttaaatattcacttacctgtgaactctgtgttttgcttgagatcctccaaaacttctggttttagtttactattttgctttcccattgttgcagaacaatttcattatacagttatcttgaatggcaatataatatatcaaattaacatctaaatattggacgattagggaaaagtgttcatcgggtaccgaagcttaaatacccttgcagacagattcttaatgtacagccaaattaagcaaatagccaatggatattgttgtaagaccatcttgcagtgtaaaccttttggcatttataacaaaatataaatcctttgctacgaaatattccatatatgtaatcaatactgggacatgttcgccaaatggtaagaagcacgcaaccatacaataaagcatttccagtgaagatatattcccagttaaaaaattttagtattatctaaaaaaaactttacttttctactttttgtaaataaggaaactaaagctaagtccccaaagaatagaatagaatagaatttaacaggcttctagtatgaaaacatggctaagtagtctaaaattgattttgaaaaatataagagtatataagacacaatattatacccaatttcccagtaaaatatagaaaatttatatagtaaattttcaaatttcgttgccgtttccaatagcgtccaatcatcggttgcagatagtttttaaaacacgttgaatatattttttagtccgtcgagaccaagctaaaaacaccgctataaaatgagtgaacaatgcaaatacgaaaattaaaatcattaaacgattcatgtttttagatctggtgaaaaattttaatgtattaatttgagtgacacactgaaaatagtttaatgattgcatagttttatagtagtttaattttagtataagaaatataaattaagtatttatacatttcattactgatttcatcaaatacacacatattgtaggatataattgtttatggtgccaacatttttgacaactcctcatcttgcaagcatcctttcaagaactcatcttgggttaattgaccatcgttattttcgtccatttttgcaaaaatattttttgctctttcttctgctgaatcagctggacgattagatgagcacgctcctagcatgtcataaattgcctgagaagaccaaaatacgttaataaaatcctttccagcccatataattgcattactacataaatgaatcattcgttgaaaaccctagtgactagtgactagtcggccacacttctcagttcctacctgaacaattttggtcatttcttgtatgtctataacaccattgccatcgacatcgtacattcgaaaggcccactttagcttttcctccggtgttccgcttgaagttacatctattgcgagtaaaaattcctgcaaaagcaataaggtgcttgttgtaaaattcaagtatgcaaatcaggaaagatgcctatagggggaattgtcgtcacaacacatttggatgcatcaattattttagtttatttattatttaaagtaccatgcgcgagggggcccacaatttggcatagctatacaataataacacaatctgcattctcatcacatcgacgatatacatgcgatcatcccaatatgtgcaaatatatgtacaaatgttttttttttttttttttttttattattttgcttttagaagatttgaaagtctctagaatcaacagtcttaattgaaggacctacgatatgattggaataataacattattctaacgtgtccaaagtcaaccgaatatagtatcgagagaaaaggtgtaattagagagaattaccttaaagtcaatatatccatttttgtccatatcgaatgtacgaaaaacatggtcacaaaactcttccgcatttccggatggaaagaacattttatacatatcgacaaacttagctggcgtcaatcggccgttggggcaatcttgctatatagaaaagggaggacgaacggacataatttgagacttttgcgttggtgtggtaatatttgtactcaccttaaatcccttataccactctttaattgtggcttcgtcatatctcgtatgcgtttttaagaactccatgtcctctttggttaaacggtctttactacttaagcaccccatgttttcactgtttttaactttttaggagctaatttgtttctatttagtgtttttctttgtttaaattgctttgcctggccagtacatttgacttaatgtttattttctggacagaaaaactccaaatcaataaatgtgcttgtatagcattacgttaacgatatgtatgaattgtggcacgaacaaattgaaattgaaattgaacgagcgactcatttataaatttttcttgataataataagcaaaaatgtacttgactattaacttgtatatttcaaacctgatgtgtaccgaaggactaatcaaatggttgaggcgcatgcgcggaaattgtctctatacatgacgattattggttaaccatattttctgtacacggtaggacttttttgaaaggggaacagggttgccacgttcacctacactcacgttatttatatttgaaaatgctatatgctaaagggtaaaataatttgggtaagaaacataatgaacattaaaatgagcgtcacataagttctcccaaaggttatttctcaatgtaaaagccagtttcagtttattgcaaaatagcttattgctagctgttcgctcattattttgagttaagtatacaagaactctaaaagatttcaggcaaaatttaacatttttaagtcacccctaagtgttatggagtattattgtttagaaaatgtacaaaaagcgatgcagagctgcaaattaaaaggctgtatcagtcaattcccacgaagagcggttacctcaccgccaaaacgaaccgtccacacaaactgcgatcccatcagaaaaagcgaaatgccattctggagatagcaaagatcaatggaaagtgcaaacgatgaacaatgttttagtttcgcacagtgacgaaacaattacttcgatttggagagcgatatagacgataaattaaaatagacttggttccgtttgtttaaatattcttttatattttgcaccaagaggagtaggaaaatatgtgctccatcaataagtggagttagttgcttttaccaaataaaaataaaatcatctgcaagggtatattatattcttcgttttataaaatccgaatcggtattaaacatgatcaattagtatgattgattactttaaaggtttacacacacatttggaagatatttattacaagtcatatttgtttaattggctgcttaagtattgggttagtcatgcatttaaggctataattaagctaggcacaaatattattggtatttatttaattgtacattttatgtgattcctttacttacatcagtttgatttccgtcgaccaagtcaaagcattatttacctactgaggctaatatgctgaaaatataaaaagagcttgttactacaaaatcgccatcggattgtaagaaaatattataatggaatatgcgattctcttcgatattgctgaatcttttttttcgaaagaatataaagaaactccctcaatttaaaatttcaaaatagcagcaacgaaaaaattgaaattaaagctctgccatgagccaaattcgtgccaaacggaaggtagttgagttttgaaaatggctaaggtcatggtcaatctggaggcaattagttcggttcctggagaaacccaaaaccccattttgaacacgtattttggagtaagatgttgggaacaaggctattttgggattgtgggtcacaatcagcgcttgtttcactagatggctggtatactttgggccagaaacgcgagtgcgagtgtcaatgcagtttgaaatcgcctttcgcgatgaatatacgccgaataaatggaatttttggcacacgcatacgcctgcgtgtcacgtggggaaagcacggcccgcgcctacagttttttttcctgcccttcctccccagcgttcgttcggtgttacggcctttttattttgcacataatattcacaccaaatcgggtaaggggctccagtgggctccagcagggggtgggggagggtggtcagcagggaaaggctggcacttggacaccaatattccacatcgtataccaaaccaagtgtatgcgtttcgagcgggggtttctttggcgatggcttgctacacaacttgctacacacgtttaactcccagtggacctcgggttctcgcttacataaattggcactgtttttttttttttttttggagcgagaattcgaatgcgaattaaaatgcattaatataaccggctcgcactgctcgaaccgctcgatttaaataaagtagtttgttgtttgtgtccatatgtgcttgcgtgtgtgcgagtgggcatggctttgtcacatggtccacttggccccaacgtacaatgtcctaggaaaacgatttgcttgcttgatttttattctccacacaaattcgccctaaattgttatttttgatatttacatatgtacatatgtacgcaggtgcgtatgtacatatgtacgcacatgcagtgtatatgcacgcaaaatgggctaaagtgtgtatgtagctcgattcacacgggattttcgccgcctcggcgggaggtgggtgcggttattacctgaacgaaaatgacacattgattttaggcacatttctgctacccgctaggctaaacaaaatcacttttcgcaaatgcaataaacttattcgaccaaaacacaatcaatacaacaaatttaggggtggcttaaatcgaggcgatatatatacgagcgccttatcgatgtgtgctgctggttttcgcttttgatgtatcgataagttagggcgattgttttcacgccgtttaaacaaaattgtttttaaattaatttcggggcttttaagaaaattataagcatgtatttaagcaagaataccaatacggttagagtattagttagatcgtagatataacctatataaataaatttatgaagtgttccactttcgtcgttcccgtgatagagtaacggttcctttttaaataattaaaattcttattggattcatgatgaaaccaaaaaaattttaaaataacaaatttaacaattacggtgcggatttcttatgtgaacatttatcaactaggattcataatctttaggcttattctggaaaaagttaacaagtgttgtaactatttaaaattaagtccgtataaatgagcaaattgttgaaatcgatcaaattgagcttaaaagatttatttgactacttaaatttgaatctgcttactaactttttcattgttccggaacttttgatgctgaaatgtgaaactatttagtacataggtgttaatagcgtttcggccaattaaatttagtatgtgagtacgcatgccaacctttgtatatagatgttgcttctcgatatatttagattaagttttctaagtgcatttgtttcgagcagcagttcgatcatttagtcttttttcctttatatcagtataaacactatagtaaaggtacggtccctaatttttcagtggacccaatgtcctagttttagctgctagaaaatcaatgtgaatcccttgaacgtctattaataagtctatgataaaaagtcctttggaaagataacagtgatatgagtggtttaagagatgaatctatacaattcaatcgatgaatgatgtaac

SEQ ID NO: 41579 - DNA, 702 bp, DROSOPHILA
cgaaaagtgattttgtttagcctagcgggtagcagaaatgtgcctaaaatcaatgtgtcattttcgttcagcatattagcctcagtaggtaaataatgctttgacttggtcgacggaaatcaaactgatatgggaaagcaaaatagtaaactaaaaccagaagttttggaggatctcaagcaaaacacagagttcacagacgctgagattcaagaatggtataaaggctttcttaaggactgccctagtgggcatttatcagtagaagagtttaaaaagatttatgggaactttttcccatatggtgacgctagcaagtttgcagagcatgtcttccggacattcgacgccaacggcgatggcactatagactttagagagttcttgtgtgcactaagtgtcacatcgcggggcaaactcgagcagaaactcaaatgggcattctcaatgtacgatcttgatgggaacggatacatatcgcggcaggaaatgctagaaattgttacagcaatatataaaatggtcggctcggtgatgaaaatgccagaggacgagagtactcctgagaaacgaaccgacaagatttttcgtcaaatggatcgaaacaaggatgggaaattaagcttggaagagttcatagaaggagccaaaagtgatccatcaatagtacgattattacagtgtgatccacagtctcattaa

SEQ ID NO: 41580 - protein, 190 aa, DROSOPHILA
MGKQNSKLKPEVLEDLKQNTEFTDAEIQEWYKGFLKDCPSGHLSVEEFKKIYGNFFPYGDASKFAEHVFRTFDANGDGTIDFREFLCALSVTSRGKLEQKLKWAFSMYDLDGNGYISRQEMLEIVTAIYKMVGSVMKMPEDESTPEKRTDKIFRQMDRNKDGKLSLEEFIEGAKSDPSIVRLLQCDPQSH

SEQ ID NO: 41581 - DNA, 3375 bp, DROSOPHILA
atccttgtgaaatacaccatcatctgtgtccgccttggtgtcggatttgtcctgagcgcttaactccggttcaggttctggttccggctccggatcgagtgatatatccgatatgcttggcaaactttcaaatccgcggataaactcactctttatggacactcccagcctgggcaagggctcatcaaagctgccttccgaatcgagatcctcttcgatttcctcttcgacgacaacgcttgggggcttttcgttaaggatggcctttatatcttcgaagtcatcttcggaatcctctccgcccgattccacggaatgaagttcctccttgtcctcgtcttccggcatctcctcagattctattggagctttagccaacgcagccttcgcagcctcttcctcgtcttttttggcaagcctttccttaattctctggagcttttcgcgctttcgttcgtcggcggtagcaagacccttgtgtttagctccagactcctccccttcctttgaggcttcgtcatcctcggctggcaacaccgtttcgccttctccttctatttgatctacgttagctgtctcaccttggatttctgcaccctccgccgcttccgcgatcgttactagtttgggagcatcctccgcggctggaatctccgcgggtggaatctcctcggcattgtctatgggggcagcctcttctggtgcattttcagccatctctgtgcaattgaagtcgtttcaataacgtaaatgttttaaatgttttgggtttctttttggtatatacataagttgttatgtttgctgtttgcctaaaattattaactgctgcttgagattagaatcaatggctgttgggttttgtcttatatagtacattttattgctatcacaagttaatcatacacatataccgtcggaaaaaacaaactaaaattcaattgtctgtaatggagtttaatgcaagctctatctttggccaaatcgcggtggcgggtcactagttgaaggcgtagagcagcagcaagatcacacagaagccaataactgctcccaggatcagcgaatcgcgtcgctttttaatgttgatgcgctgaatgagactgtgcatatacaacaaataattggataagtaaatatgcataaattgaattgagaactcgtctgtctcacctggaaatcagtgggaatcgattggagatatcgttaaagcgggtctgcagccgcttgaatgcttgtcgctgggcgtgaagatggtcacgcgtctcaatcgcgatatttatctgatcgttgaccaagtgactggcgctgttgaggtgcccgctctccttcaggtacatttctcgccggtttaggcccgagatggatggactgccggagctggtggccaaccctgagccacgaagcagctcctctcgctcgattcgcattgtgtgattggcgcagatcttattgaactcctggcgatacccctgcaggatctctcgatgcctctgcagtgtgtgcatggcggctgctccagaggcgggcaaatcggacatggactcatttagcgaggatagctgcaattaagaaggatgaaatagaaatgaaatccttctattctatagaaattctatagatatgggaattgcctaaaaaacgtagataacttaacaagcaaaacaatttgaacattttgtgcttcagtcggtgactcattcattacttggaattatctattaaagtatttatcaaatggaattcatttagcgaattcaaagaggaattcttaaacattttcttttaaagaatttagcaaagatcagagcataaaaaaaactcgaataataaagtataatatatatacagattcataaaaaattggaaagtgatggaatgttttcaatatatataagttaatcgtggcagtttttcaattgtgtgctcaattctgccaattaaattatgatttttgggaaggcttagtgggaaattagtaattcatagtagcacaaagccggtggcacagaaatttgcttaataaataaataaggaatccgcactacattgtttcgggtttaatccctgcaccatcgcatggcattgggtcacatatcgcaccttctccagcatttgctcgatctcctccgacagcgaatcgaagacgtgctcgcccaggagcggcgatgtgtcaacgcctcctagtcctccacttccacctcctccactgccagctccgattttgctgaatgccaccagcttcaggtcgatctcgttttccaggctccgcgcctgcttcctgagcactgtgcgggaggtcgagaggagagatagcttatatggaaggtaaccattaagtcccactgctcaccatcgtagctggatcctcccatttgtcaaaaatagttttcctttatttgttcgactttcgtgtggcaatcggtgtgaccaggtcaggcggggcccaagtggaatgagttgagagtatcgggaaagattaatagccagatttaatctaggccctacttaatgaacaaatgtttacgagaaaattaaattgtcctaataacttaatgttaatgtaaaaggaaaaagtacaatgttcttttccagcccttgtgtgaacaggtccataccggcagtcatcaaactttggtcacactgccgtgcacagcgttttgttgccggcgatttgtaaaaaagtttgttattgattacattattttagacatcatgacgcaggcaacaggtgatgcacgcatgccagacgaggaaagcgacctgctgcagatcaagccactgtaaggaatcttgatttaaaccagatagaagctcaagggtaacgcttatatttcagtggtgctggccaggaagtgggacgctcctgcatcatgttggaatttaagggcaagaagataatgctggactgcggaatccatccgggattgtccggcatggatgccctgccctacgtagatctaatagaggcggatgagattgatctgctgtttatatcacagtaagtactgcggcgattaaatgggcattgaacttttaatggtgaatgcttatatttatcagtttccacttggatcactgcggtgccttgccttggtttctcatgaagaccagctttaaaggccgctgctttatgacccatgccacgaaagccatttaccgatggatgctgtccgattacatcaagatcagtaacatatccaccgaacagatgctatacacggaagccgatctggaggcctccatggagaagatcgagacgatcaatttccacgaggagcgcgatgtgatgggcgtacgcttttgtgcctatattgctggtcatgttttgggtgccgccatgttcatgatcgagattgctggcatcaagatctt

SEQ ID NO: 41582 - DNA, 699 bp, DROSOPHILA
atgggaggatccagctacgatgtgctcaggaagcaggcgcggagcctggaaaacgagatcgacctgaagctggtggcattcagcaaaatcggagctggcagtggaggaggtggaagtggaggactaggaggcgttgacacatcgccgctcctgggcgagcacgtcttcgattcgctgtcggaggagatcgagcaaatgctggagaagctatcctcgctaaatgagtccatgtccgatttgcccgcctctggagcagccgccatgcacacactgcagaggcatcgagagatcctgcaggggtatcgccaggagttcaataagatctgcgccaatcacacaatgcgaatcgagcgagaggagctgcttcgtggctcagggttggccaccagctccggcagtccatccatctcgggcctaaaccggcgagaaatgtacctgaaggagagcgggcacctcaacagcgccagtcacttggtcaacgatcagataaatatcgcgattgagacgcgtgaccatcttcacgcccagcgacaagcattcaagcggctgcagacccgctttaacgatatctccaatcgattcccactgatttccagtctcattcagcgcatcaacattaaaaagcgacgcgattcgctgatcctgggagcagttattggcttctgtgtgatcttgctgctgctctacgccttcaactag

SEQ ID NO: 41583 - protein, 232 aa, DROSOPHILA
MGGSSYDVLRKQARSLENEIDLKLVAFSKIGAGSGGGGSGGLGGVDTSPLLGEHVFDSLSEEIEQMLEKLSSLNESMSDLPASGAAAMHTLQRHREILQGYRQEFNKICANHTMRIEREELLRGSGLATSSGSPSISGLNRREMYLKESGHLNSASHLVNDQINIAIETRDHLHAQRQAFKRLQTRFNDISNRFPLISSLIQRINIKKRRDSLILGAVIGFCVILLLLYAFN

SEQ ID NO: 41584 - DNA, 6987 bp, DROSOPHILA
tgtggacgagctgtttggcaaaatggaaagagtcgagcagcagcaggaggacaatcgcttggcggatgccgcacccttacctgtctacgaatcctccagcaactcagattcggactctgctgacgaagaggcattcaggcgacgcagcaaacagcacaaggagcgtgataattttgctgaaatgcgtcaatttcttgctcagaagcaggctattaatctgtttaagctaccaccaccacctgtggccgccggtggggaggagctgcttgaaagtgaatgctagacgggctggctggctgtttgttttgttgttcactagcctgttatctggatatttgctctgaatagtttaagcttttatcatttatctagccaattggagagatagaccgctcgccaagcgacgccacatcaccccgaacacaactttctgcctttcggttgttcctcgttttgatgttccctaccatttttataactaaataaaacatagcaaaacaaaataaaacaaagcaatgaataaatgttattaagtaggccaactctacataatacatatgtgaaagcaattggaaaaaattcatttaaactatttgaatcggcaattcgttttgacacttgcgtttaaggaacttaattacacttttaattaaaaatcattgttaaaaaaaaaacataagtttggcaatcacgttaccgatatatgtatactctatgtaaagaactgtaattgaaattaaaaatcttttattacacactaatgtgcggatcttaagtacaatacacaaacatcgatggcttcactaaatactagggtctagggactggcaatgggatcagctcctttgtggaaattaatacagggagcacctacatatgtacaggatagcacgcacaggaagtctttcggttgggatcgcgtcactgtcgtggacatctttggctcgaaacttgtgcagctagctcggaatttgaaccgtattaggattttaacaccgtgttaggcattggcagcaccagtggtcaccccactgctgctcccggcatgaacattattgaacttgctggccaccgagacgggctgcagctgcgagaactgcgacagattgctgcccctaacgctggtgtaccggatgggttgtactccgtaatcgctgcccttgagccgtcggcgcacacagaccacgacgaatccgatgaccagaccaattaccaggacaatgctggctataatggcggtgagtattatgtagtggcgtcgcaggaatcgcggtggctcctcgtccacctcgcgatatttcttgggtatcaccattttgcaaatacgttcggctgtcaaattggagagcggagatccggccagaaggtatggcgtttcacaacgcgcctcagttccatcccattcccgatcgatgtggttcagtccaatcagctccagggctttgaacagttcgcagctgcaataccagggatttccggagatgctcatgcgacggagtcgtggccaggtctcattcgtagaattactactgttattgctcgaaccggtggcattgataaccagagtagtcagtgcattccaggacaagtccaactgcgacaaatttcgactgctcagaagatcggccaactccaagcgctccagcttcgagttcctagagcaatctaggtgctccaaggcaggcaagttcagagcacccttctccagacttcgcagggagggcatgctacttatattcagtcgtttcagggaaaccaagccctgcaggctattctccttcaagctgagaaatgcatttcccgccaagttgagttgaaccaaagatttgcccaatagctgcaggctggctggcatcgtggaaaactcatttccggagacgtccaggaaacggaggcttgtgagcttcgagaaaagctgcgctggcaaagtcatcaggccattgtgcgagagatccagtcgctgcagtgtagcaaccgatccaatggaggctgtggtggcttcatccagggaactcagcttgttgtaggccaagttcaacttggtcaagtggggagtgtgctcgaagagccggcgatccagtcgaactatccggttgtggctcaggtccaggtctcgcaaaccaatcggctcgtagcgagtgttgcggaaaggacccctgaagagatccggcaccaaggcatcgtcagttatatcattccagctgatataaagggcctgcacattgggcacgtccatgaacagcggagcctgcagatcctgtaggccacagtggcggcaggagagagttaagctggcatttgtggccggcagctgttggagcaacttgatcctattgcccgagtacgagacgacaatctccgatgcagctccggacgcaatcgcctggctgccaaactgctccggccagcgggccaggatgtgctcgaaattcctcaccgagcagtccaggttgaagtgcgtccgatgatccacatcctgggtgctgaggcacaggcacgtctggcagatgttgctcaccggctggtacggaatgtcctcatgttggctccgaacttcagtggccaggagcaaagccgctcctgcaaggaactaaatgataataagcgcttgagttaaatgatacaattgcatatataaatcaaaataaatttttaagtgctttccgtttccttcgaaatattgtggaatatatctagttaaaatcttacaagagttttaaattttaatttaaatattttttggattgtttttggaatttcctcaatttttaataaaaaatcaaatggggatctttgctacatttcgtctcaaaaaaaaaagtactttagggagattataacattctcggaaaaacaacctgagtaatatgcacgtgtcccttgaaattttcgccacattttccatcgttctgaccatggacagagtgttgtatgtctgatttgaagctgcttctcatatgtcacgattgccacgaagtacaagtgttcagacagacgaaagtactttgcaaaccagtaaggttggcgccattaatataattgcattgctgcatccaagagttctaaaaagctgagacgtgtagcgaataccaatgcaatgttttataggaattttatatagcaaaagtaacttgattttcatttaaggaacagtctaactgctaattgcccacacataattgattgcattgaatactaagaaaatacgtatacgacagggttaacggacacaagtttgcttagtcaacctaaaaaactgtgctcatttttttttttaaatcaatcatttctgggtcaatatacaaaacaaagaaattattctgtcatcgatcgttggtctgtgtacaccgcaataaatatttatataattaatcaagtatatattttacattagcattctatggaacatatgggttctagtaagataacattgattgatatagtagattcggtcagccatattctacatagatgcgtctagtttggttcgctgcaactactctccgaggaactttaacataataacatcaagaactacatcctcggctttgtcaatcacacataaggagaatacgagctcggccatctttctccaacgatccccacgatttctgttcatcttcattagggttttgaagtaaattccgattggtatccgtactattgctgctttcatgtgtcttgaagacttgagataaatttgtggcaaaacatgttcaactgatatcggtgagtgaaaactgaaagccaatgcgatgtatctccaagtggaaaacatctcgacatgacgcatctgattgactcacacagatctgattcgataacctatatggcatcctaattttgttgtttttttttttgggccaactggccgtccggaaggaggtcatcgatgtgcttcataaaaaggtctccccacttgggcacattcaggaaaagagcttaacggaaaacactctctgatccccactatctgagcccaaagtatgtgcgataagatagggatactgttttagatggctgaaatatttactcaccaacaacagaagtttgtgcttcattatggtatcggttatatgtagattcgatttgagtttcggtttcggtgttttccaactcaggcgtactgaatttcgagttatgttgcttatatcttttgagtttcttgttcttgcacttatttgtcttttgattaaatttttatccagaacatttacttattactttttaaacgcagcacacggcaagcgtactgcatgcctcgcagtatagaactaaatatatgaatcaagtaaagccgccgtggactgaagcattatttgttttgattagatatcggtgggcaagagaagagagtctctctcggggctccactccctcatcctacctctatcacgctctctctcccacgttctcagttctgagatcgtaatctaagccgtcggtaaaaatgagtaaaaagtaaaagtgaattctaattgagtcatcaacggactcttctgcctttctggctctccccctctgctttctctctacttctatgtatatttttctttgcaaggccgtcagattgctttgctgctttcttcgtcagctaattgctcgtagccacctgcctaaagtgcaattgcctctcgagcatacaagaactacagtattgcacccctacggcgaatttcagtatctctaagaaatgaaataacaatggatctacaattgaatttcatcaataagttgtatcttttaaatccaaaagtaatttcgttactactctcgattatatctcatatttttctaaagaattgaaaggaataaaaacaaatcagaagccaacattatgttgttatttttttctacatttattgtatatttctttatacagtactcaacattagcatttcgagctatagaagttttactgtattgtttggcttcgagcagattgcgctgtgataagataagactttgtgtctcgttgtgggaaaaagttggagccaaataattaaaccatcagttcactcagcttagccccaccacatctgctccaaatgacttttgattcaatggccgaaggagagccaattagatgcgatcgcaattgcaagtgtcacttggttccattgaacttgctgacgcctggcatcgggaattaagaatcgagaaatgagaaacgagagcgaagaatggagaattgagctgttcgcagctgccgacgatgagaaaggcaaacaagaagtgtttgtggctctggaattggttgcataaacaaaatactgacgaagttaaccgaacacagccagacgaccaatgttgcccagacacttgtgactcacgatcgcattggaggcaagtacagtggacatcgcatagattgtaagtatctattgtggtagcttttaaagtcgtcacaatgcacaaatgtagcagctccaatacgaaatatttctaatatcatttatacctgtatctacctaaaaagcagtttcattagaatgcattaatattacactatcttttaaatgtcccgcctttgatgttcctagcaaatgctatcagaaactagttccccgtctcacttcttatccgatgtccactgtaaacgttcacctaagagatttgatctctgtcgcctcgcctccaatagcgtttctttcaagaaaccgcaagggtggcggacgagacgcacatccgtggcaaagttccatgtgcttactagtcgttagtctgtgtttaatttaatgatgaaggcttttgcatattccgtgaactgcacgcgacccaaccgcacacacaataaaagtaaatgtccgtcgagtgcgaatgaaacccgtttgcgttgctgcggttactgctgatcttgccgatgttgctgctgttgcacttttgcagctgcttggggaacgatgctcatcctcgtctgtagaagaaacacgcgcgaaggctgatgtcgaaaacggaaacgttagcgcagaggagccagcaacgaacgatctctacctgcccgccgctcgagtcgaactgaacaaaaaaaccgaaactggaaatttgctgctggatcgagattcccgttcgcgttcccacaaaagtggacacagtgctcccccgaaaagaaaaccggtcgggggctcgctggccgaattttaaagcgagactgtggcacattgtttatgccacacagtgcctttttgattggggcgcattattaatgtgtggcagctgcacttttccaaatgtcagggctccaaatggtagccaaccggaaatgggggccattataggtcgtgacgaaagcgtttccttggcggcaattcacaaaagcatatccatagacgttagttagaaacaaacatttactacgaaacaaggtaaccgaagaatatgagcctatctagaatacatgtagtagtcgatggccgtggagaaggcggcgaatcccaggccgccgatgatgcccgccttaacgccagcccgcaaaccaatcagtcctccagtgatgcctccagcgtaggtgccattcttccagtccgtgacgccccgatgctgcaaaaatcagaaggagttctagttaatacaaactaatacacaacgcttttgagcaggtggacttacgctctcgatggtgcactcgacggcggagaacacacagccgatgagcgcgaaattcttcgcgtaggaatgggtggtggagcgcatttcgcggaaaacctccctggccgtctgcttcttctcattcgcgaacggatcggccatgttgggattaacggaggcgctaaacaaacccaaagctgcacccaagccatagcctgaaatggagtatagatatatggttaacataaatttaaattcttacatttaagttactaacaaatactgaatctgaacaaataaatagaatattgtaaaagtaaataactcaacatgttataatttgattagctttttgtaaacatttcattaattaaccattaataataacatataataatc

SEQ ID NO: 41585 - DNA, 2101 bp, DROSOPHILA
ttcgttgctggctcctctgcgctaacgtttccgttttcgacatcagccttcgcgcgtgtttcttctacagacgaggatgagcatcgttccccaagcagctgcaaaagtgcaacagcagcaacatcggcaagatcagcagtaaccgcagcaacgcaaacgggtttcattcgcactcgacggacatttacttttattgtgtgtgcggttgggtcgcgtgcagttcacggaatatgcaaaagccttcatcattaaattaaacacagactaacgactattctatactgcgaggcatgcagtacgcttgccgtgtgctgcgtttaaaaagtaataagtaaatgttctggataaaaatttaatcaaaagacaaataagtgcaagaacaagaaactcaaaagatataagcaacataactcgaaattcagtacgcctgagttggaaaacaccgaaaccgaaactcaaatcgaatctacatataaccgataccataatgaagcacaaacttctgttgttgttccttgcaggagcggctttgctcctggccactgaagttcggagccaacatgaggacattccgtaccagccggtgagcaacatctgccagacgtgcctgtgcctcagcacccaggatgtggatcatcggacgcacttcaacctggactgctcggtgaggaatttcgagcacatcctggcccgctggccggagcagtttggcagccaggcgattgcgtccggagctgcatcggagattgtcgtctcgtactcgggcaataggatcaagttgctccaacagctgccggccacaaatgccagcttaactctctcctgccgccactgtggcctacaggatctgcaggctccgctgttcatggacgtgcccaatgtgcaggccctttatatcagctggaatgatataactgacgatgccttggtgccggatctcttcaggggtcctttccgcaacactcgctacgagccgattggtttgcgagacctggacctgagccacaaccggatagttcgactggatcgccggctcttcgagcacactccccacttgaccaagttgaacttggcctacaacaagctgagttccctggatgaagccaccacagcctccattggatcggttgctacactgcagcgactggatctctcgcacaatggcctgatgactttgccagcgcagcttttctcgaagctcacaagcctccgtttcctggacgtctccggaaatgagttttccacgatgccagccagcctgcagctattgggcaaatctttggttcaactcaacttggcgggaaatgcatttctcagcttgaaggagaatagcctgcagggcttggtttccctgaaacgactgaatataagtagcatgccctccctgcgaagtctggagaagggtgctctgaacttgcctgccttggagcacctagattgctctaggaactcgaagctggagcgcttggagttggccgatcttctgagcagtcgaaatttgtcgcagttggacttgtcctggaatgcactgactactctggttatcaatgccaccggttcgagcaataacagtagtaattctacgaatgagacctggccacgactccgtcgcatgagcatctccggaaatccctggtattgcagctgcgaactgttcaaagccctggagctgattggactgaaccacatcgatcgggaatgggatggaactgaggcgcgttgtgaaacgccataccttctggccggatctccgctctccaatttgacagccgaacgtatttgcaaaatggtgatacccaagaaatatcgcgaggtggacgaggagccaccgcgattcctgcgacgccactacataatactcaccgccattatagccagcattgtcctggtaattggtctggtcatcggattcgtcgtggtctgtgtgcgccgacggctcaagggcagcgattacggagtacaacccatccggtacaccagcgttaggggcagcaatctgtcgcagttctcgcagctgcagcccgtctcggtggccagcaagttcaataatgttcatgccgggagcagcagtggggtgaccactggtgctgccaatgcctaa

SEQ ID NO: 41586 - protein, 537 aa, DROSOPHILA
MKHKLLLLFLAGAALLLATEVRSQHEDIPYQPVSNICQTCLCLSTQDVDHRTHFNLDCSVRNFEHILARWPEQFGSQAIASGAASEIVVSYSGNRIKLLQQLPATNASLTLSCRHCGLQDLQAPLFMDVPNVQALYISWNDITDDALVPDLFRGPFRNTRYEPIGLRDLDLSHNRIVRLDRRLFEHTPHLTKLNLAYNKLSSLDEATTASIGSVATLQRLDLSHNGLMTLPAQLFSKLTSLRFLDVSGNEFSTMPASLQLLGKSLVQLNLAGNAFLSLKENSLQGLVSLKRLNISSMPSLRSLEKGALNLPALEHLDCSRNSKLERLELADLLSSRNLSQLDLSWNALTTLVINATGSSNNSSNSTNETWPRLRRMSISGNPWYCSCELFKALELIGLNHIDREWDGTEARCETPYLLAGSPLSNLTAERICKMVIPKKYREVDEEPPRFLRRHYIILTAIIASIVLVIGLVIGFVVVCVRRRLKGSDYGVQPIRYTSVRGSNLSQFSQLQPVSVASKFNNVHAGSSSGVTTGAANA

SEQ ID NO: 41587 - DNA, 3452 bp, DROSOPHILA
ttctactgataaatgcccactagggcagtccttaagaaagcctttataccattcttgaatctcagcgtctagataaatataaattataataaagtttagtttagttaacaacaactaagtgttaaatattcacttacctgtgaactctgtgttttgcttgagatcctccaaaacttctggttttagtttactattttgctttcccattgttgcagaacaatttcattatacagttatcttgaatggcaatataatatatcaaattaacatctaaatattggacgattagggaaaagtgttcatcgggtaccgaagcttaaatacccttgcagacagattcttaatgtacagccaaattaagcaaatagccaatggatattgttgtaagaccatcttgcagtgtaaaccttttggcatttataacaaaatataaatcctttgctacgaaatattccatatatgtaatcaatactgggacatgttcgccaaatggtaagaagcacgcaaccatacaataaagcatttccagtgaagatatattcccagttaaaaaattttagtattatctaaaaaaaactttacttttctactttttgtaaataaggaaactaaagctaagtccccaaagaatagaatagaatagaatttaacaggcttctagtatgaaaacatggctaagtagtctaaaattgattttgaaaaatataagagtatataagacacaatattatacccaatttcccagtaaaatatagaaaatttatatagtaaattttcaaatttcgttgccgtttccaatagcgtccaatcatcggttgcagatagtttttaaaacacgttgaatatattttttagtccgtcgagaccaagctaaaaacaccgctataaaatgagtgaacaatgcaaatacgaaaattaaaatcattaaacgattcatgtttttagatctggtgaaaaattttaatgtattaatttgagtgacacactgaaaatagtttaatgattgcatagttttatagtagtttaattttagtataagaaatataaattaagtatttatacatttcattactgatttcatcaaatacacacatattgtaggatataattgtttatggtgccaacatttttgacaactcctcatcttgcaagcatcctttcaagaactcatcttgggttaattgaccatcgttattttcgtccatttttgcaaaaatattttttgctctttcttctgctgaatcagctggacgattagatgagcacgctcctagcatgtcataaattgcctgagaagaccaaaatacgttaataaaatcctttccagcccatataattgcattactacataaatgaatcattcgttgaaaaccctagtgactagtgactagtcggccacacttctcagttcctacctgaacaattttggtcatttcttgtatgtctataacaccattgccatcgacatcgtacattcgaaaggcccactttagcttttcctccggtgttccgcttgaagttacatctattgcgagtaaaaattcctgcaaaagcaataaggtgcttgttgtaaaattcaagtatgcaaatcaggaaagatgcctatagggggaattgtcgtcacaacacatttggatgcatcaattattttagtttatttattatttaaagtaccatgcgcgagggggcccacaatttggcatagctatacaataataacacaatctgcattctcatcacatcgacgatatacatgcgatcatcccaatatgtgcaaatatatgtacaaatgttttttttttttttttttttttattattttgcttttagaagatttgaaagtctctagaatcaacagtcttaattgaaggacctacgatatgattggaataataacattattctaacgtgtccaaagtcaaccgaatatagtatcgagagaaaaggtgtaattagagagaattaccttaaagtcaatatatccatttttgtccatatcgaatgtacgaaaaacatggtcacaaaactcttccgcatttccggatggaaagaacattttatacatatcgacaaacttagctggcgtcaatcggccgttggggcaatcttgctatatagaaaagggaggacgaacggacataatttgagacttttgcgttggtgtggtaatatttgtactcaccttaaatcccttataccactctttaattgtggcttcgtcatatctcgtatgcgtttttaagaactccatgtcctctttggttaaacggtctttactacttaagcaccccatgttttcactgtttttaactttttaggagctaatttgtttctatttagtgtttttctttgtttaaattgctttgcctggccagtacatttgacttaatgtttattttctggacagaaaaactccaaatcaataaatgtgcttgtatagcattacgttaacgatatgtatgaattgtggcacgaacaaattgaaattgaaattgaacgagcgactcatttataaatttttcttgataataataagcaaaaatgtacttgactattaacttgtatatttcaaacctgatgtgtaccgaaggactaatcaaatggttgaggcgcatgcgcggaaattgtctctatacatgacgattattggttaaccatattttctgtacacggtaggacttttttgaaaggggaacagggttgccacgttcacctacactcacgttatttatatttgaaaatgctatatgctaaagggtaaaataatttgggtaagaaacataatgaacattaaaatgagcgtcacataagttctcccaaaggttatttctcaatgtaaaagccagtttcagtttattgcaaaatagcttattgctagctgttcgctcattattttgagttaagtatacaagaactctaaaagatttcaggcaaaatttaacatttttaagtcacccctaagtgttatggagtattattgtttagaaaatgtacaaaaagcgatgcagagctgcaaattaaaaggctgtatcagtcaattcccacgaagagcggttacctcaccgccaaaacgaaccgtccacacaaactgcgatcccatcagaaaaagcgaaatgccattctggagatagcaaagatcaatggaaagtgcaaacgatgaacaatgttttagtttcgcacagtgacgaaacaattacttcgatttggagagcgatatagacgataaattaaaatagacttggttccgtttgtttaaatattcttttatattttgcaccaagaggagtaggaaaatatgtgctccatcaataagtggagttagttgcttttaccaaataaaaataaaatcatctgcaagggtatattatattcttcgttttataaaatccgaatcggtattaaacatgatcaattagtatgattgattactttaaaggtttacacacacattt

SEQ ID NO: 41588 - DNA, 832 bp, DROSOPHILA
gttaacgtaatgctatacaagcacatttattgatttggagtttttctgtccagaaaataaacattaagtcaaatgtactggccaggcaaagcaatttaaacaaagaaaaacactaaatagaaacaaattagctcctaaaaagttaaaaacagtgaaaacatggggtgcttaagtagtaaagaccgtttaaccaaagaggacatggagttcttaaaaacgcatacgagatatgacgaagccacaattaaagagtggtataagggatttaagcaagattgccccaacggccgattgacgccagctaagtttgtcgatatgtataaaatgttctttccatccggaaatgcggaagagttttgtgaccatgtttttcgtacattcgatatggacaaaaatggatatattgactttaaggaatttttactcgcaatagatgtaacttcaagcggaacaccggaggaaaagctaaagtgggcctttcgaatgtacgatgtcgatggcaatggtgttatagacatacaagaaatgaccaaaattgttcaggcaatttatgacatgctaggagcgtgctcatctaatcgtccagctgattcagcagaagaaagagcaaaaaatatttttgcaaaaatggacgaaaataacgatggtcaattaacccaagatgagttcttgaaaggatgcttgcaagatgaggagttgtcaaaaatgttggcaccataaacaattatatcctacaatatgtgtgtatttgatgaaatcagtaatgaaatgtataaatacttaatttatatttcttatactaaaattaaactactataaaactatgcaatca

SEQ ID NO: 41589 - protein, 186 aa, DROSOPHILA
MGCLSSKDRLTKEDMEFLKTHTRYDEATIKEWYKGFKQDCPNGRLTPAKFVDMYKMFFPSGNAEEFCDHVFRTFDMDKNGYIDFKEFLLAIDVTSSGTPEEKLKWAFRMYDVDGNGVIDIQEMTKIVQAIYDMLGACSSNRPADSAEERAKNIFAKMDENNDGQLTQDEFLKGCLQDEELSKMLAP

SEQ ID NO: 41590 - DNA, 4321 bp, DROSOPHILA
ctcttggtggatgcgggctgccccgtagtagtactagcttgaacgcagtgagtcgcgagggaatcgaactcgaggatgaggtctccggccaaggaacacgaatggcggtcggaacactagactagactaggctagacagcagtcgccccagcggagggacgtcttctgagacgggctgttacgcgtcctaaaatgtaacccgcacatgtgctccggctgttggggaaacgcgtgtcggccacatcaaaaccaatgccactatgtagcttcgcacccgagaagttgtcgaaaatgttccagattatatataaaaaaaaaaaaagaaaaccaaccacccacacgttcgttcaagtggtgctgacaagccttcggcttgtttgaaatgcaatcgcgtgggctattaaatcgaacccaacttcaaggtggactgaatccaatcagatcgatatttgaaaatgaattaagcaatcaaactaaagccattcggtttttggtaaaaacaaacgagcagttgactacggtctattggtaaactaaaaacacgtctccacgttcagccgtcggaccgtgttggcggttagagcgacgaaattataactgaattggaagttcaagtactggagtcccatcggcgaaccgatggcctcttcgacgcaaaatggctgagccgagtgggcgttcattttgtgtatgtgcgcaggaattttaatcgaatcgccggatgaatcgtttcgtggaagccgccactcgactcaaactaggggtgattgccagcgcgaaggagagttgccagcactggaatggtggtgaaaagctctaccactccgtctaaagtaccgccgagtacccattaaacaaataaatatgaaaacattcaagggttcaacatttacaaagttacaatgagagggtcttatagaatacatcaattacgagacctagactagttttaaagtacatgtaaactaaatatttccagtgttttagggctaccaatgggctagtagccaaacttctcgttcaagtgggtgattccatcgccgctctggttggtcggtggcacccacttggcgtacttttcggtgtcctcatgctcggccagctcgtcgaggtccatgtccacatcctggcgctgcttgttgcgctgtcgctggcgttgacgtcgctttttctgcgcttcttccggttccgatgtgtcgtttgctcgggcggtgatgtcttcagctggcgcgctggagtcttctacgggggtgctcatgtcttcatctggattagttgaagcaacagtgtggctgggagctgggggcgcttccgttgaaacttttgttgacctcacgttctctggttttaggacttccgttttagcgactgttggtttgctctcttccggttgagcagggagtttagtttccttcaagctatcgttttctggagtcgatggctttgtcgtactttccggctccgtctcttccttctccaaattgtccacctctgcctccttttcctttactttttctttgacctcttcctcttcgacttcctcctcatcggaggcaaatgcattagattgagtcatagtctgtgtgcttggtgacgctttgaccaccttaaatttactaaactgatttcgcttgccaatcatgggaagctgtttttttttggctgcaccaccttcctgggcggccgactccttagaacccgccgcaaggcttgtggtaaatggcagcgcagtgggcttggcaatcttcagcaggcgttccaccttttgctgctcgcccttgattcgttgctgctccaactaattggaagtcaatcaatcattttgtttatactaatatctgtaagtacttacccttaactttttgatctccgtcttgtccagttgctcaacgtctttggtgagcatgtccatgaagttgtccagatcatcaccttcagcttgctgtttggccgccagctccttcagctttttttcattttgttggtaagtggaaatctcctgctctaccttttccatttccatgttgagatcaatctcttgtttcagctgtggaaaagttggaattggtcggtctgttgatgaaaaagtaatttaagacttaccaaatcctcataggtaagggtgacactgactccagcattatcctttcgctgcttcttacgcgccacatcaccggtgcggtcccaaaactcatcttcgtcatcagagtcccgatttttgagctgcttccttttttgggcctcctgattggcttgacgcagcacaccatgcctgtccagcgttcgacacgcctccagggcgcactgcaccacgcagtccttcttgcgccccttgtggttaacctcaacaatgattggcctgccattggaatcgtcgagcggaagctccacacggcaaacaaaggaaccggtggacaattcgtcgcacttgtactctagatttagaccctctcgctcgaaaaaaccgcgcaacgttttctttgggtcatcgaagaagagctcctcgttgttggtgctggcgtagggattgtgactgagatccgtttcctcatcagcgtcgtcgcccatgccccagctgacgccctcgttgcgctctcgctcctcagcttccagaagcctcaactctcgttccacggctgcatcagctagctccttctctcttttttggcgcagttcggtaacggacagctctgattccggttcctcatcctcgccgggaccctgcaggatatacacgcgtgtgctgccgcctaacttgagcatgtgaccaaccctcatccggatgtagacctttggcggcacgcgctgtttgtttaaaaaagtcccgtgtgtgctgcccatgtcgtagatgtaccagccctctggctgatcgttctttggctcctcgtcctcttcttccatctcatcgtcttccttagcggtttcgggctttggcggagccttgggcttgtactgcaggaccacgtggaagcgtgagatcgtcggatgggcggcgggaacatcgttctccggcaagcgaccgaaagtccagaccgcctgttgctgcagctggtgcacagtgtcgattatctggccggacttgagcacctcaaagctgtagatctgattctcggctggcggagctgaccacttgggcaccttgtacggacagacggccgctggcgaggatttcggagttttggggatttttaatggcggaggcggtggctctgcgggaacttcagagcgcggcttctctgtgataatcactttgggtttgggcagcggagcgggcactttgaactcgttcattttgatgcacgaacaaaatctgttaatttttcaaggtgtaaacaaatttttgcaaaattagcagctgttcggcgcagtgaggccagatatttgccgcctaaaaaacctaactttttcaacagttgtcccgcgaaataaagctttaatttttgaatatattttaaataatgctatggattaattaaaatggaattaaaaagtgaaaaggcctaacaaatgatttcaaatagaaataacaaataactttccgttattcttttgaacacaaaaattaaatagctaaaaatagctatgaagtagctaaaatacctatacagcctgaaatgcccattaccacctcatgctggcggtatttttagtattttaactacatttagtgttgaataaaatatagtctttctaaacaacaaaaggtgaaacatgcaggagctcaaggtgcgtttatcaccaactaaatatatattagaactaataaataatgcccttaattgtacattacagcaacgttttgagcgacgccagttggcggatgacctgaaacaaaaacaggtgagtgcagcgtcgcaaagcaggggctataaataaaccaactaactaatgaatgcataacaaaccaggtaatccaggatcatctgctgcagaaaatcctgtactcaaagcgcctgctggtggaccatgtggaggcactggagcactgcatgcaggagctgcagacagcctccagtgcgagttccggccggcaattgctgacgacgaggaacgcctgcctgatattgggtggcactctgttggagcacctgataaccccacggggcatccggtacaccatggttccatccatcctcatttcgggtacctttgctgcactgttcgctgtgaagagcgtcttcgtttgccgcaacaaaatcgtggaacggaagttggagcaactggtcaagaccatcgatgagttcggcaactgcatccgtcgaaatatgacgtactttcaggagatcatcatcatgaaacaggccgagctcatagagtaatc

SEQ ID NO: 41591 - DNA, 2211 bp, DROSOPHILA
aaaattaacagattttgttcgtgcatcaaaatgaacgagttcaaagtgcccgctccgctgcccaaacccaaagtgattatcacagagaagccgcgctctgaagttcccgcagagccaccgcctccgccattaaaaatccccaaaactccgaaatcctcgccagcggccgtctgtccgtacaaggtgcccaagtggtcagctccgccagccgagaatcagatctacagctttgaggtgctcaagtccggccagataatcgacactgtgcaccagctgcagcaacaggcggtctggactttcggtcgcttgccggagaacgatgttcccgccgcccatccgacgatctcacgcttccacgtggtcctgcagtacaagcccaaggctccgccaaagcccgaaaccgctaaggaagacgatgagatggaagaagaggacgaggagccaaagaacgatcagccagagggctggtacatctacgacatgggcagcacacacgggacttttttaaacaaacagcgcgtgccgccaaaggtctacatccggatgagggttggtcacatgctcaagttaggcggcagcacacgcgtgtatatcctgcagggtcccggcgaggatgaggaaccggaatcagagctgtccgttaccgaactgcgccaaaaaagagagaaggagctagctgatgcagccgtggaacgagagttgaggcttctggaagctgaggagcgagagcgcaacgagggcgtcagctggggcatgggcgacgacgctgatgaggaaacggatctcagtcacaatccctacgccagcaccaacaacgaggagctcttcttcgatgacccaaagaaaacgttgcgcggttttttcgagcgagagggtctaaatctagagtacaagtgcgacgaattgtccaccggttcctttgtttgccgtgtggagcttccgctcgacgattccaatggcaggccaatcattgttgaggttaaccacaaggggcgcaagaaggactgcgtggtgcagtgcgccctggaggcgtgtcgaacgctggacaggcatggtgtgctgcgtcaagccaatcaggaggcccaaaaaaggaagcagctcaaaaatcgggactctgatgacgaagatgagttttgggaccgcaccggtgatgtggcgcgtaagaagcagcgaaaggataatgctggagtcagtgtcacccttacctatgaggatttgctgaaacaagagattgatctcaacatggaaatggaaaaggtagagcaggagatttccacttaccaacaaaatgaaaaaaagctgaaggagctggcggccaaacagcaagctgaaggtgatgatctggacaacttcatggacatgctcaccaaagacgttgagcaactggacaagacggagatcaaaaagttaaggttggagcagcaacgaatcaagggcgagcagcaaaaggtggaacgcctgctgaagattgccaagcccactgcgctgccatttaccacaagccttgcggcgggttctaaggagtcggccgcccaggaaggtggtgcagccaaaaaaaaacagcttcccatgattggcaagcgaaatcagtttagtaaatttaaggtggtcaaagcgtcaccaagcacacagactatgactcaatctaatgcatttgcctccgatgaggaggaagtcgaagaggaagaggtcaaagaaaaagtaaaggaaaaggaggcagaggtggacaatttggagaaggaagagacggagccggaaagtacgacaaagccatcgactccagaaaacgatagcttgaaggaaactaaactccctgctcaaccggaagagagcaaaccaacagtcgctaaaacggaagtcctaaaaccagagaacgtgaggtcaacaaaagtttcaacggaagcgcccccagctcccagccacactgttgcttcaactaatccagatgaagacatgagcacccccgtagaagactccagcgcgccagctgaagacatcaccgcccgagcaaacgacacatcggaaccggaagaagcgcagaaaaagcgacgtcaacgccagcgacagcgcaacaagcagcgccaggatgtggacatggacctcgacgagctggccgagcatgaggacaccgaaaagtacgccaagtgggtgccaccgaccaaccagagcggcgatggaatcacccacttgaacgagaagtttggctactag

SEQ ID NO: 41592 - protein, 726 aa, DROSOPHILA
MNEFKVPAPLPKPKVIITEKPRSEVPAEPPPPPLKIPKTPKSSPAAVCPYKVPKWSAPPAENQIYSFEVLKSGQIIDTVHQLQQQAVWTFGRLPENDVPAAHPTISRFHVVLQYKPKAPPKPETAKEDDEMEEEDEEPKNDQPEGWYIYDMGSTHGTFLNKQRVPPKVYIRMRVGHMLKLGGSTRVYILQGPGEDEEPESELSVTELRQKREKELADAAVERELRLLEAEERERNEGVSWGMGDDADEETDLSHNPYASTNNEELFFDDPKKTLRGFFEREGLNLEYKCDELSTGSFVCRVELPLDDSNGRPIIVEVNHKGRKKDCVVQCALEACRTLDRHGVLRQANQEAQKRKQLKNRDSDDEDEFWDRTGDVARKKQRKDNAGVSVTLTYEDLLKQEIDLNMEMEKVEQEISTYQQNEKKLKELAAKQQAEGDDLDNFMDMLTKDVEQLDKTEIKKLRLEQQRIKGEQQKVERLLKIAKPTALPFTTSLAAGSKESAAQEGGAAKKKQLPMIGKRNQFSKFKVVKASPSTQTMTQSNAFASDEEEVEEEEVKEKVKEKEAEVDNLEKEETEPESTTKPSTPENDSLKETKLPAQPEESKPTVAKTEVLKPENVRSTKVSTEAPPAPSHTVASTNPDEDMSTPVEDSSAPAEDITARANDTSEPEEAQKKRRQRQRQRNKQRQDVDMDLDELAEHEDTEKYAKWVPPTNQSGDGITHLNEKFGY

SEQ ID NO: 41593 - DNA, 4223 bp, DROSOPHILA
tttgggtataactctctaaattcagtggctggcttctagatatgtgtatgtatatatatgcttgtgtatatgatttgtataggtatatctttaggtactacgacgcaacatgttatatatatatatatgtgtatatttatatatagatctgcattcctgtgcctcatctgccatgtatgtaccttgtggtttttgctctttgagagcagctaaaattcattcctatataactcgatatgcctcgctttcgtccacttacacgactactgtttggatatagtggatgtttttcataccccgattctcctatatagctaacacgactgatatgtatattgatatacttccgccttgttttgtttttttttttttgatatgtttcgtttgcattggtttgttagttagttagttttgcttagctttgttcgttctggaaggacacatgattcacattttatgcatctatatagtatagtatatatgatcgatatgctaatgccaggaatgccaattcatattgctcaaatgctcgtcactttggttatacatacatcttaatccatagccactttaactgggctaactccttttgggttaatacgtgttcctaggcaattctcgggctaggaaaatgcaattgatatgtattcgtcgtcaattgacttgtgaacatttacacatagatagatactctaacatcaaaatgaataccgatagaacaacgctttaagcttgtagaaactatacacaataagttggctaaatgaaaatgtaaaccttacgatcagctttctgcaatttttacctgagcacttgtgtgtttaacgtacgtttcctaatactttctgtactccattccacgatctgatgaccccaacttccccccatttgtgtccccctaacaagcgcaacataaaatcggataattctctggtatcaactgcagcctattttcgggcattcagctgcccagatgccatgggattctccgctactccgctcagaaggccgtattgtcctgctccgccgtgggcatggccatcccgctttggctctggaggtgaccaccgcctccgcccgacggcttcaccccagtggcgttatccagcatctttttgacctgcgcctgcgccgtctcctggttgatgcgacgtgcctccgccaccggcagatcgtcgtccgattccagggcgggattgatgcggccattgcgctcatccttgcccgccatggtggccgctccgtaggatcgggccagcggtccagccatcacggatagctgctcacccgactccgagggatcgcccacacgctgcacatcctccggaatattgaccacacagcggaagtagtcgtagctgggcggcaacttgccggactcaaacatcattctgaaattggttaggagaagggttacatttaatttaattacaataatataaatcaaatatgtagtaactatgtaatttacatagccttatactcacttagtccaccaggagaccgagatgagcgtgaccaggctgagcagcatggccatggtgcggaaggggaacatctgctccttggtctcctcgtcgtagccgggatacttgatcaatggagccagtcccaagatggcctcaccgcccgacagtcggatggccagggccacaatgtatgccgacaggctgccgtacgtgttgcagtgcttcttgaagtgcaccaccatcagtagctgcgggaacagaatgacgtagaccagatccgagcacatggacctgtccggaaagataagaagagcaggcacttagcaaaatgagctgagggagggtgaataatgcatcttctcacgcaccacaaaccgtagatggagggaatggtgagggccatgatggtagccaggatgcccaccacaatgatggcgactcgcatcacccaaatgatttccatctcggacgccttctgacggaaaatcaatttgtacacgttccgagcgaacatggaggcggcggagagcaccgaggagtcggcggaggacatcacggcggcggaaacagcgcccaatccaaagaaggacacgaagtcaggcgtgaggtactgcagcaccatgggcagaatcatgctcgtctcgtccacggtcaggggatagggtcccttgtaatctgtctcgttccaagctgtcagagaaaagaaaatagacattagtcaaaggtgcataggtaatctgccccccacaccaaggatatgtgctttctattttggggatatctgtttattacttgctagtgtcgtctagctaggactcacgtgtagccttggcaatcgctccgatgagcaccgggggaatggccatcaaaatgcatccggcggctgcaacataggacagaagctgggcccttcctgccgttttgctggacagcacccgctggaagtagacctgccagggaatgccaccaaagacgagcagcaagccgtagtctatgtacagccaatgctttttaggctccacgtgcccaatccaatccacctccaggtcactcaggctgcccacgtgctcgttgctccaggcgaagggaatgcacatccacagaccgatgaagatgcagaacaactggatcacgtccgtatacgccacggagtacagtccaccgaacagtgtgtagaagatggcgatgcaggaggacaggatcaccgaggtgcggtgatccatgtcgatgatcaccgatagagtggcgccaagtgcagccaggatgccggctgcccaaaagacctcaccgcatagagcgggcaggaagagcaatcctcccatccgctcaccaaaggaatcctgcaacggatccaacatggtgatgtaaccctgcttgcgcatgggattggcaaagaagatgccacctaagtttggaaggaggatagaatcactttttgttaagaaaggaatcttaattggaatctgtaaagttgacttaccaaataccaagcttagagcgtatccaaatggagcctggcaccacaccagacccgatgtgtatatagcctccgccgtgccgttgatgtagccgccacccacccaggtggccgtcatggtgaagatgcccacgaagaggccgatggagcgtccggccagcatgacctcctcctccgaatcattgccggactgcttcttgcgaccggcccaaatgccaacgaccaggatcaggaggtagaagagcacgatgctcaccacgccagcgatattgatcatccttgcagttcagtcgtgtccttggctacgaaacttaaggttctccacgcgctgctgtaaccaaatactctcaaaatggggttgaccttctagctgtaatggaatacaagggtttcacatagagccacatcctttagcataatggttaatatggcaggagctcatttttcaattaactagcaacagcacgaagcattaaatattaagccaatgcattggccatggcctcaggtgcgcctgacctttgtttgcaaggatataattggagttgcccccacttcccactttcaacttcacccctccattccatcgtcccacccacccatcagaaaatgcgtccttgttaatggcgcgcaattaaggagctattgcattgagtttgacctccacggggtcctataattataatagatcgactatagatactagatactacaaatactagatactatagatactagaatctttagttctctgtactgtatgccaaagtatcacaattgtataaatacgcataaaaaatattgttgtaattcgattttaataaataaaattaacaatcaaatgaaaatcttcgtaaaggtgtgctttgttaactacaaaaatgtgaaataaagaagttcattatcaaatttttcatttagatataaacttcttatgaatgaatcaatgtatttgtaaaaaggacctaatatttaataatttattagcgtaagcgtttagttcccaagtaattcgaacaatagtgaaagcatttaaatgtgcggaaattagttctgattgcagccacacgcacgtgtcctgcttatgtaacagaccgactttgggagcgggatggtcgggacttcactccgcttatgtgaaatacataaacaattcaaactaccttgtgtgtgtgggggaaggcgggtcaagtacgtcatagccacgtcaagcgagcggccgccgcgagaacacctcaatccgtgtgccacattgcccccttgtggctgcttcattc

SEQ ID NO: 41594 - DNA, 1729 bp, DROSOPHILA
atgatcaatatcgctggcgtggtgagcatcgtgctcttctacctcctgatcctggtcgttggcatttgggccggtcgcaagaagcagtccggcaatgattcggaggaggaggtcatgctggccggacgctccatcggcctcttcgtgggcatcttcaccatgacggccacctgggtgggtggcggctacatcaacggcacggcggaggctatatacacatcgggtctggtgtggtgccaggctccatttggatacgctctaagcttggtatttggtggcatcttctttgccaatcccatgcgcaagcagggttacatcaccatgttggatccgttgcaggattcctttggtgagcggatgggaggattgctcttcctgcccgctctatgcggtgaggtcttttgggcagccggcatcctggctgcacttggcgccactctatcggtgatcatcgacatggatcaccgcacctcggtgatcctgtcctcctgcatcgccatcttctacacactgttcggtggactgtactccgtggcgtatacggacgtgatccagttgttctgcatcttcatcggtctgtggatgtgcattcccttcgcctggagcaacgagcacgtgggcagcctgagtgacctggagcaaaacggcaggaagggcccagcttctgtcctatgttgcagccgccggatgcattttgatggccattcccccggtgctcatcggagcgattgccaaggctacaccttggaacgagacagattacaagggaccctatcccctgaccgtggacgagacgagcatgattctgcccatggtgctgcagtacctcacgcctgacttcgtgtccttctttggattgggcgctgtttccgccgccgtgatgtcctccgccgactcctcggtgctctccgccgcctccatgttcgctcggaacgtgtacaaattgattttccgtcagaaggcgtccgagatggaaatcatttgggtgatgcgagtcgccatcattgtggtgggcatcctggctaccatcatggccctcaccattccctccatctacggtttgtggtccatgtgctcggatctggtctacgtcattctgttcccgcagctactgatggtggtgcacttcaagaagcactgcaacacgtacggcagcctgtcggcatacattgtggccctggccatccgactgtcgggcggtgaggccatcttgggactggctccattgatcaagtatcccggctacgacgaggagaccaaggagcagatgttccccttccgcaccatggccatgctgctcagcctggtcacgctcatctcggtctcctggtggactaaaatgatgtttgagtccggcaagttgccgcccagctacgactacttccgctgtgtggtcaatattccggaggatgtgcagcgtgtgggcgatccctcggagtcgggtgagcagctatccgtgatggctggaccgctggcccgatcctacggagcggccaccatggcgggcaaggatgagcgcaatggccgcatcaatcccgccctggaatcggacgacgatctgccggtggcggaggcacgtcgcatcaaccaggagacggcgcaggcgcaggtcaaaaagatgctggataacgccactggggtgaagccgtcgggcggaggcggtggtcacctccagagccaaagcgggatggccatgcccacggcggagcaggacaatacggccttctga

SEQ ID NO: 41595 - protein, 278 aa, DROSOPHILA
MINIAGVVSIVLFYLLILVVGIWAGRKKQSGNDSEEEVMLAGRSIGLFVGIFTMTATWVGGGYINGTAEAIYTSGLVWCQAPFGYALSLVFGGIFFANPMRKQGYITMLDPLQDSFGERMGGLLFLPALCGEVFWAAGILAALGATLSVIIDMDHRTSVILSSCIAIFYTLFGGLYSVAYTDVIQLFCIFIGLWMCIPFAWSNEHVGSLSDLEQNGRKGPASVLCCSRRMHFDGHSPGAHRSDCQGYTLERDRLQGTLSPDRGRDEHDSAHGAAVPHA

SEQ ID NO: 41596 - DNA, 2529 bp, DROSOPHILA
ttgtcaaggccacagagactttcttcaatggcctgggcctgagatctttttgggtaaggtgagtgagccgaattcattatgtgatgccatcatcgatgggcacttcaactgccgtggggcatccacaacgagcccacgaacggcgcacttgaggccatccgcatccatcgaatacgagtatagtatatttgtacaaaataaaaaacaagcgtgtttgcattgcggcaatgatttctaactaaatttattgaagtacttttcacttttaatgcgagcgcttgtgatgtttctcttcgccacgctttgatatttatgacttttactcaaaaaaaaaaaaaaacaaaaataagtatgtgagccccaatttctgtacgcacacttgtattttgttaagccccaaattggagcactagcactccgggctccatctatttcacctcttcgcattttgaatgatttcggagcgctcacaatgcgagttgattgattgtggtagcagcacagcggcaacagctttgattgccaatcgaaggtgttagataacattacaagcgcaacagacacgcaccgcctaattatcgtttatcagacgaatctcatattccgggcatggcccgaaaccctgggaacccatcccatcgaccccagatgcgtgtgtgtgtgcgtgtgtggttaattaaaagttctgcctcatcggtcttcggcttgaggcttcagatgattcaggtggaggctcaagttcaggtccaaggcagcatcgttacagtggaaactgggcaaccgcaaccagcaattgccaggttatacaatatacttaggttaaggtgacttgagcttttagattgctgctgggctgttatggaattttactttgatttgtgtggagtacaagatggtgcaatcagttgtaagcatctgataaaatattggaaaaatatagaaaaaatgtgaaaaagagataactcgttcacatattaaaagcagggtaaaaaaaaatcccttgagtaaacatagagttgtttgactgtgtgccaggacacataattaatttatttgcaccaccactgatccaaccaccactgagccgtaaatccaatcgaatccaatcaaaacttggcggcagaaaggaaacataaacggcttagacgttcagcaagagtgcgaaagttggctgtttatttggtgtagggctcgacccacttccactcctcccagacgacgcagttctgctgctgctccatgaaggcgtagttgtccgggcactggatgtagtcagccttctcctgaccctcggggcacacccagtagtgggtggggtccgagatgtcgcggaacttgcgagcgtgatcctcgacaatggcgcaattgggctcggcatagatgtcttggccattgtaggcggagctgagggccaggaacaggcccaacagcaggcagcagatgatcgaaactaaaggaaaaaaatgggggaaaaagtgagtgggacattctggcgaagaccgatggcgaggtggctcacccttgtacatgatgaaagtgttgcaatcgaaggccgacaattggcatatttatactagtgccgaattctccttatcgtagcgacacttgctccacaagcaaaatcacttagttcaaatgagttagaaatttatttttagctacctgctgcggatgtcgccccaaaaactttgagctatggcaatcataacgagccgcatttcacttggccgcattaattggatttggcccagacaccgagcgtgtcggcttaatcgataattagccgctgcactgcgttgccaccacatcacatcttggccaacctgaaataatcagttagcttaacacatgcgatgcgatacggcagcgtcatcttgtctcttggccataaacacacaaaaagacatacatagtcacccgctggggagttgcgtcgctgattggccacctccttctccggcaatctccgccaggttggccgcctcacaatgcggaaactgtaattagactttaaagcattttgtaagcgattttcagggttttcgtcgtcgacccactcttgctgctaaacggtttttagtcggcacatttcgtgaggttttttgccatatttaatttcagcagctgctgctgcctcttctttggtatttatattggtcaagtggcctggcgcttggggcgtttgaagctccgataccaaagccaaacaaagccacaaagagacaaacagttaacataaatgcaaaatacttttgcaaaatgacaaaacaaaaataagcaacataaaggaaaaaaatgaagaaaaaaaaaactcaacctaaagacagtccgcaattaattaatggaggggccgatagtcttaaatgttgcaaactttaaacgaattcagatttcagcatttgtttaccgcactatggaaatatcccattatgaatttgacacgccagctgggcttacaactcacaagctgtcaataaatagtcatggttattatgctcgatgactgttgactgaataaaatgctgggtt

SEQ ID NO: 41597 - DNA, 460 bp, DROSOPHILA
atgtacaaggtttcgatcatctgctgcctgctgttgggcctgttcctggccctcagctccgcctacaatggccaagacatctatgccgagcccaattgcgccattgtcgaggatcacgctcgcaagttccgcgacatctcggaccccacccactactgggtgtgccccgagggtcaggagaaggctgactacatccagtgcccggacaactacgccttcatggagcagcagcagaactgcgtcgtctgggaggagtggaagtgggtcgagccctacaccaaataaacagccaactttcgcactcttgctgaacgtctaagccgtttatgtttcctttctgccgccaagttttgattggattcgattggatttacggctcagtggtggttggatcagtggtggtgcaaataaattaattatgtgtcctggcacacagtcaaacaactctatgtttactcaa

SEQ ID NO: 41598 - protein, 94 aa, DROSOPHILA
MYKVSIICCLLLGLFLALSSAYNGQDIYAEPNCAIVEDHARKFRDISDPTHYWVCPEGQEKADYIQCPDNYAFMEQQQNCVVWEEWKWVEPYTK

SEQ ID NO: 41599 - DNA, 2581 bp, DROSOPHILA
acaaatgttattgtaattagttttttagcttttaatactttttaatgctattaatatgcagcgtttgtgtgttcattataaatgtttcactgtaattgggcttatttattgtatgaagtgcccatttacagaagtaacttgtcttccgatcaccggcagatgacctacatcttcttcacgagtagaatccaagcagcgaaagtgttaataacccgcaaacctgttcccgaaatcccagccgtctgttacatcattctctagactctttcttggcaacatgatcgttttcaattgtcggtgtccacgctggaggtcagtctcggttggatttacatggaaatgattgtttactggatatatattttttaaaaataactgagctgaggcaacagggaaaaaagccaagtgagttgatgaccatgccagcttccacatttgtctgtgctcatgttcgtctggtgttgcttatgctgaattttttcttttgccttggttagttcctgggtctggtttgcagtgtgataaatgattttggacagcagtttaatttgtcttaatatggtaacacatttcaaacacaagattattgatttaattatgaaaagcatttggaaacagtatgtgctaatgttcctgactcagattcaagattgatgaatgaatgaaccgatattggaggcgtactttaaaacgttatgaaaaatcaggttaaaataaagtattttgacacaatctgacatctatttcaagttccttcatttgcatctgtgattaaataaccttaccccaaaagaaatatcagctcaaaagtgtgaccttccaaaaacaactaagatattataatataatttgtatgcaatttggggttaaaaattatggattcaaaaacagacgctgggaagtttaagtttgcaatttggtacagctagtttttgccgatttgtataatgaaaacatacttgactctgttcaaatgatcagcatggctgtgggtatatttgatgtaactatttatgtttttattttttgggggatttatgtacagactttctagaactagatataactcatgtttagcaaaagcactgactaggctttgaatggggtatccaatcggggatttagggctgtggagggtgggcggcgatgtattccagggcgcggaggatggcctccgggattgggggagcggtgggaaggtgatcgccctgaggctggaagccgttttcatcggcgacgtaggtcagtgagatggggacgccttcgggggagatgtaagagctgcttccgctaatgccattgacgtttccggcctcctgggcctgaataccattgctggtctcgaaggcgtattggtagttgccctcggcgtcggcaggattaacatcctcgcgggtgatcacggcatccttgtttatgttgtccgcatacacattggccagcatcagagcggcgagcaggcagagcgactgaaatggttacacacgttcacgttctgattttgaatccggatccttccgggcggctaagtctactcactagcttaaacatcttgctggtttcttggcttgtataatcctcactggttgggtgatcttcgcaggcggtggcttttataggcagccaacggcaacgccgactttggcgttggcgtcgccatcgctgacgtctctaatctggctctgaactccaaacgccgctccaaactaaatatcaaacttaatacgtttgtcgtttttttttttcggcagcagcataccgatcgaattgaataaaattcagctcagcagctagtaaaaaaatggaaaggagatctgaatttcagcaccgcagtgcgaaatacccttgccagatattgctaagtttacctagaaatcataggcatttggcttagcttagtttaattatctgcctagcaattttcgtcttaatcggaaactattttctttttgattaatcgggcttgtgggctcacttctttgagagctattatttcgttttttttttcttatagaagaacaaacaagggattatagttttaaattttccttaaataaagcacaaattagcatgcatggtcatttaaaattaagtgtattgtggtaattctgtagaagttgggtaattcaatgactaaactggcttgtgtcttcttttttcaatataagactttgaactacacggcctctaaaaggggtgtggcttatgatacttatcttgaaacatttgcatttcgaaaacaaattcaaatatttatacaatatacttatcttaccaatctcaaaaaagcaaacctctgatccaaataatatcagccttagctagagtataatgaagcacctgaacccattccaagtggtttctgccgatggatcaacacgcttctgccttggtagcggtaatcatttgactttgcacttaatggccaatagtagttttggttagcttttgggggcttggagttatgtcgacggtaatggaacatgtgactgtgacattcgcccgtggatggtaagtttagagatggacctggatttggatttggatttggaagggggcagcagctcgtggcgagctaatt

SEQ ID NO: 41600 - DNA, 511 bp, DROSOPHILA
gaggattatacaagccaagaaaccagcaagatgtttaagctatcgctctgcctgctcgccgctctgatgctggccaatgtgtatgcggacaacataaacaaggatgccgtgatcacccgcgaggatgttaatcctgccgacgccgagggcaactaccaatacgccttcgagaccagcaatggtattcaggcccaggaggccggaaacgtcaatggcattagcggaagcagctcttacatctcccccgaaggcgtccccatctcactgacctacgtcgccgatgaaaacggcttccagcctcagggcgatcaccttcccaccgctcccccaatcccggaggccatcctccgcgccctggaatacatcgccgcccaccctccacagccctaaatccccgattggataccccattcaaagcctagtcagtgcttttgctaaacatgagttatatctagttctagaaagtctgtacataaatcccccaaaaaataaaaacataaatagttacatc

SEQ ID NO: 41601 - protein, 119 aa, DROSOPHILA
MFKLSLCLLAALMLANVYADNINKDAVITREDVNPADAEGNYQYAFETSNGIQAQEAGNVNGISGSSSYISPEGVPISLTYVADENGFQPQGDHLPTAPPIPEAILRALEYIAAHPPQP

SEQ ID NO: 41602 - DNA, 3089 bp, DROSOPHILA
ggaatttggggaagtacatataaagcgaaaagtttttatcaaagacattagaataataaagacattagacattattattttagtgtctttgatttttattttacttgtgaatttatatcaatacaccaaaagaattttcaaatttctcacacgttcttctctatctatgtaagtaacgagaatcgagaaaaatcttattgctcaccgaattgttctcagtgctggaatctggagaggatcgcgaattctgagaaaagttgttctggtcctccggcttcatggggattaatttatcagcaccacgttttatcgtacctaaaagcactccaaacggaatttgcaataatccgtgcaataaatttaaagatgtaaagcaagtgcctatatttgtaacaactcaaaatacaaaaaaatccgatgaattgcacgtagctgtttagctctaagtgttaccagatatggactgagggagttacgcagtccggctagaacatggcatagggggtattccgtaaatttaattactgggtatcatctttgaaaaggaacttttgcattttcaaactattgctttaaataagtgtataagaaccatttctcatttgattaagctgcctagatggcagtagtacgcttttcctataaataatcacttatatttaaataccaaagaaactttggaatacctttattatcaaaccggttaggagatatatgtatttattcccaagatattcaacatgttaataatcttttattgttgataaactttcacacactttaacacataccctgttatacatacatattgcaaaacatttaggtctgcagagttgatctttgatattcgcctaacgtaaataccacgcacaaaacaaagctcaattgttaagtgttaacagtttacgcatatttatttgtatgtattgggaacatccagagaaatcaatatataaaaaaaatataatgtttatatgtgaagcccttaatttctactgttgaaatttatatctcaatttctgtagccatctccaagtactattcgaggtcgtcgatacttgcgtttccagatgaacactctataattttggctccgtccagttgttgctccgagctctgccccaaaacgattggcccgtcgttgccctcggccgctcgattgccgaactcctgcatcttgacgatcagcatcgcgaatacttgagctggaagggaggattgcagcacctgcagcagacgagccggctggccacacacgacgatggcattcgccaagtgctccacgccactctcgaaatctccgcgggcgatcagggtctcgcccagctggatttcttgaaggaaatatctgcaaatatcatggtttaattagtttggaacagctgattcgatgcacactattacgaattaaattaatgccaggcaaattaggtgcatataaataatataaattgtgcacagttgcaacaataataactatttgtatattcaaattatgaatttcttggcaggaagcctgctgagaatccaaacactgaaatgtgcttgttaatccaaggcagtggagtctttagatgcctgaggcaataagcagcaacacgatgaacacgcaagtgtaatgggactccacataaaatatgtacatcgatttggctggagaaacatatgtgggcttgtttgtttgaatggaggtgtattgaatcgccaggcaccactacacgtgccacattatataatgcgactcccatgggagtgtcctacctttcgatggcttcatggtcgttcagattgggaactccagacttggcagtgccggttttcttgttgcgacggcgacctaggaagtgatgaaatgatgagtttctttcataattcagttggggcgcaatggggattcttacgctcacggactttcttcttgtactcgggatcgctgcggcgcttcttgtcgaagtagatgcagtatccaataaacagagttccagctactcccgctgcaatgccgattgcagttttgttcatttcaatcatattactacggaaatcctctgtattaacttggtcttattttacattccgcatgtgccatcgatttacataaaacaaaaatcgatatcgcctacaactactgttgtttcatgtttttcacttgtttcgcactaatttgaaacggcggactggaacactgttttcttttttaaattttgctaagggatatttatttaattttaagtaagagatttaaatgtatttttttttagtttattcagaaatactgtgggatcaagttataatacgctaagaaataatcgtaagctcacttcttgtattatatttatttaacttgcattattcgcttaaaatccctatcctccaaaactaatgtttttaattttctttttttattttttttacttttattttgtaattacttaaataaaaaattgttcgcatatatgcatatcttccgttgtgtgaaacagctgacgacttaattcagtttttttttttaattttaaatttaccactttttgaagatattttgttgataactccagagtagattttattatggcataatgcatgttgagaatttggtcaaggcctattgttcgttaaaatatttgttataattttgttttgaaaaataagatatgcttaatgtggaaaaagaaaatatatagaaaatgctaatactatgatatataatcttcatttcaataggagaccatggagccccgcagagcaaaatatggtttggtttttttttcaactttcgtttactttcactgcagaatatgtaattgacgcagaaccatgatgattccaaaagttaaattgataaaatccgaactgggagaatgtggttgtgcttaagaatatggataggtgtatatgcccgcatacataaaagcctctatgtttgtattctgtaaatatatacgttttctttattaactaagtattagtggccagcaacgagccctcctattgagcaattccttcacttaaccccggagcactcaaatcgacggtaaccatgcggagcttgtggctaaatacgttgaccaagcagagtaagctaatga

SEQ ID NO: 41603 - DNA, 612 bp, DROSOPHILA
atggcacatgcggaatgtaaaataagaccaagttaatacagaggatttccgtagtaatatgattgaaatgaacaaaactgcaatcggcattgcagcgggagtagctggaactctgtttattggatactgcatctacttcgacaagaagcgccgcagcgatcccgagtacaagaagaaagtccgtgagcgtcgccgtcgcaacaagaaaaccggcactgccaagtctggagttcccaatctgaacgaccatgaagccatcgaaagatatttccttcaagaaatccagctgggcgagaccctgatcgcccgcggagatttcgagagtggcgtggagcacttggcgaatgccatcgtcgtgtgtggccagccggctcgtctgctgcaggtgctgcaatcctcccttccagctcaagtattcgcgatgctgatcgtcaagatgcaggagttcggcaatcgagcggccgagggcaacgacgggccaatcgttttggggcagagctcggagcaacaactggacggagccaaaattatagagtgttcatctggaaacgcaagtatcgacgacctcgaatagtacttggagatggctacagaaattgagatataaatttc

SEQ ID NO: 41604 - protein, 168 aa, DROSOPHILA
MNKTAIGIAAGVAGTLFIGYCIYFDKKRRSDPEYKKKVRERRRRNKKTGTAKSGVPNLNDHEAIERYFLQEIQLGETLIARGDFESGVEHLANAIVVCGQPARLLQVLQSSLPAQVFAMLIVKMQEFGNRAAEGNDGPIVLGQSSEQQLDGAKIIECSSGNASIDDLE

SEQ ID NO: 41605 - DNA, 28815 bp, DROSOPHILA
agcagtgagcagttgcagatgcaggtgcgaggctctttccggcgaaatgtggcgaccagcagcagctaggtgcaacgtggtgtctacttaactagcttgcggttttttttaggcgcacccctacatatgatgcatatgtacatcggtgtggattttgtttagtgtctaatttatgtgaatgtcgattatttgaatgccctcgtctggttttatgttggacaatatataacccgtataaaataatcaaatgcctttccgtaccgtaacccccacaattcattcgatgcaagtgaaaattacacgtattttaatatatttgcgattcagtttttaattcatcaatcgatgatgactatccgtaaatgggatagatggtcgacgtttctggcgtggcatttgtggtctcagcctgcggcggaccagagaatcccgtgctagtcgtaccatcgacgggagcaccagttggcggagttggctccggggtggcaagactggagaaagccgacacccacgaggtgcacagcatgaaggccagacagaggctaaacagcaggttgaagactgcaacgaattgagccggttactcgaatggtccacggattgcgttggcggttactccttgtacggtacttacatttcatgttgacggcgttttagagactgttgaagtgcccagaacggccagggccttttatggagaaccacttggccatgggtatccattggtattttatttaattaatttattaaaacactatttatctggcattggcttatcattatttatttatttatttgttatcgtatttaccacttggatattaagaagtgcgcagctcggattttcatgactgtttcaagcggaagacgacttatctattcttagaagtcactgaaaaatacgtggccaatttgaccgtgcgccttatccaaatccatatacgtatggagtattttcattcaccagcagatcaattgtaggtcaggaatgatggtggtcttggtttgtaatgcatttatttcaatttattcggttcgtgattatttatgcatacattaattgcggctcttggccatatggaaacgagtcaaacttaacgacagtacagaacagtatggtaacgtaatgattgatacacagatcgaataatacaggtaagatagatagttagttggatagtacgtagtgatagttcggttaacagtttagaagataatcatacatatagtacatatatagcaacaatgaacacagcaactagtttgatataagtatctggttgtcctttaacgtttctcatatattttccattgtaaataacatacgtatagtatttatgtatataatatattctttgcagattattgacagctttggtggatcgccatcgaaacatcttttttttttgctaacggctcgaacagacaaacaaacacacataggttatatatgtatctatatcattctaaatcgtcctgcgccgtggggcatcatttgccttcctgggatgtatataaatttattgatatgtattgttacgtctcaagtctatacgcgtattctatatattcctctacattcatttcattattcatttacgggttgtacatacatatattattatatatatatgtatatatatatattcatccaaaaagcctttagttacggtataccatttgctctctaaaacacgaatatatatggaaatatattaacagacattatataattctttttttgtaataagtcctcaaacaaacaacgaaattgcagtaacaagcgcagatagtacttttagtatatgctttagctagtatcttttgtaacaactatagaacgtattgtatttgaaacacaactttcgtaacgaaaagtattgcatacttgtgggcttgcttgccataattcgctgacagtaggggtataaacaagttcgtaagctctgctaagttagttagtgattggtataacactcatatttaatatagcacaattaacacacttagataacagcactaacaatttgcgcataaaacggctctaaaacatttaattgactagagttgctctaattcaaactacgaggatactttggtaacggatatgtaaagcgaatgggttgcgtatagttttcttatttctttttttttgtgtttttttttttgtctcaacttgatagtgattgacatcagttttcgattccgatttcgttatcgttatccatcttattcctcagatgcccacccctcgttgggtggctcgcttggtggtgcttggtcacaaatgaaacgcccgtgtgtggtcgctagttacacttacttactttcgttcgctaacctgcttaggtacattaactgatatgttttttttttttctggtggaccccaatcctagcgacattctagtctagttcgtctagttttgcagtagatcacgcattatgtccagcgagtcctgcagcgatttggcgtagcgcgaggcactcgtatcctcacaggagtagaaggccgagacgcagaagacgatctgttccggatgcggattgtaggagcagccataaccacgtggcgttaccggtccgtatcccatgaagctgtccgtagagcaggccacctgaatggtatatcaataagatcattatgacgattccaataacatgtatgccaagtcctgaagatatcttcattctagccgatacctacttttgtgcagctgatttgtgctcagtggtgctgtggtgcaagaattgattaggtggtgcagaggtgatagagtgcagagtggtgcttattagcgaagacctgtgggccaattactacctgactggtggagagcaggaagcactgcgagatgatgtaggactcgtctttgaacagctcgtgcatctcgccggtgacctctatactggcctctcgcaggcccagcagcgggatgtcgatgccattgcccaggatgttcttcaccatcacctcagtctggcgggcgacggcgcaccggaaaagctcccggagatgatccttctgttggttgcggggcaaagataagttactattttcacagtggtggctttacgctggaatacccacactgtaaatgctaaacttgacctttcgcgactcctcctcatcctcgcgatcgctctccaggggcacgtttgcaccctcaccctggcacatggccttggcccactccaatgcctccgtgctggccgctctgatgcagtctacgcgaccctggaaatggaattatacagagacgatgaaaccgacagattaaaatcttaaattaaggatcaacatttcctgtaaagatgccggtatacttacgtgcagaaatcgtcgagtggacgcactttcgtaggtggccaccagacgtccgtacagcttgtagtgagccagttgcagggccagttgaatgtacacatccggactgacctggcacgatttgataaaggtctttccgtaactctggtagcggtacacatagaagtccaggtcatcgatgcatttgtccacactcttggaggcttgggcaaagcgcaattgcaattgcggacccacatgccactccagacgctccggtggtggcaagtggtgttgcggtagaccgttatcctcgtccgggtgctcctcgatttttttgtagatcttctccagcagctggacaacagcaatgccttcggaacaggagtgctcatagcaaaggccccaggttccatcggtgcaaataatgagctgaaagataggttagttatttttaaaaaaattcaattaattaaggaagttaaagttgcattacctgcatggtcttgtcaaaccagcgatttccggaattgtactcgctgcctccgccgtggatcatctcatgggccatgttcgtctcgtcccgatcccccgcccgatgaactgtgggcgtggcacccgtaaaaccgcgcgcattaaagttcccagccagcggttcgtccagacagaggaccacctgtgccgtctcgatgagctccagattgcgttgattgcgttcgtcctcctgaagcatttcccggtcccgtgcccacgtgctcctcggctcagcggtcagcagacccaccggcactggtttagctggcagacagggagcatcactgagcacatagaggatctgtgaggcgatctcactctccgacaactttccacgatcgctagcctgcagcacgacgcaatacatttggttgcggcaaataaccaccacatggcgatcctcgtcgttcagtcgctcccgcgacggcaggaactgcgagtcctgcttgacaccaggccgacgacaggagcccagcaggcggtagtactgcgccatgcacagcggctgattcttttcccgcgaggcggcccgctccagcggcagctccccactgtccagcatctcgcggtggctcagaatgccgtccagcaggcgagcggcgaagtgggccacgtcgtggacggtcttgaagcgacgcggcgggaacaccatgcccggattcgagttgatcggcaaagggatgcgaatatccatgtacatctcgttgagccagtagtaataggcctgttcaaaaaaaaaaaaaagacttactgttttaaaatgtgattctaatcgacattgtgaatagaatattaagagatatgttggaattctttttggccaaggcctttacatgaaaatcttgttagtggttgatatttccttgtcgtgttcgacacaaattcaattagctgtgaattttttttggaatttttggggagcggtctgagtgtgtctatctcgaagcatcacgcggagatcgctgatcactgatttctgatttctgatagcaagatgcgaagtagtataaataatggtaagtgggccattgaaagagcagtaccacagttcccccgaagcattacggataaccaaacggacgcagcccagagatgaaaggtaggatgtgaaaagatctctacagtatgcggagctgacctataaaatacttctccttctttgatcctgccagtattcgcattgtgcttcttgagcctgctggctttgagccaggcccgcttggactacacgctgcagtgcgcccgcggtgagatcagtatccgctggcccagctaccacagcaactcggagtactatgtgtgcccgagcgtctacggcagccagttgactgtccactgtccggccggccaggtcttcacctttgtcctccagaagtgcgtgtcgccagcccactatatcccagctccctcaatggaagtcctgcccaccgctgctcccatcaccatgcaggttatcgagaatgcaccaccagtgatctccgcactgtctcagccagaggccgagactccggagcaccatgagcatcaggagcaccacgagcataatgaggaggaggttgaggcacaccccatcccaccaaccccggccccagagccaccaaccccacccaccgttgctattaagccagctgtgcccgtgcccggcaagaaggtcacggtcccccagcccggcaagaaggccaccgttcctgtgccctccaaggcagccatggcgaagaagcccagcgccgctcccaagaagccagctgctccgactccatccaaggccgccaagaagccaacgccacccagcaaggcccagaagaagccagccaccgcttaaatcccaatcccaatcctaaccaagatcgccagttcaatgcccatctttcagcaagcggaatttcattcactactctaaatagcaatctaaagtaattaaatatctaactggcaacgattttcgttcgtatttcccaacgggaatggggtcgttcagggggaatggcatttgttgtttccagaatttccttatcgcggtagggagtcagaactgggtaattgattgcgatttcttgttatgcacggaatattttgataggccgccatagacatctgaattcgataatgtgaaacgaaaaggaaaaagtgacgaacagataggagctgccagtcagaactgaactaaatggtcattagtttgacacgatctacttgcatattttaaatgcaaattctagaaatagcagtgagaggtacgagaaggtcggcaagataagcacataagttagagaaggaagtcaatttcagggcaacagaaaatcaaagctattatatggtgactataactagctataagatattactcgaaagcacctccacatatcatggaaaagtacaaatgttcgagaaagttgttggtcgcatgttatctgtttattgggaatacattataaaaattgtaatcaaaccttttaatgtgggaaggtttgctggttaagatatgataacttcgataacatcgaaataacactttcataagtgtaccaatccagatactttaagtgatttctaaaccttcaacgaatttataccttaattattaaactgaaatatttaatgctcaggaattaccatcagggtgaatggaggagtggttccccagaacagaacatagaccttatgtagcaacaactgctgctatctgaatgccagtgataaagtgctgagaacttgagttccccagaaaatatcatgaagtcatttaccaggtaagaatgggatctccgcctccacagatgatctattcgcgatgctaattgacatgacactcggaatgagaagttcctattgcttgcttgcttacttgacacccagatacggaatagagtccgccccattgttatctggccgagattaccgagacttcgggccaacgattctaaggcgcaattaagcgtggttggttggcattgctgatttcaatttcgcacccagtcctacaagacacgaattaatctagaagcgggctgattaaatgtgtctagcatgggctgcctccacataaaaaggctttccagctggctggaatgcatcagtgatcggtgagccgagttagcagccagacgcattccttctccagtcttgcaagtaacccgaaaatcaaaccatcaacatgaaagccggtaaggagcatctcaaacaggccaacaggatatagccatagcccatcaaccacattctcctcctattcttttcaatcccaaagtgatctttgtgctcgccgtcgtggtagccatggccggaaaagcccacgccgcatgctccgccgttcctcaatatacggaaaagatcgatcctgtcaattgcccacagtcaggattcaagttgcccaactatgagaacgcctccgtgtactaccagtgcaccgcacagttacagtccgatggcagcatagtggtgactggcgtcttgaccagctgcggtgaagacacctacttcaactatgccttgcagagatgcgtggcctgcgccaattacttcccaagcgcccagtgcagcagtctgcccatcaatgtgacctgtgtgcccatctccaccgttaccactgtggcccccacaaccggaaccaccattgctcccaccaccgcgtcccccactaccgctgcttccaccactgcggcacctggcgagtccaccactgcagcacctggcgagtctaccaccgtcacggtgcccgtaccaccaactgaagctcctggcagcaccacggcctccggcagtgacgacatcattaccccgactggtaccaccatctccgtgccccagcccccctcacccagtgacagcaacgtgcccactccggtgacgcccgcgcccacagctcctgtcatcaacgacggtcctccgaccgcaccttcggctgccaccaaataagtcctcgagttgattctatccaaaaccccagattttgtggctgaataaagtgttggcgcacacacacacacacattatgaaaaggaaataatttttagtttttaacagcaccataataagtttgattacaagaaaatctgattgtaagctatcaacgataaaaacgcatagacatatataactgttttttgccaaaaagtgcatgcatttatttatgccttttttttttagatttcaaaataagatgtgatcacttttaatgctcacccagttatcctccgcctcacgcttgtccagcagatactgatgcagccgcgctccgattccctggggagccgagaactgcctgatcagctccttggtccgctcgagctgcgccggcgtggtaatcggttccagggcgcggatatagtcggccatcgtttcatccagtgctggaacgggcaccttgggtagagtctgcaagaacggagtcaggacaaagggttctcgatggggttagtaagctgcgtggtgctgcaaatttaattttatttctcttccacacttgacattgcccggcttttccgggaaatgcccccccatttcctcatttgtatgcatgacaatatcgagcgtcaaatggaaagttgccttgtcctgccaccagcaatactcgtacaaaaactttatgccctggggagccaaatttcaaatcaaaaaaagaaaaaaaaatagaaaaagaaatggaatggcttgaatctgacattgtactccgctccttgacatttttgccttttccgttttctgctttccaccctcgcacggaaactttaattgagaggttttctctaggagttcccaagtgggaaaatcgttgtgtttcgaggtctgcaattcaatcgattgccggatggccaaaacagctggttttgaatgcaggattactgactgcaatttcatatttaaatgtatccatcgaccttgatttacctgctgcgaaaacacagatttccacttagcaacgaaacgacgaggtataagcatgtcgttgacttccgcatacgtcgtgttctccgttttcaaagccattgaaacttttgttatatccgaatacctagtctcttgtcacttgcctttttttctgggggggttcccctgtcatccatcggtttacaatttagatgtctaactctgcttttcgggggttgttactgtggctgctgtgcttttttttccaggtgagtatgggggtgtagagggtagcgggtggtggggcttgggcgttggggggttgtgttttgaaaaggttggtttttccggtttgtttgcacgcaggttggttgccaggagctacccgagctcctgttgccatacaaaagccctcgttatttgcatttgtaattataacaaacaggattagtctgtcgtctgagcgagtgtttgtctttgaattattcaagtaacagtcgagtttagccctagggcaaatatttgctggaaatggggaggcgaattcgaaatggtttaatcaattttactcacgtcagggaatccaaactcgtccacagactcggccgttgagagccatttctttggtatcgacagaatcgagtctttccatcctgaaataacaaagaaaacaagagcgacacgacaatcgctgattaaccacttgttgaacaccaaattaaatggttgagtaatttgccgcaatcgttaggctgcagccatgaactagttaatcactgtcacgagcctcaagagttttggggtatccgaaatatgccgaccttatcgatcggctgacagccccaccaaataaaaaaaagatgtattgcctatgcgtcaccaagtatttagttttttttttttttgacgaatactttcgaatctcgacaacccttaacttgatttcccttatctgcagttcaaatttcgttagctcgcaatcgattatcccctcgatgacccacaaccatatatcgtcccgcatcaaaacacacatagattcggacaaattcgtgctagtttgccatttattgtcttggccagacttccgccggcgaaatgcaataaaattggtcagaggaaactgaaaattatcgggcttaaagccaggcccatttccttttgactgtccgccttctggcttctgacatacacataaaaactttagctgttcttgctgtgtaattcagctgtataagcacttccggttgccattgcgcccgagtagctcgaatttccggctcaggcaagaaggtcttgggaactttgggaccaatgtaagccaaagacattcgaataactagatgcgtaaaggccatacattggacgcccaaagtagcgtaaaaatctatcctgtagttccattcaccgccgattcatcggtgaatcacatcccaaaaacaccggttaacggaccaatcgtcgctagattcaccgtttttagcgttttttatgactatttttcatcaccctttcatcaattaaacatcaactatatttcatcagtcattttttactagcttatggacaaacttatgtttatgaacaaaaattttgataattcgacataaaagtgagaagaggcataaagtatataatactcaaagtatataacatttacacatgtatataataagatatatttaagatgcgactgctaaaacagctctcattgatttttaatttccttttattactttttttaatttaatttctttaggaaacatcgaaacatcaatgttttggaagtcggaaaaaaataaaatagcaatgaaattctttgagaaatcatcgctcctgaattgacattatcatctctttaaattttttgggagagagatgacgagcgagagaggatacgtgtgcacacattctgtcgtcgacgctcactatatgcgtataagagaactgctgctctctggcttttaaacgatagttcgatagaaaaaatcgtgttcaacacttcaaataacaatcgtccacaaagtagcattttcgaattaattgggatatctaatcaagatttgaaaaatcaaaagacaattgctgttgtatcaacaaatcctttaaaagtgcaaaatgtctaaaagcaacgcatctgtggaaggtccccgttttgaggagcacctagtctgtccattcgatggattacatcgcatattgccgctcgatatgaagacgcacgtgttgcagtgcgccaagaactttcctttggaaaagttggtgcactgtccatataactgcggtcaaatacactcggttgccgaaatggaggtgagtacaaaactagtgaaccttttaattaaataaaaacatcgtaccgattcgcagaatcatatcaatgattgtccagaccgagcatatttggagcgcaacaatgtgcctagtgatgagttgccttctttggcacagcgaccgcgtggtgttgaggtggagagcgaagaggattgggatgccgaaccgccatctcagacgtacaaccctagtcttcactgcgagaggagcatggttatccgtaccatacatggagctacacgatccgctcgtcgagaattccgcaaacgcgagcaaaagcgattaaatgatttaaatccatagatcaagtttacgagtagtaaaataaagagcacagctcaaaaataatttagtaattacatttttcatttcaagcacttatttaaacatgactaattcctttctaaggtaacaaggcccttatctaaaatgcttgccacataaggggacattgagctgattgaagcacggccatctagctttgtggagctgtttgatttccaactaaatcgaccccacccaccttcgaagcggcaggacaatcataatgttattaataaaagtgttctatggcaatcgggataaaaggaaaacgagcagaaacggcaaacaggcctttatttccctttgaaccgaagtgggagtagagccacgcgcctcacccacaacgatgtcaaatttaatgcaatttattatccttttttcattatctcgctaaagatgccctagttgagcaactacatagctggcggaggtaatcatacaatggagtcacgtggcggcaatttgaacgtccgttcctttgttgtccttgccgagctggaacaacagcaaccacaaaatgtaacctttccggggtcacccatctacccatcatacccatcagcaaattgtaataaattgtattaggaagcgtcgttgagaaattcaaattaagtaattaaacctctggtttggggccactcttttctggggtggcccatcgctcatctcactggctaatggatttggggtagctgtatctcgctagcttaatagagcaaatatcactttttataagaacttggcgcttgttactttctctttgatgtccaaatataaatttcaattaccaagttttccgctgaccaggactaggaaaacacaaaatgagcctccctaatgaaaatgaattgaatgttgatggggcaagttccagaactagatgcaaaaatcataagtttgttatctttactaaaaataattataaaatgtacaaaaatgtaaaataatattaggaaataaattttaaaaaaaataaactaaagtactaatgctaaaataggaatggaatcccatctgttttcccttccaagagctaaaaatgtatctgctgcgtcacctttaattgtatgcattggcagcgacacttttccaattgattgattgatggccaggatttctgattaggcagacagacggctaatcagatattcatgcatcatttcggtggcagacacagcgcagttccgtttccggaacttggggacttaccccaaagtaatgctcccctttccttttcattccatgtagctgtctgcttcaatttgctcgtatctgtcagttttgtgccaactcatgattcgatttgggcccagccataacattgcggatagagatcgatgcctcgttattattatggttgaatatattggataatgggaacgggatgggatgggatggcgatatgccggagacatttcacacattaacggcgaggaatcttgggcttaatgccaacacgcccctactttaaatgctggccaataaaacgcgtcagtaaaccgagggctcattattaagctgcaaaaatcacgctcgaattcatggcattccgagctacccattccaaaaaaataaaggacgaagcaagcaccaacgacgggcaacttacgccgcctgtcagacaatgcgataaaaatgtaatcccaatgaaaaataatgtttctgccggcatgattccaatttagctacagtcgaccccaagctcagccgtagctcattaggaccagtccaaatagcagatgccggcaaccggagcaaatgaaggagaagaatttaaaaaggcaaaacaaatccgcaccccaaggaggcggcaggatgagggcgcgacacgttgcgactacataaaacacccgtcgaacaggccggaaccccaaaccgcagccaccaactggtaccagcgttcggtggtgaatgaagttgcactgggaaaataaaagggatgaatccttaaagaaagttttgccaagaaaaggtattagatattaaggcatattcaaagagttcatatcttatttaagatccttgtatataaagaaatgcattccaattgatttcaattcttttggctttttgcaatcatactgatttttttcagtgccggcgtctggcggggtcataacattgtcggatgtcgaaacaagcgatgaatggtcgagtgaatgagttttcctccttttgttcggtttggctgctcgtaaagggctttcttccattcacaagggtggacctggaccaggatggaggatgtcgatgggcatgatgggggctcccatcgccgtcgccatcgcacgcacatcgcaattgagccgtaaatcctttacggtcttagcgccgttgtttcacggcgaatgggactacattgcgcttttgtggatatgagcagggatttttctcttttcagcagcaaatgcctagcatacttttgtgcgccaaactcaaattaactgccgcattgtggcattggaaattcttttaattgttcagattgaaacaagcggaaagcgtaaattgcttgggctttgtgccggagattgctattctgctgacttgtacttgcacttggcttgcggtttgcggccaagcagtcagaatatttcgacagacacgcccgagaatcgttccacctttcgtttgcggctgaatctgtatctcagcctggggcatcatcccccaaaaatccgaaataagtaagtagacgaaaaagttggctgttcgtgactcgtgccaaagttgctaatggaaattgcaaacataaaatcattttccacacaaatttctggcctccggggcacgcacacaattccccaacggaaagttcgtgggctctttttggctggagatgtccataggtacacatactaacccccagatctgggagatgaacgctagaattccaaagtttccgaataccgacttggcacgaaaccaaaaccaggtgtacacacaatgcggctcgattttaatcgaaacagaaggtcctttttcgctcacattagctaattaattgcattaatcgttaatagatcagatgagctgccagtttccattaagaaaagactcgtttttccatggttaacaattatatttcaatagtacatgtttgttttgtgttgtttgtcctctgtttctgttgtggtggttgggtgtgtgtttatgggtgtgtgggtgtgggtgggtgtgtgttgggtgtgtcgctctgtaataatgcattatctttccactatagctcatgccaatatctgtatgctttaatgtacgttcggttataattttttttctgctcgttcaattcattattcatagcattttccaatagccgaaagcaggcaactgccatttggaattctctttcttcgatgcagttcaaatacgtttatagagtcatgtgtgcgagttttctatttgtattttacccttgaacaaatccggcaaatgccaatttgtatttgtttaagctttcaatttttgccgacttatgccgtgaatgaatcttaaggaaaatatacaaacatcgatccgaacttgaatggtgtttggttttcgaggcagttcctgcttctttccctattgcttacatttgattttagagggtttttgggtttgttttagccatattaagtcatcgaacatcgattcgctttcgttcgttttgatatgcatagcacttagtttgcttagtttggttttggggatagttgaagaacggtttgatatacagatacaaacataattacgtatagaatatagatggatagacttggaaattgaacagcaacgttacagaactgggatttggatacttggtaaaatttgagttactcttctggtttgcatttgcatttgcttaattatttgtatttgttattataatttccatcgtttatcgttataattattgttagatatgtaacacaaacgtctataacattagccgaaacaaattgcaaagatctttgttataatttagctctgtaccatctatgtaagtatgtacttgaaacactttgacttctaccgaaatggacattcgaaactaacaatatgtcttatatacaatacaaaaccgaactcgggggcattacataactttgtcgacttcacttacgaactcattttattttgtctagggtatacaattaaattttctaaaacattcttcacacgcacaacacatagaaactgtcggagaggcaattctcatatgaaaaaatatcaaattatttttctgtgctactggttttgttgccaaggtaaaatccctatatcatttagtatatatacgatattaaaaaatgaattttgttcattaattatccatagcgcacagttattgcatataattcataattcatataatgctattgaacattcaacacttgtaatacgcagagtataaccactcgattaaccgctatcgtgtttaataattcattttataaatgtatatttcacttatatgtatgttgttatcatacatctctcttatgcttttattttaataattatatttataattatttactcgtaacacatacagtttatgcgttccatttgctcttatttgtttagtaagttattacacattgccggcactgctacacacatccttcaggctcttcaccatcgaccttcagggtcctcgtcctttgagtacataatgtgatggttattacttagctgtatatttatatatgtatatataatatttatttgtaaaccaaaatcggaagattcatatacatgttgcgctttaccaaactttggttaaaactgttcaaatctattgaaatatcgaatgcctgaaattgtcatgttttttttatttgtttgacatctatctacgtccagtttcgaaagtcatgtaaaaatcaatcatattttagtgaaaggaacggactaaagttaatgtataattatttttgaacggaatttcaatccacatgactttacatgactttaagacctggcatttttgtttttagatgattgtttcaaaggaaacttaattaaatattgctttttcggtgtcttgttatacatgttcatatatattgatgtatatatgtttatttagttgttattaaaattctattgttagctacttaaataaacaaggttataatatgttacataataatatatatattatttgactatattaatcattcatcttgtattcttcttcgctttatatatatgtagttgctttaacacttcttacgtcaccactacttcgtcatcgttttaattgatacatttgatgggagattttttcatgagtttaattcatattatagttagagcctttctacagttttgtaaatttgtagaactatgtatatatttgttaagtacatgtatttagtgtcggtaaaatagggaaaataatggaatttaattaaatataaagctggtaatccataaaaagagataacgttttaacgtttatctagagtaactaaaacaaaattaatgaaagtattgaaacgagcatttttctaaaaccctatgaacgtattttgtaacttcatcaaaatcagtgcatttctgttagtgtatagcgtatatttatgtagactgcgatttaaccaattgatttcgctaaaggaaactcgtacattaatatatcattatcagtgtttaaatggccgtttgattgatatgtttacggatatagaaagtctgtgatatattcgcaatcaattgtaattttcgactaaacacattcgaaaagtgtagataaatattccgaaatccatatacgcatgctgaattgtatataaaagatcaatttacttatcgatatgacggagcttaggtccgactaaatggtgtataatataggggcagtaaactgccctaaaaattggtgcagtcgaaacgaattaaaataccgtcgtactatatgactacaataatctttagtaaatatgttcatattattcagttaggtttatctttatcttatagacaaggtacacacatttatgctatgctatcgaagatctactatggcggcagttcccatgattggaactgcccatacgcacatagagtcaacaagcaaataataattgattggtaggtaaatatgaaacttgaatttgaatctcaattgatttctgtttccattggttgttgtataacttatgtacacttctttatgtacgtcctaaaactagttgtgtatgctatcgatatgatacgatatatatgtatgtatgtatatagactagtagcaataagtaatatcacttttggtaattttaacaggcgagccatcgagactctgatatgtatcgttaccttggttgtgtcttatgtttaagaaactttcaaatcataatgcttttcaaaccggtaaatcatatagcccctctggccgggaatccactctcgtcccaagtccgccacaatgacaaccgaaggagttcctcttttttgagtgggcgtgggagggtttcaatttgtgcaacttgtgatatgtctgcgatatggatgccattgctttttaagcggcggcacttgggcaaaagtggtcctctggtcagctgagctgcttacacagctagcttgtatatagatatatatattatatatatgtatgcgtgtatataatatctgatacttgtgtgtatacttgatggggcgggagttcgataccgagtccgaatcctccccttatcaactatctatgactaggctttggtttctctagcttcactgactgatagacacgaaaacggctgcatgagtactgagtatagggcataggcgatccgatcggaccgctctatatagcatatatgcgttatattagtgatgggtatatcttaggcctggtagtttggcggcttacttggacatggataggaatatagagttgttaaatatcattactgaaacattgattctttttggcatttctaaatagtgaaatgttcgcatataatgtcatctttacaaatagcttaatgttattggtatatggtattaactttctattttggtatcagctttgttaattacaaaaaaaaaattcagttcacactttcgcttgccttcgtaaattttgttactttgaattggatttaaaaaaaataagctttccatcctttttgggtcctttaggtccatttccacatccaagtaaactcaagtcctaccttacccatcactgttctcggttgcttcaacattcgtgtatgatacaaaacttggtgcggtgcaaggcattaactagctgctattttaactatctgcatgtaatgctcgttatagtgtacgtaccacttgcctatatgtctataggaataatatatgtgtatgtgtcttgtgtctagattagagtggattcaacagagaacagaatattgcacacggaggtgtgcaaaagaacacgatttaaaactaggagtatctgttcggggcaacagtttaaaatccttgcctaaagggattcgctggggcggcaggacctctgctctggacctgctgctgttgttgttgttgctgctgctgctgctgctggaagggattggccacacggggctgaccttgcggggcgtagctgccgccctgctcctgatagcccggctggtagccctgatcctgctgatatccttgctggtatccctgctgctgctgctggtactcgtactgctggtcatccagattcgtctcctgctcctgctgatactgctggccgtactccagatgattcttgacgccaccctcgacgggtttctggtcgtgcatcacataggtctggtactctttgttgggcgggtcctgcatcaggatgttggcctcattctcgaacggcttgaagtcgtagatgttgcgcagctttcgcagcacgggcacataggccagattcgagaaggctatcaaaaagttgagagccgtaaacccaatggcctccaccactccgccggcgataatgggccctacggcataggcgatcgagtaggatatatctgctatggcatagatactaccgtacaccgacacatatcgcacgtccaccagataaccgagtgtgggtagtagagccgtgtctattagggcaattccgaagcagatcacacagatgggcagcatgagcatcttgtagccgctgcagaatggtatgatgaagcaggagaagccctccagggccaatccaccggcagccattagccactggtgctgcggatacttgcgggccatcttcaccgtaatgaccacgcccagcacgtgtgggaagaaggcgggcagccagaccatgccgatcttccagttgtcagtggtcatgttatcctccatccacagcgaaatggttggctccagaaaggccagcgccacattggacatggtcagtgccccggcacagactgcaatatagggatccatcagcaggcgccagatgggtattacttggtcctgcacatccttgctttgcttcatcgcctccttgaccggtttcatcaccagcagcagcatcagcccgtccagtaggcacaccagtgccaggatcagaaagggcacttcctttccggcgaactggtagagcgctccgccaaacggaggcgccaccaggcatccgaaactgatgaaggccaacgcaatgccaagggcctgcgaacgttcgttctcctcggtgaaccgatcggctatcatggccaaaccggcggtgtccgcaaaggcggaaccggctccctgcagggatcgggcgaagaacaggacactgtagctgctgccacaagcaaagactgccgtcgagaagaacatgatggtcaggccgatcatcatgggcaaatcgtagccgatcttgtcgatgaggccgcccgaaaacggattcaccatcagctggacgatggccttcgaggcgaataggatgcccgtggccgagtcctgcccgtgatgatcatgatgcacgggtatgatctttcccgtgatattatccctcaacggtggaggcgtcggcccgtcatcgaagctgccaatctctcttaaatagtcgggtataatcggtactatcaccatatacagcatgttgtccagcagcagggctatcgatacaatcacgaggatgaggcgtcgctggttcaccggctcctggatcttctcccacacgatgtccttgacctcgcgcacctccaaggttgataacaggtatttggaatgaggccattttggttgcaattaattaatttcaattgctgaggtgtacaaagttctgatccagtttctttgggacttcctctccctctctctctctctctctctctgcctctcttcttttccttgtttgtactcttctctgttgccttaaagcttttatgcgccgatcggcgggcttgccattcttacagccggaaattgcttagctctcgctacgaatatggccgcttccgtttccgctccgctaattgcccgctctgaggtggtttatcgttgcttgtggttaactgtattgtttgctcctgctcttgatgttgttgctgtgtggttttacatgttttggtgtgcttgttgtagttggaggtgtacgagttgttggcatgccagtgaacaacctttaacgacacagaaacaagatttcgttagtcttttctttaattttgcagcttgattgccgtgctacatttattttcttaattttttagcagcactctctctctctcgcacatgtgctcctctctgcttctctttcttactcttaactaggattagctggttagttgggtctattttatgattgaaatgttgtttctgtgttgcaaaaggctgcctgctggtgaacagaaattgtattttattaggattagttcgtggcattcgcattgtttcgattacataggattagggatatctttcagtttcaggttcttcttttcgagggacacacatttcaatcataaaacgaataccgaaaagtacgtgttaagtaaattctacaattaattcattgaacacatttgtgggtccagggtgattatataagggtgtagcaattattttaattggattttgtgggcatgtaaacgtagccaagtgttcttagagccacgcggttgcactcatctacgcagtaattataattattgcttttacttcacagaaaaaagacccactcaacttgcacgacatccgaaaatacttgaatgcgaacaaaagggagcttaagtcgacccaagcattgtgctcaaataagaaatataattttcgaaagagtatcggtggacaagcatatactgaagtatcaaaattttgttttttaaacgttagaaagaattatctagtaaacatgtgatacatgtgattagtgattcattgtttttgtgtaaaaaattatacagtttggacttatacttcagcaactgccaccactctaagttcattagggcttcatggtgttaaaaaacttcctatagctaacatctctgctatgccggctatcaatgccgatctaatttcaacatttatctaccttctagcgctcgacgaccagccaccccattttggtaaacatgaaaatacgacgtgtgctgcgtataaatatgacccctgccccacttttgtttttttttgctactacgatatggcatacaccatccccatccatacaaattcagagccgccccttatgaggctttggtgtacgcgagacgtaacaaaaacatttcgttttatcattaaattttcatgaccacgtccgtgtatctgctccaaacctccccgacagccgtgggttctgtcctggtcacccacccactttcacctagctactcttacatacatatgtatattaatatgtatatgtataaatgtacatggcaacagcccccgggctgcccatgagtcaattatgctttgcgaccgtgtggggctcttgcttttatttttcatccagcgactttaatttttgagttttctccatgcatgagtgctttcccccaacaacaaaatccactggaggaggcccggtgggtcaggtgggtggacgcacttgaccctggtgcgatgatggtggtggtgctggtgctggtggttggcgggcttttatcagcaccaggggttgctcctgggtcgcccgcctgcagctgctgctcaagtcaagtgcagaaacgtgtgcctacatgttgattacaacaaggtccccactaaacagaccattcaatgtatctcacgtatttttaaggaatattataacaaaacattcgaaaaagaaccttgaaccagctgatactttaatatatgtctttaagatacatataatattccacaattcaatgaaggtcttatagaaatattaaaataatgttcctagccaataatccgtatatggtatgataaacaataatataagctgttcacagaactcgtgcccacgacaagacatcaaaaactttgcttctttcattcctataaatatttcagaatgttttcaaagaaattttattatatttacttgactgattaccaatttgaaaggaacacacctactaatgctgcgtatatatgtatatactcgtatgtctgtttataaatgagccagcaatttgtatttacgcttttataattttattgatttttccgccctgtctggcaaagctccctggacagctgatggatttcccaggcaatgcttgaacatttatggaaaattctattggcttgtggtcgtgaatttgctttgcgttttagttagtcgtttcgcctgaccttttgttgcaactcctgctgggtttccttttcatctctttttggggtcgaatggcaacttccgactggctcaattagcaggcgaagagttcatattttatgcagcttccaccgcagtaaattatgacggcccatgtgttttcccaggctccggagaaggaagcatagtgtagtttctactttgtgtctcattaataatacgctagctgtgcaggggcttcaggtgctgccttaaatattcaggaggctttaaattttccagctccaatccatctaggcaaagccaaaatttaatcttctgccagacaacaaaggacgaaatgggattctggggcagcaattgaaggaagtgttttcttctcagccaggcttaaagctccacccacttatacactcactagccttttcaatggcaggatgatcgccgacttttgccacccgacccgtaaccctgggaacatccgcagcctgctcctgtccgtctgtcgtcctgtcgttttttgagcaacagcaaaggatatttactttgcgagaaaggggaatgaaattacattcgcttttttagtcctgggtgtgccagcgtctgtctgacgaggtaatcagcgtaaaatacaatttcattctgccctcgctcccctgaagggtaagacataaaaaaaacacacacacacacacacacaatatcgtgggcttcgttcgacttgaatttgcaatgagatgatggcatgtaactgtgagctttggcgctttgccattgcccaggcaacgcagcgaatgccattaaaattaataatctagaatatatttcgtttttcgtttcagtgtcaattttaaaggtggggcagcaaataaaataaaatatatcataatatttatggtaagccgcactcgacaaaagccggcggaaaatcctcacaagtgttaggtccgcaatatggatttggattcgagataccatccccctttcaaatggactggtcttgtaaaactttccgcaagtggtgtaagctgctttgttcaagtggcccgaagggttgaagttctgttagggggtgggcagcagtgcagtagtagttgtagtagtagtagttagtatgtggctaagacacgttcccgagcaattggctctaatgaactgtgaccagctaatgagcctcaccttggccactcttgatcgattaacttggccagcgttgctagcgttaccttaaccctcttccgactgccaagtgtttactcgactgccaagtgacatttctgtttcaagtttaattgtcttgtcgcggtcttgcgattcgtgtacaatcgattttacccggttggccttagctcggctagtcgttgtaaagcacttttttaattgccaaagtttttgggacgatggaaaatgtcaatttaaacagggtatctatccctttgtgcctttgtaagcaaccctctgtgctgcaggtccttgtttttattgctcttattgttgccgcgctgatgtgcttttatcaactcccagtggacacgcagccacttagcccgaggatccgtactccagtttccagctgccccgaaatggaaataaaggagcacgagcgcacaaagggcgtcatttaggtggcactgatggtaccacggggcgtatggagcagctcctttagtgcggaggagtggatggggtctgtctataaatcaaaacattaaatgggcggggctattgggggggagtgagctccaaatggtttcctctttctcgatcttccccgtgtgggtgtgcgtgtctaatgtccgtgtttttgcacacatgtccagtttccaccgaacatcccttttttggtcaactgtgagcgttggattacaaattgatttccacataaattactcggacttgccgcactcaatgcctttttttttgcagggtaaaagtaatttacctttatgtctcccattcagcagttcgtgtttcaagtagttttgtgcacagagaacaatagacagaagatgattcctcagacatctaacaatttccaactattttaaattacaactgcaagccactagaaagtatgattccaaaacatgaagctgttgacaattttttttattcatatagtttaactcgtgtgagattagtagttcacgctcgagagtatattttgcttttatatacgagtacacccaatttttctctacgtgcattttttattaataactgcgatatcgtattcgtcctggcaaattgctaatttccagcatcgaacccagggcctaaaatgtaaccatttgtagcttggcaaatgcggagcaatcaacaacaccatcagagcgacccgtttacgacttttgatggcgctatttgggtgcaacttctggtccagatccagctccagcttctttctccccctttcttccctttcatccgccagccccttgccgcattgtcccccttcctgaatcctgatggctcaatgccgagcgggcaaccctcgagatgtacgggcgcgttcttatcagacggcatcaagacaaatgcgttacttgtttctcgtttagcttattacgagctaccttcctgccagcctttgtttctggcatttttccatcccctcgggctgccgtagatgggtagaaaataaggaaggagaaactcggtctgtagtttctcggtggtttctggtggtggtggtgactgggtggtggtgcgcccccttttgttttgacacgaaaccgctatgaacacatcagcgttacaaacgcgtctacaaggcaaacaatctaatgacgacggcgtcgtcttgtttgtgtttgtgtgtgaaatttatatttattgccttcattatgcagcagccgcagcaccagagaaaattgcttcctctggcaggtggctttcggcatggtggcgtctcctctggcccatggatgacagtagtggtagtggtagtatcagccttaatgaacttcagccggaccacgactagaccatctacacattccaccagacgaggatcttaatgatttaatgggacagcagacacaaatttgattagccaacgaaatctaataaaggcatttgtttgcgattctcggctaattgattctcaattggtgaccgcagaaaagtcctagaacaacgaccagcagaggaatttgggcattaaatgccgatggaggtttctgcagactaaaaacatttccaaaagcagtgttgaaatgtttttttttaccattcgccaggaataattaataattacctagttttgtgcaagtattcttttatattcgttcagttatgtatcattcttttaaaattatattatgcaagtaactttcctatacaatcatgagaagtaaagtaagtactcagtaaagtcacaaactttaatattataaaaatgctttcaaagtgtgccaatagctttatttactacctcgaattctaagtgttggaaagaaagagtaatcaacaatcccacaaattctttctctgaaagagcaagcctactgcagctacataccctctttaaacattcaataaacattttttgaactgtagaattgctttatttaaatattatactgtaaaagtactgcaccgaacttaagaaattatttgaaatagtttttaaaactgctagatttctaatacaaaaggttttcttcgtgtggaaaggcacctggacagtccgttgaattacataagagctaaagtctttgagcttgggcggtaggcggtcgaacggtaactgttccattccgttacgttccgtttcgttttcccatgttgttccacggttacccattgagtgaaacgaaacctacgaacctacagctttcggtttcctcgttctgttttggggccataaataaaatgtgtctaccctgtgaaatgtagcaagtgtcgagctcacgaacgagctctccatgtccataaaaatacacacacacacagaggaacacacacatagaagaggtgtatatatgtctatatatatatagccacacttgtgcgccaaaggacaacgctgatgagcgggaggcctttgaggacgaggacgaaccacttggccagcgggcccagtgctctagtgtgcttgcgactagaagttgtttaattttaattatgacccagccacgttatgcaagtcccaaccaagcagtaactatgtatttatgttactcacctgtatcgctcggtgtgatgttgctgaggcgatgggtgaggaatcctcggagattggagacgacgcgctgcggcgagttcggcccgctgccaatggagaagctacgcaacttggagaacagggcggcggactccgggccactgcccgctgcgctggtgctggcctcgttggacgccacgttcgctcctttcggatccggttggtttggcccctttttctttgtcgcttgggatgatcgcccaaatcacccaaaagcaaatagcacacgaaagcgcgcggacttttctcgctgcgattatgtaaaagggcagcgcgcgctaatcgatcgccaagacgctcacaccgacgccaaaacacacacacactgacactctacccgcaatgcaaccgcttcgctcgaccgctcgttcgcttggatttccctggctgagcttgtccacaaaaaatgatacttcttttatttattttttttttttttctattcctggctatacaatgtagctccggggagttctttttccaggcgacggacggcgactacggcgttacagcagcagcgtgcgttcagtcgtccgggcaggagcaaaggtaacttctgtctggcgacggctggccaaaaagcgtcgagcagcagtaggtattcagcctggaaggctggagctccccaccttgcgccttccatggcgcaggacatctgcgcatgcgcctgcgcctccgccgggcattcgatagccaattggctggcaaatcctgcccctcatccgcattgcccgcttcccgttttcccaggcccattactctcgcccagttgagcacatttgaataagaatctatttgaagtgtgcggagaaaatcaatttccttttggccgctcgctctcacctgtcggtttgcaaatgttggttgctttgtttgtttgtttgtgtgtcgtgcgactattttttgcgcctattttttgcgcccattttgtcattgcgtgcttttgccattttgccatttttgtgtagcgcacatttgggggcttatgtaaggcaagtttggggacttactttctgagttttctttacttttccttccttcagccagagaaatacacacaccgaccaaatgtaattattttacaacaacagattttggtttattttcttgctacagaaattgtaattatttttgcagaacccaaaactccctggacaacaattgggcaatttctttgttaatttcagcaattgcccgaacaataaacagacatttcttctcaagtgggctcgacaatgggactggctggcagaaaggacactgattaatatctctggtgtgaaggcagcaggactgcaatgcagggactaacacccaccacaaaatatatgtggtataccctgttagcttttgttggattttttgacccgaatgtcgcacaatttgccaatttcattgtcatttatcacttgacaagcactttctgcaatttatcaagtcccagctcgggctcaaaaggccacagaattatgttaagatcccccaaaaatggcataagaaattcaatggcaaagtttttcgctcaccttttttg

SEQ ID NO: 41606 - DNA, 4231 bp, DROSOPHILA
gacgactgaacgcacgctgctgctgtaacgccgtagtcgccgtccgtcgcctggaaaaagaactccccggagctacattgtatagccaggaatagaaaaaaaaaaaaaataaataaaagaagtatcattttttgtggacaagctcagccagggaaatccaagcgaacgagcggtcgagcgaagcggttgcattgcgggtagagtgtcagtgtgtgtgtgttttggcgtcggtgtgagcgtcttggcgatcgattagcgcgcgctgcccttttacataatcgcagcgagaaaagtccgcgcgctttcgtgtgctatttgcttttgggtgatttgggcgatcatcccaagcgacaaagaaaaaggggccaaaccaaccggatccgaaaggagcgaacgtggcgtccaacgaggccagcaccagcgcagcgggcagtggcccggagtccgccgccctgttctccaagttgcgtagcttctccattggcagcgggccgaactcgccgcagcgcgtcgtctccaatctccgaggattcctcacccatcgcctcagcaacatcacaccgagcgatacagaaaaaaaaaaaaactaaatacttggtgacgcataggcaatacatcttttttttatttggtggggctgtcagccgatcgataaggtcggcatatttcggataccccaaaactcttgaggctcgtgacagtgattaactagttcatggctgcagcctaacgattgcggcaaattactcaaccatttaatttggtgttcaacaagtggttaatcagcgattgtcgtgtcgctcttgttttctttgttatttcaggatggaaagactcgattctgtcgataccaaagaaatggctctcaacggccgagtctgtggacgagtttggattccctgacactctacccaaggtgcccgttccagcactggatgaaacgatggccgactatatccgcgccctggaaccgattaccacgccggcgcagctcgagcggaccaaggagctgatcaggcagttctcggctccccagggaatcggagcgcggctgcatcagtatctgctggacaagcgtgaggcggaggataactgggcctattactactggctcaacgagatgtacatggatattcgcatccctttgccgatcaactcgaatccgggcatggtgttcccgccgcgtcgcttcaagaccgtccacgacgtggcccacttcgccgctcgcctgctggacggcattctgagccaccgcgagatgctggacagtggggagctgccgctggagcgggccgcctcgcgggaaaagaatcagccgctgtgcatggcgcagtactaccgcctgctgggctcctgtcgtcggcctggtgtcaagcaggactcgcagttcctgccgtcgcgggagcgactgaacgacgaggatcgccatgtggtggttatttgccgcaaccaaatgtattgcgtcgtgctgcaggctagcgatcgtggaaagttgtcggagagtgagatcgcctcacagatcctctatgtgctcagtgatgctccctgtctgccagctaaaccagtgccggtgggtctgctgaccgctgagccgaggagcacgtgggcacgggaccgggaaatgcttcaggaggacgaacgcaatcaacgcaatctggagctcatcgagacggcacaggtggtcctctgtctggacgaaccgctggctgggaactttaatgcgcgcggttttacgggtgccacgcccacagttcatcgggcgggggatcgggacgagacgaacatggcccatgagatgatccacggcggaggcagcgagtacaattccggaaatcgctggtttgacaagaccatgcagctcattatttgcaccgatggaacctggggcctttgctatgagcactcctgttccgaaggcattgctgttgtccagctgctggagaagatctacaaaaaaatcgaggagcacccggacgaggataacggtctaccgcaacaccacttgccaccaccggagcgtctggagtggcatgtgggtccgcaattgcaattgcgctttgcccaagcctccaagagtgtggacaaatgcatcgatgacctggacttctatgtgtaccgctaccagagttacggaaagacctttatcaaatcgtgccaggtcagtccggatgtgtacattcaactggccctgcaactggctcactacaagctgtacggacgtctggtggccacctacgaaagtgcgtccactcgacgatttctgcacggtcgcgtagactgcatcagagcggccagcacggaggcattggagtgggccaaggccatgtgccagggtgagggtgcaaacgtgcccctggagagcgatcgcgaggatgaggaggagtcgcgaaaggtcaagtttagcatttacagtaaggatcatctccgggagcttttccggtgcgccgtcgcccgccagactgaggtgatggtgaagaacatcctgggcaatggcatcgacatcccgctgctgggcctgcgagaggccagtatagaggtcaccggcgagatgcacgagctgttcaaagacgagtcctacatcatctcgcagtgcttcctgctctccaccagtcaggtggcctgctctacggacagcttcatgggatacggaccggtaacgccacgtggttatggctgctcctacaatccgcatccggaacagatcgtcttctgcgtctcggccttctactcctgtgaggatacgagtgcctcgcgctacgccaaatcgctgcaggactcgctggacataatgcgtgatctactgcaaaactagacgaactagactagaatgtcgctaggattggggtccaccagaaaaaaaaaaaacatatcagttaatgtacctaagcaggttagcgaacgaaagtaagtaagtgtaactagcgaccacacacgggcgtttcatttgtgaccaagcaccaccaagcgagccacccaacgaggggtgggcatctgaggaataagatggataacgataacgaaatcggaatcgaaaactgatgtcaatcactatcaagttgagacaaaaaaaaaaacacaaaaaaaaagaaataagaaaactatacgcaacccattcgctttacatatccgttaccaaagtatcctcgtagtttgaattagagcaactctagtcaattaaatgttttagagccgttttatgcgcaaattgttagtgctgttatctaagtgtgttaattgtgctatattaaatatgagtgttataccaatcactaactaacttagcagagcttacgaacttgtttatacccctactgtcagcgaattatggcaagcaagcccacaagtatgcaatacttttcgttacgaaagttgtgtttcaaatacaatacgttctatagttgttacaaaagatactagctaaagcatatactaaaagtactatctgcgcttgttactgcaatttcgttgtttgtttgaggacttattacaaaaaaagaattatataatgtctgttaatatatttccatatatattcgtgttttagagagcaaatggtataccgtaactaaaggctttttggatgaatatatatatatacatatatatataataatatatgtatgtacaacccgtaaatgaataatgaaatgaatgtagaggaatatatagaatacgcgtatagacttgagacgtaacaatacatatcaataaatttatatacatcccaggaaggcaaatgatgccccacggcgcaggacgatttagaatgatatagatacatatataacctatgtgtgtttgtttgtctgttcgagccgttagcaaaaaaaaaagatgtttcgatggcgatccaccaaagctgtcaataatctgcaaagaatatattatatacataaatactatacgtatgttatttacaatggaaaatatatgagaaacgttaaaggacaaccagatacttatatcaaactagttgctgtgttcattgttgctatatatgtactatatgtatgattatcttctaaactgttaaccgaactatcactacgtactatccaactaactatctatcttacctgtattattcgatctgtgtatcaatcattacgttaccatactgttctgtactgtcgttaagtttgactcgtttccatatggccaagagccgcaattaatgtatgcataaataatcacgaaccgaataaattgaaataaatgcattacaaaccaa

SEQ ID NO: 41607 - protein, 622 aa, DROSOPHILA
MADYIRALEPITTPAQLERTKELIRQFSAPQGIGARLHQYLLDKREAEDNWAYYYWLNEMYMDIRIPLPINSNPGMVFPPRRFKTVHDVAHFAARLLDGILSHREMLDSGELPLERAASREKNQPLCMAQYYRLLGSCRRPGVKQDSQFLPSRERLNDEDRHVVVICRNQMYCVVLQASDRGKLSESEIASQILYVLSDAPCLPAKPVPVGLLTAEPRSTWARDREMLQEDERNQRNLELIETAQVVLCLDEPLAGNFNARGFTGATPTVHRAGDRDETNMAHEMIHGGGSEYNSGNRWFDKTMQLIICTDGTWGLCYEHSCSEGIAVVQLLEKIYKKIEEHPDEDNGLPQHHLPPPERLEWHVGPQLQLRFAQASKSVDKCIDDLDFYVYRYQSYGKTFIKSCQVSPDVYIQLALQLAHYKLYGRLVATYESASTRRFLHGRVDCIRAASTEALEWAKAMCQGEGANVPLESDREDEEESRKVKFSIYSKDHLRELFRCAVARQTEVMVKNILGNGIDIPLLGLREASIEVTGEMHELFKDESYIISQCFLLSTSQVACSTDSFMGYGPVTPRGYGCSYNPHPEQIVFCVSAFYSCEDTSASRYAKSLQDSLDIMRDLLQN

SEQ ID NO: 41608 - DNA, 2633 bp, DROSOPHILA
ctatcttcaatagaaacaaatttcaggcggatggagtttacatttttaaacatttctttatcttaacattgctcttttttctttcaaatgaacaatttgaagaatgtatatgttagttaatgatttcggcagccagtaattgtataaaaccatttatctatgtaatagattttgatttatgtcatttatttttccactttcatttatactcaacgcattatgatttccgaactacaatagttaaatttttgaaaaccaatccagcggtgatgcacagatgagataaattaaaagaaacaaaatctcgtgtttaacaaactatacttttgggctacacgcagaaaaacaaacaaatgtcttcaacagaggttttcgcggcatttgcggcatttaattcgcttaatatgtagatatgtttggttgtttttaaattcgagtgagccgaacttgatcgaaattttgcaaatcctgcccgagacgcttttgaagaagttcaaacccggaaaaaatttccgtttattattaagccatcgaaaggtcgcccaaacagagccacgactcttttccatccagttttcaaatttccatatctgagaatagacgtaaatattaatcagacacgcagacaaataaatctgttcgcagttaatgggataacaagatagaattcgttggggtcgcccgagatactgtgtgttttgtgtttgggcgagccccattgtttgctctttatgggcgcgaagaccataaattccggcgtgaaagaatcgatggatgcatggacggattgatttataacccaagcagaacagaccgagggcaagaaacatttgggcatttcaaagatcttagaacatctagcaacaacttagtctaggtcttaagttttaagctactaaagttagttggtgattagtacatgctatagtattgtcagccttcttcacggacacttgcatccaagtcgatgtgtataatggataggatccagtcaggaacttcacaagaagtgcggattcttcagattgccatcctcggtgtgagtgcgaatgtactccaaggatcgcaggatatagtccggagtgggcggtggctgcggcagatgacgtcccactacatggaagcccagttcatcggctatgtagcgcgtctcgatgggaacgccctccggtgaggtgtagctatagatgccaatggtctccagcggagatcctgccgcttggacatcgattccattactggtcttgaaggcgtacttaaacactccttcgtcatccgtgggcgaaacgcggaagtccgttatccgtgcatcccgctcactggctccgaccaatctccggatccggcggactctcaccagacgggcatccacctccacccaaatcagggccaaaagcaccataccaattagctgaaaccaaaagaggtcttatcagcgatcaagttcacagatcggatggggaacacaaatggacacagggtcgaagtgcttacaaaatttcgcatatttctcggttttatctcggtttgtctttttgcactgtcagctatacacaatatccactcggagttttatgattgattttgtaataatttataatatcccgatttgatgtaatccgctgcggaattccgacgtctgcgaggtttaaagttagccaccgtactgccactccggccagctggtctctccaactttatatgtggcaaacaacgggccaaaacgtaagccacgaaaatctaataagcataaccaaatgccaataatcggtggctctggcgtcttctgagataaaacgctgctctgtgtggctaccctgcccaccaatttttggttctcgatagcaggtcatatcggagcggccacatattattcatttccgtttatcatgtttgcttattcatattttacgatttcatacttcagatgctaataaatgcgataataaaatgtgataagtatctcgagttcttgaagatcttctgccaatttgctgtggaatttatggagccgagtttccgattttgattttattattgttaataaaaggaagcgataccctcgatggaagttataaatactagttttgagttgagttaacagtgtgaggtagttaaaatttggatcaataaattagtttagaccaatgtatgtatgtatgatattacttaaagcataagcacttgaagtttgttgtataaccgcttgaaataagtgtatagtttttacacctatttatccataacaaatgataccacctagggttccaaacacggaagcatattggcgcccagcatgttctgaaatattcacatcaacaaatattaaattaatttttagagccttttctggttttaaagcaaatgcaaatagtgattatagaaatcatagcagatgccataaaatctaagaaaataggccatcaaattataaaagtcaccagaagccagattagcacagaatttttgttaacgattttttatttgttgatctgaaactgatgaaacgtggttaacggtttgagttccgtatgtagaataaaagcgactatgctcttggcaggtttcacagcagactgattgacccttacaaagttcgttgcctaagtcttttgttttgcgctccacatgtg

SEQ ID NO: 41609 - DNA, 550 bp, DROSOPHILA
gaattccgcagcggattacatcaaatcgggatattataaattattacaaaatcaatcataaaactccgagtggatattgtgtatagctgacagtgcaaaaagacaaaccgagataaaaccgagaaatatgcgaaattttctaattggtatggtgcttttggccctgatttgggtggaggtggatgcccgtctggtgagagtccgccggatccggagattggtcggagccagtgagcgggatgcacggataacggacttccgcgtttcgcccacggatgacgaaggagtgtttaagtacgccttcaagaccagtaatggaatcgatgtccaagcggcaggatctccgctggagaccattggcatctatagctacacctcaccggagggcgttcccatcgagacgcgctacatagccgatgaactgggcttccatgtagtgggacgtcatctgccgcagccaccgcccactccggactatatcctgcgatccttggagtacattcgcactcacaccgaggatggcaatctgaagaatccgcacttcttgtga

SEQ ID NO: 41610 - protein, 133 aa, DROSOPHILA
MVLLALIWVEVDARLVRVRRIRRLVGASERDARITDFRVSPTDDEGVFKYAFKTSNGIDVQAAGSPLETIGIYSYTSPEGVPIETRYIADELGFHVVGRHLPQPPPTPDYILRSLEYIRTHTEDGNLKNPHFL

SEQ ID NO: 41611 - DNA, 5607 bp, DROSOPHILA
aaggctggggcgatggtctgttgggagtgattggtctcaaatcggaggttataaccaacaggttcgtttttccgatttatgaagattgaacaaagaaaatacgcgtggtttacatttcagacgaaaggtgttaactcgttgcttggcttgtgtgatcttttcgctgtttccggccaatcgggaccttcgcataccgtcagaagagtacgaaagtgcgctccgggagctgtctatgctgctggccaacaagaagttcaccgacatcaagcccttgatcgttcgggccgttagcctgctcaaggaatccacatttcccgatatccgggccgtacctcatatggtctgccgactcatcagcatcttctacgaggagagctacctgacaaccattccagaggtctgggactttgaattcaagttaatggccacgtagcttaccgaccaagtgaaatattctaaacatcctaacagccagttgtgttattttccaggtgttatatatcatctaactaggtataggttaaataaagtgataaattttaagcaattttcaaaattgcataaaatgtataaaagtgaacatttatttatacatactttttagcataatacaaacatggggccaaacactgaaactttgttttaaatcttgtagactataactttatttgatatacatgtctcgaaagtgcatacttgaagctatttgtttaagcgtagttacaataacaaaatcgacatcagtacctgtatataaactcttcactgaccatgatcatcgacaatcatgacagtaataatccactaaatgtacacgaaaatataatgatacacttgaatgaactttaaacaaaatataaatacgtagggctacacgaacgataacagatgaacattaagggtctactcttaggtattgctacatgaaaatataaataacgataatacagtgctcggtacgagcacgctgacacggaggcagccgggctccgcttggcaatcattcttctagggcaaaattggacagctgcaggtgctgaagattgttgcgcgcatcgaaatatcccgtatcagtgggattgtctggtgtcgggacaaatgggggctcggtattgcctatattctcccagtcgatgcaagcaaagtgacgcatttgttgcacttcctttgcggccggtcgctcattgggatccatggtcaggagcagttccacagcctccatggattcgacggataatgcctcatcaccttctggccattcgatgtctgtgaggaattggtaacaaaaatataggtataatatttgcaagaaaactcttgaaataacaaaactcactcttattcagaatgttgtcaaatactttctgaggtgtctcgtcgttaaagggtggaatgccggtcatgaactcgtagaaacagacgcccagagcccaccagtcgacggccggaccgtgaccttgcttcagcagtaactccggcgccagataatcaggtgtgcccaagatgcgctcattagacacgcgagccccgcgacgcactgatttcggtgtgcggaacggggtattgatgttaacgtttttcggcgtctttggtagattgccggctccatgattgataggcgacatcgtgggatcgtcggacagtttcagatggtactgaatgcctgacatcttatcggcggtcgcatgctcccgtttcttgttctcaatggacagcggaagagcgaaccgagtggccttgagctttccaagaagaccaccatcccgacgtggcaacttctgtgaagatacgggcgtagagaagaccacgttggccacatttgcttccggaccaagcaaatgatttatgggcatttcgtcatcggataaagagcgcacctttagcacaccacggatgggcgaggaacgggccttgcgcttcttgggcgtgctgctgccaatattaaggatttcaatttcctgtgttagtccggtgttggtacttccattgcttgaactgcagccatcggtatccatgctggacatgttgtcggagcgattgaccaaattgatctttcgcttcatgccgcgcaggaagtcggggcgtttaaagtgcttggacagattccgaaacggcgagttcatgttgatgccactcatctcgttgccgttggtcacgttataactgcgcgagtaatctgaacagctaaaatcctccttggattggcttaggttgtccacattcttctcaatcgacgaagccgtgctctcgctattcagattcaagtggcagctggaatagtcgtcgcccttgcgactggacacccctgaatcctccggcccctttgagatgcgatttcgctaaagggaacagtagaggtagttattaactgaactacctacatatgtggtatacatatcttttaacctatttaatgttggttagttgtaaagttagttataaaatactagtattttaatacagaaagggaaaccgcacaatggacagacacacacacatgcacatgccaacgcacctcgtcgaccgatcgcctgcgcaccatggaaaactcaaacgaagcctcgattgcgttatctatcttgggcaaatgtttgccatcattggtggccatgttgctgctgtcttgctcggccagcttgcagccctttcagagaatcaaccatttatgcaaataaatacagagattacgggtttggccgatttccagccacttacctgacagggtgccgcatccaagacgaattccacgcgccgcttgctggggatcgcattgcccgcagcagcaccgtcctttgactccagtggtggtgagcacttgctcaggtcggccgagttacaagtgtggaacgaacaagacgagctgctatcctggggctgaagattcggagaatgatagatgaataaatccattttaattgcaatatgtttacccacatttacgtttgtagtgcaggtatgagtaatggattcattggcctcctcggcagaaaagaagggggaaacaccagatatcttgctatcgctcgtcttctctgcatcattgagcgaggtgtcgccctcgctatccgacagctccattatcagactatgcttgttgatggcctgcagcaagtgggatgtccccgtggccaccgagcccattccgttgttttgtccacttgaaacagaaccgaagtcattcagtttcttctctgacccaaaagacaggtgcgaagtaagcgacaaaagctggcccggcgtgcgggcgtttaaattcggtgagcagtttataaggtctgatatttccagatctcttcgcatatcgattttgctcaacccaaaatcagtaagcttcacatggccactggaggagagcaacatgttgtccggtttaatatctctgtggacaattccgtgctgatgcagatactgcagcgccatcaccatctcggccacgtagaaccgggccgtgggctcgtcaaaatacccaaacatggccagcagtgacttgagatccccgcccaccatgtactccatcaccaggtagacgtaggagagcgattgcagggagtagaagagactgacacagaactgagagcgggagagggccagggcattccgctccgtgattacctgggacaccatgttcttgttgatcatctctgacttgcgcatcaccttgatggcgaacagccgcttcgagtcgttgttcttgtagcccaggaagacttttccaaaggcgccgcggctgattggcttaatgatgacaaaatccttgatagtgggaagctgtataagaaagcgaatgtatccattactatataataaagtgacctaagtggtggtggtaattcttatagcccaaggcagaacaaaggaaaataatatagctaaagttagacatagaaaaacttcagttctagatataaaaaataaaaaatcttaaaaaagcatatgtgtatatatataattggataaaagaagatatatgtacatcaatagccagtaaaaggaaatgaagaaaggagctatgtaaaaaaaacagaagataaatagaactgtaaaaatgtttttgaaatggaaatcctatataacatcacatttgaacgtacatatgtttttcgtttttcctataatacataaacataaccttttcattaattcttgaacatgtactgcccttttttaatcaatttacataaacactgtgtttagaggcatttcaaattttcttgattagcaaccgtggctaactgtaaaccacccacgtgtggtaatcgccagtttgcgattcctccgcgtaccttggcattctgggagtgattctccggcttggtggtaaggatgttgatcttgtccagcaactgctcactgtcgatcagcgagtgggtcttcttgggggttttgtagtcgatgtggacatccgattgcgaagtcgcatcggcgttttccatatcttccaggtttccgacggtcagagtgcgattttctcgcggtttcgcacaatatatacaattatcgtacagagatatacaatgtatagaattcgatatagacctgaatgctattagcttgtttattgcacaatttttatttcaaacacacatttaaaacagcgcgtctattttctatgacctgaactagaggtgaaactaattcgattcttagtattatcgatgtttctagaaatttgacaacatcgatgttattgcagtttaaaattaaacgattttttaaactaaaattaaatattaccaaaaagaaatgcatattagtaagataccggttgaatatttcaagtaaatttattcaaatatttctttatgcatatatataaaagtagatatacacaaaaatgttaaaaatgtaacagttagtaactattgataaatggttaggcttttattaatttgatttaaatattatttttttttaagaaacacatagcaggatcaccatatcaccatcaccattatgaacagtcgataattcccgatagctataaattgttatcgaatcccagctcgctttgcaacacttgcgttccacctggaatttatttacgtgctgaaattcgaagttttttttgtgataaaacagcactccatgaatgaaagtgtgttccggatacagccaaacagacagtgagcaatgcgccataccctgtcatcaaatagcagccgcccagagtgaggatccgcttgccaatccgtcagagaaatccccgccaagatgatgccataccttcgccgccttttcagccaggagctctctccggctgctcagggcgattttctgggctgcttgcagcaggcgcccagtgtcctggccaccggattccctggagcacccgcactggagagcctaagttggttacacaacctagcgccgtgcttcccgctgcgaggcgatcaaattcaggtcatccacgagccaaagcacttctacgaaacgctggtgcaacgaatcggtcaggccaaacgccgtatagtgctggccagtttgtacctgggcactgggcaactggagaacgcaatggttcagacgttgcgtcacagcctggagcaacagtctgccctgaggctcaacgtgctgttggactttacacgcggcacgcggggaaccctc

SEQ ID NO: 41612 - DNA, 2775 bp, DROSOPHILA
aaaatagacgcgctgttttaaatgtgtgtttgaaataaaaattgtgcaataaacaagctaatagcattcaggtctatatcgaattctatacattgtatatctctgtacgataattgtatatattgtgcgaaaccgcgagaaaatcgcactctgaccgtcggaaacctggaagatatggaaaacgccgatgcgacttcgcaatcggatgtccacatcgactacaaaacccccaagaagacccactcgctgatcgacagtgagcagttgctggacaagatcaacatccttaccaccaagccggagaatcactcccagaatgccaagcttcccactatcaaggattttgtcatcattaagccaatcagccgcggcgcctttggaaaagtcttcctgggctacaagaacaacgactcgaagcggctgttcgccatcaaggtgatgcgcaagtcagagatgatcaacaagaacatggtgtcccaggtaatcacggagcggaatgccctggccctctcccgctctcagttctgtgtcagtctcttctactccctgcaatcgctctcctacgtctacctggtgatggagtacatggtgggcggggatctcaagtcactgctggccatgtttgggtattttgacgagcccacggcccggttctacgtggccgagatggtgatggcgctgcagtatctgcatcagcacggaattgtccacagagatattaaaccggacaacatgttgctctcctccagtggccatgtgaagcttactgattttgggttgagcaaaatcgatatgcgaagagatctggaaatatcagaccttataaactgctcaccgaatttaaacgcccgcacgccgggccagcttttgtcgcttacttcgcacctgtcttttgggtcagagaagaaactgaatgacttcggttctgtttcaagtggacaaaacaacggaatgggctcggtggccacggggacatcccacttgctgcaggccatcaacaagcatagtctgataatggagctgtcggatagcgagggcgacacctcgctcaatgatgcagagaagacgagcgatagcaagatatctggtgtttcccccttcttttctgccgaggaggccaatgaatccattactcatacctgcactacaaacgtaaatgtgggtaaacatattgcaattaaaatggatttattcatctatcattctccgaatcttcagccccaggatagcagctcgtcttgttcgttccacacttgtaactcggccgacctgagcaagtgctcaccaccactggagtcaaaggacggtgctgctgcgggcaatgcgatccccagcaagcggcgcgtggaattcgtcttggatgcggcaccctgtcagggctgcaagctggccgagcaagacagcagcaacatggccaccaatgatggcaaacatttgcccaagatagataacgcaatcgaggcttcgtttgagttttccatggtgcgcaggcgatcggtcgacgagcgaaatcgcatctcaaaggggccggaggattcaggggtgtccagtcgcaagggcgacgactattccagctgccacttgaatctgaatagcgagagcacggcttcgtcgattgagaagaatgtggacaacctaagccaatccaaggaggattttagctgttcagattactcgcgcagttataacgtgaccaacggcaacgagatgagtggcatcaacatgaactcgccgtttcggaatctgtccaagcactttaaacgccccgacttcctgcgcggcatgaagcgaaagatcaatttggtcaatcgctccgacaacatgtccagcatggataccgatggctgcagttcaagcaatggaagtaccaacaccggactaacacaggaaattgaaatccttaatattggcagcagcacgcccaagaagcgcaaggcccgttcctcgcccatccgtggtgtgctaaaggtgcgctctttatccgatgacgaaatgcccataaatcatttgcttggtccggaagcaaatgtggccaacgtggtcttctctacgcccgtatcttcacagaagttgccacgtcgggatggtggtcttcttggaaagctcaaggccactcggttcgctcttccgctgtccattgagaacaagaaacgggagcatgcgaccgccgataagatgtcaggcattcagtaccatctgaaactgtccgacgatcccacgatgtcgcctatcaatcatggagccggcaatctaccaaagacgccgaaaaacgttaacatcaataccccgttccgcacaccgaaatcagtgcgtcgcggggctcgcgtgtctaatgagcgcatcttgggcacacctgattatctggcgccggagttactgctgaagcaaggtcacggtccggccgtcgactggtgggctctgggcgtctgtttctacgagttcatgaccggcattccaccctttaacgacgagacacctcagaaagtatttgacaacattctgaataagaacatcgaatggccagaaggtgatgaggcattatccgtcgaatccatggaggctgtggaactgctcctgaccatggatcccaatgagcgaccggccgcaaaggaagtgcaacaaatgcgtcactttgcttgcatcgactgggagaatataggcaataccgagcccccatttgtcccgacaccagacaatcccactgatacgggatatttcgatgcgcgcaacaatcttcagcacctgcagctgtccaattttgccctagaagaatga

SEQ ID NO: 41613 - protein, 866 aa, DROSOPHILA
MENADATSQSDVHIDYKTPKKTHSLIDSEQLLDKINILTTKPENHSQNAKLPTIKDFVIIKPISRGAFGKVFLGYKNNDSKRLFAIKVMRKSEMINKNMVSQVITERNALALSRSQFCVSLFYSLQSLSYVYLVMEYMVGGDLKSLLAMFGYFDEPTARFYVAEMVMALQYLHQHGIVHRDIKPDNMLLSSSGHVKLTDFGLSKIDMRRDLEISDLINCSPNLNARTPGQLLSLTSHLSFGSEKKLNDFGSVSSGQNNGMGSVATGTSHLLQAINKHSLIMELSDSEGDTSLNDAEKTSDSKISGVSPFFSAEEANESITHTCTTNVNVGKHIAIKMDLFIYHSPNLQPQDSSSSCSFHTCNSADLSKCSPPLESKDGAAAGNAIPSKRRVEFVLDAAPCQGCKLAEQDSSNMATNDGKHLPKIDNAIEASFEFSMVRRRSVDERNRISKGPEDSGVSSRKGDDYSSCHLNLNSESTASSIEKNVDNLSQSKEDFSCSDYSRSYNVTNGNEMSGINMNSPFRNLSKHFKRPDFLRGMKRKINLVNRSDNMSSMDTDGCSSSNGSTNTGLTQEIEILNIGSSTPKKRKARSSPIRGVLKVRSLSDDEMPINHLLGPEANVANVVFSTPVSSQKLPRRDGGLLGKLKATRFALPLSIENKKREHATADKMSGIQYHLKLSDDPTMSPINHGAGNLPKTPKNVNINTPFRTPKSVRRGARVSNERILGTPDYLAPELLLKQGHGPAVDWWALGVCFYEFMTGIPPFNDETPQKVFDNILNKNIEWPEGDEALSVESMEAVELLLTMDPNERPAAKEVQQMRHFACIDWENIGNTEPPFVPTPDNPTDTGYFDARNNLQHLQLSNFALEE

SEQ ID NO: 41614 - DNA, 2900 bp, DROSOPHILA
actaaaacttaacattctacaataattaggctgaaaatgaacaggtagaaattattttacaacttttatttccgtgacaatgttatttgacaagccattatacttggctcacggcattggtctgattagcattttgcacgacttcaggggatatctattaccaacattccaattaccccaccaaatgccatcggtcgtgtccaactcaactttggaattccgatattttccgttcaagttactgaaaaagaattatttttcaaaatcattaaacaaaaacaagttcatacataccagttcattgtaccccaccatttcgatgattccattgcaaacggatttccaacaataatatggtttatatgactgcgaaatgcgtcgccagcatttcctgagtattcgccaagggaaagcagtttgtatttctgtttttcatcgccaataacaaaattatcatatcttgcataagcactagcattgtcgaaatcgacgagctggatatatagttccattcgtcgatgtgtcgtcattttatgcaatttttgtaggccaagccagaactcgccacccaaatccccacagcccgttattatatttgattcagtggcgttatcgaaactgccatcgattctacgctggattatcatccaaccacgaccggcagaaggaatatcctcgaaaactgaggcaaagggttcgaaatcaggtagtgtcaccaatttaattgaaggcaacttggaagagcccagtaatacgaattcatcgtggtccttattattaacgttatactcagacaatatctctgtcattttcactatcttttcgtccttcgcctttactgcaccttccaattgcacaatttttagcttcgactcgtcaattttgaattctagtctggcgatttccgcctcttttgagttcaaaattttctcgatttcaacaatctgatcattcccctctcgaaattttccattttccatatttaactcctttcgttctttcacaactttatcatgcgctggagcacaatttcctccatcgttcttcttaattgtaatcctactcaagtcgagatcactttgcaagtccataatttgagtttgtaacttctgtatggtcatttcttttgtttgcgttactaagtcaatcgacaattgcagggtcttaataaaatcatccttatccttgatgcagttttcaagtatactgcccttctcctgttgggccttcagatttatttcagcctccgccaactttcgggtgagttccgatattttcctctcatcttttttcttatgtttcagcattccccgtgcacttgtgcccacaaattccatttccgaatcactgctgctctgaaaaacgaaagagtatacaatattcgctgagaactatgtgcatgaattcatgattacgatcactatcggatctgactgagtctattcaaagacactagaatcggaatttggggaagtacatataaagcgaaaagtttttatcaaagacattagaataataaagacattagacattattattttagtgtctttgatttttattttacttgtgaatttatatcaatacaccaaaagaattttcaaatttctcacacgttcttctctatctatgtaagtaacgagaatcgagaaaaatcttattgctcaccgaattgttctcagtgctggaatctggagaggatcgcgaattctgagaaaagttgttctggtcctccggcttcatggggattaatttatcagcaccacgttttatcgtacctaaaagcactccaaacggaatttgcaataatccgtgcaataaatttaaagatgtaaagcaagtgcctatatttgtaacaactcaaaatacaaaaaaatccgatgaattgcacgtagctgtttagctctaagtgttaccagatatggactgagggagttacgcagtccggctagaacatggcatagggggtattccgtaaatttaattactgggtatcatctttgaaaaggaacttttgcattttcaaactattgctttaaataagtgtataagaaccatttctcatttgattaagctgcctagatggcagtagtacgcttttcctataaataatcacttatatttaaataccaaagaaactttggaatacctttattatcaaaccggttaggagatatatgtatttattcccaagatattcaacatgttaataatcttttattgttgataaactttcacacactttaacacataccctgttatacatacatattgcaaaacatttaggtctgcagagttgatctttgatattcgcctaacgtaaataccacgcacaaaacaaagctcaattgttaagtgttaacagtttacgcatatttatttgtatgtattgggaacatccagagaaatcaatatataaaaaaaatataatgtttatatgtgaagcccttaatttctactgttgaaatttatatctcaatttctgtagccatctccaagtactattcgaggtcgtcgatacttgcgtttccagatgaacactctataattttggctccgtccagttgttgctccgagctctgccccaaaacgattggcccgtcgttgccctcggccgctcgattgccgaactcctgcatcttgacgatcagcatcgcgaatacttgagctggaagggaggattgcagcacctgcagcagacgagccggctggccacacacgacgatggcattcgccaagtgctccacgccactctcgaaatctccgcgggcgatcagggtctcgcccagctggatttcttgaaggaaatatctgcaaatatcatggtttaattagtttggaacagctgattcgatgcacactattacgaattaaattaatgccaggcaaattaggtgcatata

SEQ ID NO: 41615 - DNA, 469 bp, DROSOPHILA
ctaaacagctacgtgcaattcatcggatttttttgtattttgagttgttacaaatataggcacttgctttacatctttaaatttattgcacggattattgcaaattccgtttggagtgcttttaggtacgataaaacgtggtgctgataaattaatccccatgaagccggaggaccagaacaacttttctcagaattcgcgatcctctccagattccagcactgagaacaattcgagcagcagtgattcggaaatggaatttgtgggcacaagtgcacggggaatgctgaaacataagaaaaaagatgagaggaaaatatcggaactcacccgaaagttggcggaggctgaaataaatctgaaggcccaacaggagaagggcagtatacttgaaaactgcatcaaggataaggatgattttattaagaccctgcaattgtcgattgacttacgcatgataaagttgtga

SEQ ID NO: 41616 - protein, 102 aa, DROSOPHILA
MKPEDQNNFSQNSRSSPDSSTENNSSSSDSEMEFVGTSARGMLKHKKKDERKISELTRKLAEAEINLKAQQEKGSILENCIKDKDDFIKTLQLSIDLRMIKL

SEQ ID NO: 41617 - DNA, 17769 bp, DROSOPHILA
ttgctaattggacctctgaatagcggaaaacgattgctgtgtgaaatcattgcatccgaactaggtatagtaacattttgttgggaattgttccttttttttttttttttttttttgtcggagcacttaaaccttctgtctactccagatgcagtttttatgaacctaagtcccgagaatacctacaaatatgccaaagacttgaagtacttcctgcatgttattctaaaagtggctaaggcttttcagcccaccataatgtacatcgaggaagcgcatagactattttggaaaaaggttccgcctgaggcagtggagattaaccccagactgctgggcacctcgttagctagcaagatcttgaaaccactgaagaaaaatgacaaaattgtactagtcggcacgagtaacatgccctgggcggccaatggaggcatcaagcgagcgttccaaaaagtactgcttattccgaagtgcgattacggcactagcttcctgctgtggctggaactgatgaccgagaacgcgccagatgacatgaaggagtacgcctactcggcactggcacgcgtccttcaggcgtacaactccggcgacattgatgataacgttaaggagaccttgaacatcgaccgtaagatgcgactcaagaatgaggcattggatccgaacgagttccttgaatatttcctgagcaagaatgagcctcccattttccctccagatgagaaggtatacttgcttacttaatacatgtttagcaactaagtcatttaactgaaattctttttagataatggataagttcaataaatggttcggcagctcaaacaagctggaaaagctgagaaaatcgtatatggctcaaaagttggcgaaggcaagcaaaaagaaataaataaatcagtttaaaacttatttaaatatgcattttcatatataactatttgtaagtgtaaacttaccttggccttaaactaatgatactatggaagtgcagatgttctttgtgtcttttttattgaaaatatataaccaaagttttcctatggaaaatagtatctaacgaaatgaaataatttgtgtaaaatgtagttcttatatattaagcatgtcatttaattgtttgtttgttgttgtggtaaaaactcctccaactcagaatcttcaatttcacacagtcgaaccgaaatgttgctgttggatccaatttctccgacagtgcatggaaataggtatgcctcctctgaattttctgcataattagagagaatcgtgatatttgtaagatatgtaaaggcatttcccttgcttaccacttatcgtcctcctggtttttatttccatcctagaaatcggcccctcggtcatagagctttccccatcggtctcacttggaaaatgcatcgtcggtaaatacgaatcaggatgtcttaaatatactttgcctgtggaatagatcagatatggacattttgaagtaagattcttgtaacattttatgtggttaatatgcagtaacaaatatttttaatttaatacaggttcagtataaaaaaagcattgacctaaatttataaataaccattggactattacttataatgaatacaaaacttacacgaatgactaactttcgacggtaaaggcactgattgcatgaaatgaagtagtttaataggttagtatacaaagatgttatttgttagaaagtttaaaggaataacaaaattacttataagaggaaagagttagatattgtgtgcaatatgtattaaataaattgttgaaattataaaatgaaaaatgaactgcgattttgtaacagccaataagataaatcagcttgttatgaacataaacatgaaaacgtttagtgataataatcaattcccttttttttttttttttttttttttttgtattttattagatgcatttaacattttaacgaagggttttacctgtatttgatttatagtcttcattctcgatattattaaaagaactcagtcttgaaagtggctgattacttgatcttggcaacataaacggctccaagcagctctctgcctccgagtccaaatactccgatccgatatcctcattcaacgcggctatatccctcgtcggatcaacatctccgtcttccccttttggtggtgaaatcagttattggtccgggaaacgagttttaaattctatacttactgtgcacgaaaaaggctttcttcgacttggactcgttgctatcgttgctgtgtaagctcgacgaatcagctatttctgctccaggaacttcggttatatctggcaagggattatggcttttgcgaacccagtcggaacagtcccaatgatactgaccattggcaagagctgaataatcaacgaaattcgcactggaagagtggcacacgttgggcatttcaacttggattagtttcccagttgaaaagcgactcacagatggtccgaaatcccgtttaagttctgaaataaagagcaggttaatatttgcttttgctatctgacactaagaggcattgacttaccattgttcagtttattttcactgaaggttcttaaatgcatttgctcgcaccattcttgtttgtaggcattatctgcatcggttgaatggcaggagtttatgttcacatgctgtttgtttcgattaaccttctggtactcgaatggcacattttccagttcatcgccggccgaaccgtagctacgcaagatgtctaagttatttacaaaattcctattgctcaggactaggttgtcatttggaactgctgtgtagctaattggacgctggttaacctccaagttactcaactttacgtttggtttgcagtaattgtccttgtccaccagtgagttcaagttcgcctccttgtacgacgacttgttcttgtccttttctagtcggttccttcgctttgaagaggaactcctcttcaacaccacgcaacacaggacacaactgatgatgaccagtaccacggccacgccggaaatgatcccgctaatgtgctctatagaaaagttcttcagctttgtagaaatagagttcgaatacaggggatcgccgcagctggctcctgtgagataagatggacaaatgcaacggaaacttccgggttcattgatgcaggtcgctccattgccgcacggctggttctcgcactcatccacatcgatctcacaagtgggtcccgtgtagccgcggcacatgcagtgcgatattccatcgccttcctcgcaaatgccaccgtttttgcacgggttcggcgtgcagaacttgccgtactcacacctctttccggataagtggatgggacacgtgcagctgtagttgttcggtccgtggtagtcgcacctgccgccaaacaagcagggtcccgatgagcaagggtccaaatcaatctcgcaatgcttgccggaatatcggggctgacaggcgcattcaaacacgtccgtatcgagttccttgcagattccactattggcacacggctgagatccgcaaatgcccaggcgcaccagaacattcgacggatcgcacttgaactcgacattcgtaaaacgtttcaaggcagcaatggtactcccaccggaaatgtacaatggcagcgactctttggctattttgatgtttgccatgcaaccgatgaagccacgctgaatatcctcgtagccaattatcgatggatgcggacgaacctcggcgcctacaaagatatcgttcgactggatgttcaggatgccattcacacccggagcactgccatgggagacgtgcttgttgtccaccatcactttggcactattgagggaccgctctaggctgatttgatgccactcgccgtcagagatgttaatgctggacacactgatgactccctcgcccgagcccaaatcgaatctgtactgaacagctccgtttatgatctccaggatgttgtagtccaccttgccgctggcatacagcagagtcccagtttgttgcacagttcttatctgcagggagtaggaaaacccgttttccagcgtgaacttcgccttcaccttgttgatcttgtagtgggcatagctctttccgccaaaggacaccgcagtgaatagacccatgtcacaggactcattgctgcacttcgaagacttccgctcgcagtaggttcctgaaaatcccttgggacacacacattggtaacccaaagccgagccagacggcatgcagatcctctgcggggaacatggatccgtggagcaggcattcacagtctctttgcagtgctttccatcgaatcctggtcgacagacacacgtattcaccggaatgtaagatggagcagcaaaactaatcacatccgtaaaggtggtggtaacgttgttcttcaggatctgtaatatctgtttgcattccccgtgaacgcagtcgtttttgttgctttgacaggtggatggtagtacatcctccaccaccaggttggtttcgttttcaatctcgttcttcttgtctatcagtgtctgccgaatttcatcacttgtgaagaattcatcggaatcgggtattatttgctgctttcgcactgcaaacaccacgttcaaatcggagtcaatggacctggctcgtcgattacccacagcatgttgtgatgctttttgataatccgattgaagggtgatgagaattacatccttttggcgacatcgcattatattgcgaatggagcgcataaaggttttcctgtgactcagcagaaactcagatgctgaaatccttctgaatcgaatgacaaccgactcttttagcatatcattggttaccagttccacgttgattttgacaatggagaacacatgaaatttaccatccgaaacggacacatttagcttgtacagaccaatatccaggttggatatggcatagatctttcccgtgttgttggaaatgttgaacagcttcgagctctgatacatgtcatcgggaccggacaccaaactaaagttcaattcatcatacttgtcctgatccgaggcatgaactttgccaatgaatgcgcccgaaaaatcgtcctcgaatgaatttatggttacttctaggggtgtgacaatgggcgggtattggctttcttcaattattttcacaaccacccaggcatcggaatataatggaggtgtgccgttgtcgaaaactcgaacttgaatcacgaattcgtcctgcagattgtgattaaatcgcgaggccgttctcaaggaaccatcttgctccagccggaaaagcccaccctcatttccagacctaatatcgaaggtgtatggcgtggtattgggtgtttcgtctgcgtctgatatcttgaaggtaaggaatacatagcccagaagtcggttttcttgaagtactacactgtagttagagctggaaaatatgggtgcattatcgttagtgtccaaaatgtttatattgattggaacactgttgcatctctgaggatctccctgatcacaggcttgaatttcaagagtgtagtgcgaaatagtctcacgatctaatggcctcgaaacgctaattgttccgtttttcggatctattgaaaactggcctatattgtcgcctctttcaatgttgtaagttacaagaccatttacatctgaatcttcgtccgtggctttgacgtccagaatcttggagcccacgaaaatatcttcattgacattaatgcggtacaggttttgcagaaacgtgggactgttgtcattaatgtccagaatagagatgttcacatatgcattgttgctaagcggtggagtgccgccatcgattgcttgaatggtcaagaagtaaaacttggacatttcatagtccaaggttgcatttagcaccaagtcgcccgtcgtggaatccattttgaacttcccctgctcgttgccactcattatgaagtagtgaatatccgcatttaccccaatatctatcgaagtggcataaactttgcacacttctgtgccgtgtgtggcgttttccagaattttgcacgaatactgacgcatactgaactcgggtggattgtcattaatgtccaatatgttcacagcaactgttgcaatggagtgtagttttggaacgccacagtcctccgccttcacagtgagattaaacaatgaaattgtttcacgatcgagacttttgtgcagccttatgataccagtcgattttgatattttgaaataatcatggttttcacccattagcgagtatttgatttgtctatttaccccgaaatccttatccatcgcgtgcactttcgtgatcaatgtgttcagttgtgcatcctcgggtacactcactctatattgagccattgagaaaatgggcatattgtcatttatgtcattgaccgtgatgattatttccgagaaacactcttgcgtaaagtccttgccatcctgtacatgtgcgaccaatttgtacttgggggttgtctcccgatccagtgcgcttgccaccttcaggatgccactttcctttcctatactgaagtcgtccgcacctttgcccgaaagatagaagcgcagtttgctttgaaaatcaaagtcaatcgccttgacctcaacgagtgtagttccaatcgagattgattcattagtggagatatgatagcggggttttaggcagtaaggcgtattgtcgtttatgtcttttacatctatttccacattggctttggcagtgaattttccatcagtggctattatgcttaagttgtagaacatgagttgttcgcgatctaatggtttggcaataaataactctccgctcttaccgatctgaaactgggcttgcttgtccccagaaacgataaagaaatccatttcctgtttctcgatatcgggatcaattaggagtaagttgattaaaaccgtgccaggcagcgcgttttcgaaaacagaaagcccttcgataggcaacttaaatactggtgcgttatcattatagtctacgattttgatagttacaggtacttttgcatcatgctttgggtggccattatcggcagcaattactttgaaattgtactcggactgaacttctctgtccaaggaggttagcaaggtgatccagccagagtaaatgtcaatgtcaaaaatattttgaatgttttcagtatcactttccaagtagtagcgaatgtcgccatttggcccagtgtccgcatctgtggccgatactttcaccaaggatatcaccttttcactgttttccgcaacactggcactgtagaatgtgttgtcaaacttgggatagttatcattttcgtccctaacgtcaatcaaaacatcagcgtaggcgaaaaaaacgggaaccgtggaagtttccgccactacaatcaaattgtgcgactcttgctgctccctgtccaatgtctgctgaaggatcagttcaccactatcggatatcatgaagtgatcctgatccgctgctattgagaatttgaacgtatagtttccaatcatatgtagcttcgttagcacggttcctggtggcgttgactctatgatctttagtagaactgacgatttctcaaaagtgggaatattggcatcagtctcgattatttcgattgacactggaacttccgaatgaaattgaggttcaccgcgatcggaagcgcgaacgaaaaactgatatgagttcactccgtaagattccgccttgcttttaaacacaatatccccagttttctcgttgatttcgattacatcctttactgccttatcgttggatttttgaacaatttggaaatgcaccgatccattatcaacaatatcgtcgtctttggctttgacctgtaagtaaacagttcaaagttctttagtagggactacttaaaaggacattcacttcttaccgtcaggatagtttggtttgcttccactgttgtgctaacaaccattttgtattccttcaataggaagtaaggaacgttatcgttcacgtcgacgactatgaccttgagagaggcaaatccgaattttccgccaccgtcggacaccttcagtagcaccacgtactcatcctttttttcacggtcgaaagttacttttgaggttattacacccgtcgtttggtcgatgagaaagatttttttcatttcctccgaaactatttcgtagtaaagattggcgtaggtgccaaagtctccatccgatgcttttacctgaaaacaaaaaacagttatcgttacacaagtctaacagccaatttattaatctattaaagtaccgtgattatattatgaccgtgtagcaagttttcaggtacttgagcctcataagtactttgatcaaacagtggactgtaaacgttttctggcaataaggatattttgagccgggcatatgccgtatgaactccatcggagacggaaatattcaagactgtgctacttttatcagtgaaatttaacatattttgaagggaaatcactcctgttagcttatcaatactataggtttgcaattcatttccgtaaacaattttgtattccagagaatcggtatcggaaatatccttatcgtatgctttaggtaaagcaacaaattgtccacgaacagctgccactgacactttggtgaagtacgacggctcaacgaaacatggagcgttgtcgtttaagtctttaactggaataatagaatcataaattagtttgtaagagataaagcgacatagaattctacctgttataaatacgtttgatcgggaacttaatgatggcgatccatggtcctttacgttaacgactatatgatgatacttgatttgttcatagtccaatggagtctttaaatacagatttccgtctgtgacgtcaatgtaaaacagttctgaattattttgcccattaatggactcaatgtaataggaaagttttgcatttgctcccgagtcgttatcagttgcattaatcttcagaatttgtgttccaaacgatgcattttccggaatggttaggttgtatatatcactctcaatttctggatagcagtcattgacatccataatggaaacagataaaacgacttcagcataaacaccagaaagactgtcagtcgctcgaatggaaacatcgtgtgagcttattttctcgtaatccaattcatttacgacaaaaattgatcctgaaattaaacataagcttagataattttgaaatgaaacagatggggctgattgattatacccgtgttgtaatcaatttcaaacgattgactctcggaagatattgtgtaaattaaactccttcccaggggactttctgcttcaatggatacggaaagggctgagtacatttccacgtcttccttgacgctaacagtataaaactgcttttcaaaaacgggcatcgaacgatctataacctataatgaaaaaagcagtttgtattgaaaagtttccttttgttttcggaagaaaaccaaccttaacctgcagaggagcttccgaggagcatggtgttatggcgccatcataggcagccactgtcaattcatagtttcggttatgaccttcgacatgctgctttatggataactccccagatttgcggtccagtttgaacaactccccattgcccttcttaagttcgtaccgaacttcgccgttttctgcactgtccaagtcaatggccttgacctgcataataatcgttccttttggatcgtcaatagagactgtggcataatagggcatattgacaaacaaggggcaattgtcgttcacatccaagacggatatatctatggacgttactgctctgcgaacatttgaattcatgccgtcgtatagcattgactttgcttccacgaagagtctgtacaaatcctttacttcgcgatcgaaaataactccagtggtttttagggctcccgaactgattccaatatcaaacaattgtgttgggttcaggatgcgatactcaacgttttcgtccagtgtgtttcctattacgttcaccaatccaatggtagctacctttgtgttattttcaaatgcagaaaatctgtacgattcacgttggaatgcgaaattcgaatcgatggcggacaaaaccttaattttaactattaaaattgcagagaaaattccgtcggaggcacggacgtgcaaggcatagtcccgatcattttcgttatttagtatttcaaaatttctaaaaaaaaaaaaaggtatgttttatggtctaaataaatattgtagcttagtttaccgtgttgtaattattccggtgtatttttcgatctggaaacattcgttggtgtttccatccacaatatcaaaccttaaggtatcgttatcagcatcctttgcgctaacttgtcttacaaacacattctcaaaagttggaaggaacaaagttacattgagttcacgctcattaaatactggaggacaatcgttaacatttatgacacgaatcgtcacatgtgcagttgtagtggaatgtagtttgggctttcccatatcactaacctaaaatatacaaaatttgtacacaaaaatccaaagctattttcttcttaatttaccgtaacgtcaaaggtataaccagcgtttgtttcatagtccaattgtcgtaacagttcaatagcgccagttgtcgaatctattttaaaaaagttttttgccagatcgtcaactatgtggtattcaaccattccgtttactccgacatccgcatccttaacttgtaatgttaaatgactgaagaacaaatatattattgttgataccgcaatggaggtcaaactacgaaaacttactcttttgatgagtcgtgtactttcagtacgtaagatccaatagcggcggattcgggtaatgctccaacatattcattttgaacgaaatacggaatattatcgttagcatctaggatatgtataattatattttggcaggatgactcggctgccatattggttcctttaaccgtaaggttgaatactctgggataacaaaaattgtattaaaaataaaattgtattacaatttattgcttacttgatggattcatagtcgatatttccattgataacaataactccagtagatgggttaatgcggaagctttcgttgatgttgccggaaataatattgaagaatatggatgacgacgaccgagcggtgacttgagtaacaaatgttccgatgggcaggttttcgaatatttcaatggcaatgttgttggttgggaacttcggaggatcgttctcggacatggtgacaatgatgtgtaccggaatctgcgatgacagcggtggatttcccagatctacggccttcacttgaagcatgtactcctggatcttgttgatattcaagttgccagccaatgtgattataccgaaagtcggatcaatctcaaacacactacccacgttacccgtgataatcgagtactggatctcggcattgtgaccactatctctatctatggccctcacttcggctaacttagagccaatagctgcgctttcgggaaccttactttgaattattttagcagtaaattctggatgatggtcgttgtggtcatgcacgtttacaattatcttggcatagtttctttttccaggcgctccttgatccttaacaaaaacgatgagtatatgctgcgcagtcttttcaaaatccaatctctgagtgacaatgacatttccacttatggaatcgattcggaacaatgccagcgacgacggatcctgagttgcgtgcaggtgatagaatagcttcttgtcctcatctctgtcagtggcgtggagttgcattataactgattcctcttcaatattttcggatatattgacatgatacacatctttagcgaactgaggggggttgtcattaatatcgatcacttgaaccaaaagattagtaaacgctgtgaatgtgccatcagtgacgctgatagtcagattataggactgttgggtctcgtagtccaaatattttgaaagcagtatgtttccgttgtcttggccaatgtaaaaggtattgtcgtcattgccatctataaaaatacattcgaaatatcattaggtattcaaaacgtggattaactatttaacttactggaaatgttgtaccacagctggtcgttgtcatcatcgacagctaaaatttgagtgaccaaaaatccaggcttgtcattttccgtaagatcaacgacattttcggatgtctttctgactatcaacggtgcattttgggaattaggatttacaggaactacaacaatattaactctagcagtttgactctttttaggaattccgttgtcctcagccttgatgtgaatctcaaactcattgtcggagtccaatggttttgctatatgtatatggcccctttggctatcgatgcgaaatttattcttaccctttccggacttaattgagtaggtaattcgaccattttcgccactgtcgctgtcgatagcgtgaacctaaaaaccaataatttagctgaccattttcggtaattcaacattgaaagccttaggcatacctgaaaaatagattgattgactgtggctgaagacggaacttgcaccttgtagaccctttggtcaaactcggggctgttatcgttaatatccagtactgacacaacgattcgcgatgtagaagatagtactggagatccgttatctgatatagccacctgaaaaaaaattgtatcagctatttggatttataactataaatggaaaagcgaacaaacacacctccaaaatatgttccgcttgattttctctatccaatttgcgttctgtcgtcttaatcactcctaagaacatgaacaattaggaaaaaatgtttataactaaagcttatattcgtacctgttttcgaatcaatttcaaagtacccgacaagatttccggaaactatgttatatgttatagtctgagtgggatctatatcgggatcgaaagcctttagggtaatgatctccacattttccacactggcttccgtgacattaacgtagtacactggtttgtccgtaagaggaatgttatcgttttcgttttcgacttgtatgtaaacctaatgattaagtgcaagtaagtttacgggacaactttagatatatgaatttactcacttccacacaattgctgaggggaactattgcgcaatcctgtgcacagagcgtcagccagtaaaagtttttcgtctccgcatcgagttgcgacaaggaagttattgaacctgctcaatatatttttgcattaatccgtctaagatgtcatacgaaggcaatacaaaccttggtcgttaaccgcaaaaattcccagtccatcgccacctgttattgagtacgtgatcttggagttcaggtccaccgtgtccatatcccgtgctgtgacattcattacgaacgttcccttcggcttgttctcctttacctttccctcgtacacaaagtcgtcgaattcgggcgcaaatcggttctcgttgacgtcgatgatcattattacgatggacatgtccgaagttagagagggatctccgccatcgatggcactgacaataaggttgtgcacttgtttgttctcatagtccagatatccttgagtcctaattgcacccgtgtgcttatcgattctgaatagttcctcatcctgggtctcctctttcaaagagaattggatctcggcattgggtccaatatcttcgtccaccgcctcgattacggccaacactgttccacggggcagatcttcgcgcaccttaaatatgtactcttgcactccgaaaacgggcgcgttgtcgttgacatcgtcgaccaggacgtaaaccaatgcctccgaggatagcacgggactgccaccatccttggcagttatgtgaagagcgtagttatcctgcttctcgcgatccagtggtttgttcagacgaagacatcccgtagtagcatttactgtgaaatcgctgcactcaaccgacagggcatatgtcacctgagcattgattccagaatccgcatccgtggcatgaaggcagtgtaccacagttcctatcctggcgctctcagtcagccggaaggtggccaacgtcttctgaataaccgggcgattatcgttcacgtcgaggatcgttattggcaacatttttgacgtcgatttggtcgggttacccagatcgtagacggtgatgttgagaacatattcattttgacgctctctatccaaatatccaataatctgcagttcaccgcggtctggatcaatacgaaaaaccgaatcgtagtccccgtctgaaattgcaaataccagctttccattgtagcccaaatcgcgatctttggcctctatccaagcaactgtttcgcccaattggacactttcgttaatggacagctcctgagggaagttcacgaactctggtctatgcacattttggccatatcgactgggtgttagagacaagtcactgaaaacggatggcgatgcactctttacattgtttttttcggccaacgataatgtttccgccaatctcctggccacgccggtttcccggcactcaaaggatccaaaaccatgtagaatactggaatctccacccaaatcttcgggcattaggtgtacattgatgatcaagtcatcggaaaagtgggtgccgtccgtggcggaaactttgagaatacggtttgttaaggttgttttcttcaggtcgcaggaaatagacagggaacccgatgtggggtccaagttaaagcagccatcctcgttgccgtcgctcaacctataggatattatatcgcctgcatcaaagtcaatggctgaggtaacgaatacctcggtgcccatcggcgccgatttggtcactttgccatagcagttcacacgttcaaactgcggccgattatcgttgatatccttgacgacgatggacagtttgatttccgtctgtcttctgtacggcaatccccaatcggatgcacggattatcagctcatagttacgcttcattgtttcaaagtcaagcagtgatgtggtcttaactataccgctaaagtgatcgatttcaaatggaaccgcatttagattggcaatactatacgatatgtatgaattttcaccagaatccctgtccttggcagtaagcttcacaacaaacgagccagccaagttgttctcattgatactaatgaccttattgacattctcaaaaatgggatcattgtcgttcatatcctgtacgctgattttcaccttggctgaagattgtttccgcgacccaacatttgcctgatcaatggcggagactgttaaggtataacttgacttcttttcggcatccagttgctttgctgtgtacaacattcccgaatcgggattaattcggaactcgtcgccctcatttccacccacgatttccaagtagaccaatgcatttttgcccaaatctggatcgcttactttgagccttatcacaggcatgttaatgggtgccgtttctggaatggatacttcgtaaatctcctgtgtgaatatgggtatatttttgctctcgggcttgatttgaatcggaacggatttgtaggcgaatcgacggggagttccgaggtcctccgccagtagggttaagttgtaaatgaaatgttgctggttaagatgggcaaactgattcaattcgatgtagtactcgtctttggtctccgccgccttcagaagaaacgtgccatccggatttccatcgacgatttccaatcgccctatgttgccatttatcccagtgtctttgtcgtttactcgtacaattccataaatcaaagggtttgatgttggcgtcacgctcgagaaggttttcgtgaaaatctctggagcgtaaaagttaacctgtttcaccgaaatactaaccttcgtcttgctggcctggtggttctgatggttcacccatgatccccgatcgtaggccaccaccgtgagctcgaagtgcgagttctccgcatactgaagctgctgcaggagagtaatttcgccagttgttggatggatagcaaagtattcactatccatcaggaggctgtagtagatttccccattgatgccgaggtcagcatcgtcagctgtgacctttaaaatactttgatatttgggcgtgtcctccggaataacaacggtgtactgggtcggataaaacagcggactcaggtcattgcgatccagtactttgatgtggatattcgcctccgtttcatagcttgatacatttcggtcgtgcaaatgtacatgtgccttcactcttataacgtattcctcagttttttctctgtttagcacaacgttatttgtccgcgttcgaatcgctaagaaggcaaaatctccgaccagtttctcctcggccttaaatagcttctccttatcgccactaattatcctatacttaacctctgcgttcaagccaactctcaggccggccagtctttcatgcaatactcccttggcgtaagtcttgcccagactattttctggtatggtaacattatatacactatggctaaacctatatagatcttgcagttggttctctagtctatactccagggtcgccgtgtgcttctcatcggccttgctttgtacagtggggatcaaccatagactacacagtagtgaaatccattggagtatggtgaaagcttttctttttacaggagttacatattttttaatcttcatagtaaacatatactgctcttatttcacataatatcctgcaacgtaaacggaatggtaatcattttgttaggcagtgtttattttgaacatcgtttaattatagtagtgttttctcaaagccgaattcggtaatcccatccgaagacattggtttaagctcaatttagaattagggatttaaatattaacgacctacgaggaaatatcttaattttttaatgttcgtaattaaacaaattgttaatcagataggcacaacacaatgtaatgtaaatcactcattgcgaggcgaaatcaaatattcggctatttaacacgtccagttttaaccattttttatggtacataatacatttacataatacatataattcgcataaaatgtggaaatgctccaatgatgggaaagcatttcaaacggcggacgagatgggcatctctacgtttggtggaatttgcaatctttcttctacataattgatttaaagtgctccattttgtctaaccgattatatctaccagcaacaatagtcgtctattaagtgaactgttcagcttctaattttggcaaatttgcgccactgttcaccttcctttcaatctgacaataagtgtttaagcttaacaacttttgcaatgtacctgatttaaggcttaagaattgtgcacaaatgaagcaaattgtaaatattataacataaataaacaaagaggtaaaattataagtacatttcaataatgtcactcttaaaaactgcttgttcatatggcacaagcataaatttaaatttttcccaaaagatgattgggcgtcaagtaaaattgtaagagaagccttccgcaatcgatttgacctagattttttttttaaaggggcacgaccagcttatcagccacacttctgatgtcatttatagtagtttctataattagttggctcgaaaatgcgtgattaatgtaattcactttgcttccaaaaacaaaacattttctatcttta

SEQ ID NO: 41618 - DNA, 14105 bp, DROSOPHILA
atgaagattaaaaaatatgtaactcctgtaaaaagaaaagctttcaccatactccaatggatttcactactgtgtagtctatggttgatccccactgtacaaagcaaggccgatgagaagcacacggcgaccctggagtatagactagagaaccaactgcaagatctatataggtttagccatagtgtatataatgttaccataccagaaaatagtctgggcaagacttacgccaagggagtattgcatgaaagactggccggcctgagagttggcttgaacgcagaggttaagtataggataattagtggcgataaggagaagctatttaaggccgaggagaaactggtcggagattttgccttcttagcgattcgaacgcggacaaataacgttgtgctaaacagagaaaaaactgaggaatacgttataagagtgaaggcacatgtacatttgcacgaccgaaatgtatcaagctatgaaacggaggcgaatatccacatcaaagtactggatcgcaatgacctgagtccgctgttttatccgacccagtacaccgttgttattccggaggacacgcccaaatatcaaagtattttaaaggtcacagctgacgatgctgacctcggcatcaatggggaaatctactacagcctcctgatggatagtgaatactttgctatccatccaacaactggcgaaattactctcctgcagcagcttcagtatgcggagaactcgcacttcgagctcacggtggtggcctacgatcggggatcatgggtgaaccatcagaaccaccaggccagcaagacgaaggttagtatttcggtgaaacaggttaacttttacgctccagagattttcacgaaaaccttctcgagcgtgacgccaacatcaaaccctttgatttatggaattgtacgagtaaacgacaaagacactgggataaatggcaacatagggcgattggaaatcgtcgatggaaatccggatggcacgtttcttctgaaggcggcggagaccaaagacgagtactacatcgaattgaatcagtttgcccatcttaaccagcaacatttcatttacaacttaaccctactggcggaggacctcggaactccccgtcgattcgcctacaaatccgttccgattcaaatcaagcccgagagcaaaaatatacccatattcacacaggagatttacgaagtatccattccagaaacggcacccattaacatgcctgtgataaggctcaaagtaagcgatccagatttgggcaaaaatgcattggtctacttggaaatcgtgggtggaaatgagggcgacgagttccgaattaatcccgattcgggaatgttgtacacagcaaagcaactggatgccgaaaagaagtcaagttataccttaacagtctccgccattgatcaggcaaatgttgggtcgcggaaacaatcttcagccaaggtgaaaatcagcgtacaggatatgaacgacaatgatcccatttttgagaatgtcaataaggtcattagtatcaatgagaacaacttggctggctcgtttgttgtgaagcttactgccaaggacagggattctggtgaaaattcatacatatcgtatagtattgccaatctaaatgcggttccatttgaaatcgatcactttagcggtatagttaagaccacatcactgcttgactttgaaacaatgaagcgtaactatgagctgataatccgtgcatccgattggggattgccgtacagaagacagacggaaatcaaactgtccatcgtcgtcaaggatatcaacgataatcggccgcagtttgaacgtgtgaactgctatggcaaagtgaccaaatcggcgccgatgggcaccgaggtattcgttacctcagccattgactttgatgcaggcgatataatatcctataggttgagcgacggcaacgaggatggctgctttaacttggaccccacatcgggttccctgtctatttcctgcgacctgaagaaaacaaccttaacaaaccgtattctcaaagtttccgccacggacggcacccacttttccgatgacttgatcatcaatgtacacctaatgcccgaagatttgggtggagattccagtattctacatggttttggatcctttgagtgccgggaaaccggcgtggccaggagattggcggaaacattatcgttggccgaaaaaaacaatgtaaagagtgcatcgccatccgttttcagtgacttgtctctaacacccagtcgatatggccaaaatgtgcatagaccagagttcgtgaacttccctcaggagctgtccattaacgaaagtgtccaattgggcgaaacagttgcttggatagaggccaaagatcgcgatttgggctacaatggaaagctggtatttgcaatttcagacggggactacgattcggtttttcgtattgatccagaccgcggtgaactgcagattattggatatttggatagagagcgtcaaaatgaatatgttctcaacatcaccgtctacgatctgggtaacccgaccaaatcgacgtcaaaaatgttgccaataacgatcctcgacgtgaacgataatcgcccggttattcagaagacgttggccaccttccggctgactgagagcgccaggataggaactgtggtacactgccttcatgccacggatgcggattctggaatcaatgctcaggtgacatatgccctgtcggttgagtgcagcgatttcacagtaaatgctactacgggatgtcttcgtctgaacaaaccactggatcgcgagaagcaggataactacgctcttcacataactgccaaggatggtggcagtcccgtgctatcctcggaggcattggtttacgtcctggtcgacgatgtcaacgacaacgcgcccgttttcggagtgcaagagtacatatttaaggtgcgcgaagatctgccccgtggaacagtgttggccgtaatcgaggcggtggacgaagatattggacccaatgccgagatccaattctctttgaaagaggagacccaggatgaggaactattcagaatcgataagcacacgggtgcaattaggactcaaggatatctggactatgagaacaaacaagtgcacaaccttattgtcagtgccatcgatggcggagatccctctctaacttcggacatgtccatcgtaataatgatcatcgacgtcaacgagaaccgatttgcgcccgaattcgacgactttgtgtacgagggaaaggtaaaggagaacaagccgaagggaacgttcgtaatgaatgtcacagcacgggatatggacacggtggacctgaactccaagatcacgtactcaataacaggtggcgatggactgggaatttttgcggttaacgaccaaggttcaataacttccttgtcgcaactcgatgcggagacgaaaaacttttactggctgacgctctgtgcacaggattgcgcaatagttcccctcagcaattgtgtggaagtttacatacaagtcgaaaacgaaaacgataacattcctcttacggacaaaccagtgtactacgttaatgtcacggaagccagtgtggaaaatgtggagatcattaccctaaaggctttcgatcccgatatagatcccactcagactataacatataacatagtttccggaaatcttgtcgggtactttgaaattgattcgaaaacaggagtgattaagacgacagaacgcaaattggatagagaaaatcaagcggaacatattttggaggtggctatatcagataacggatctccagtactatcttctacatcgcgaatcgttgtgtcagtactggatattaacgataacagccccgagtttgaccaaagggtctacaaggtgcaagttccgtcttcagccacagtcaatcaatctatttttcaggttcacgctatcgacagcgacagtggcgaaaatggtcgaattacctactcaattaagtccggaaagggtaagaataaatttcgcatcgatagccaaaggggccatatacatatagcaaaaccattggactccgacaatgagtttgagattcacatcaaggctgaggacaacggaattcctaaaaagagtcaaactgctagagttaatattgttgtagttcctgtaaatcctaattcccaaaatgcaccgttgatagtcagaaagacatccgaaaatgtcgttgatcttacggaaaatgacaagcctggatttttggtcactcaaattttagctgtcgatgatgacaacgaccagctgtggtacaacatttccaatggcaatgacgacaataccttttacattggccaagacaacggaaacatactgctttcaaaatatttggactacgagacccaacagtcctataatctgactatcagcgtcactgatggcacattcacagcgtttactaatcttttggttcaagtgatcgatattaatgacaacccccctcagttcgctaaagatgtgtatcatgtcaatatatccgaaaatattgaagaggaatcagttataatgcaactccacgccactgacagagatgaggacaagaagctattctatcacctgcacgcaactcaggatccgtcgtcgctggcattgttccgaatcgattccataagtggaaatgtcattgtcactcagagattggattttgaaaagactgcgcagcatatactcatcgtttttgttaaggatcaaggagcgcctggaaaaagaaactatgccaagataattgtaaacgtgcatgaccacaacgaccatcatccagaatttactgctaaaataattcaaagtaaggttcccgaaagcgcagctattggctctaagttagccgaagtgagggccatagatagagatagtggtcacaatgccgagatccagtactcgattatcacgggtaacgtgggtagtgtgtttgagattgatccgactttcggtataatcacattggctggcaacttgaatatcaacaagatccaggagtacatgcttcaagtgaaggccgtagatctgggaaatccaccgctgtcatcgcagattccggtacacatcattgtcaccatgtccgagaacgatcctccgaagttcccaaccaacaacattgccattgaaatattcgaaaacctgcccatcggaacatttgttactcaagtcaccgctcggtcgtcgtcatccatattcttcaatattatttccggcaacatcaacgaaagcttccgcattaacccatctactggagttattgttatcaatggaaatatcgactatgaatccatcaaagtattcaaccttacggttaaaggaaccaatatggcagccgagtcatcctgccaaaatataattatacatatcctagatgctaacgataatattccgtatttcgttcaaaatgaatatgttggagcattacccgaatccgccgctattggatcttacgtactgaaagtacacgactcatcaaaagatcatttaacattacaagttaaggatgcggatgtcggagtaaacggaatggttgaataccacatagttgacgatctggcaaaaaacttttttaaaatagattcgacaactggcgctattgaactgttacgacaattggactatgaaacaaacgctggttatacctttgacgttacggttagtgatatgggaaagcccaaactacattccactacaactgcacatgtgacgattcgtgtcataaatgttaacgattgtcctccagtatttaatgagcgtgaactcaatgtaactttgttccttccaacttttgagaatgtgtttgtaagacaagttagcgcaaaggatgctgataacgataccttaaggtttgatattgtggatggaaacaccaacgaatgtttccagatcgaaaaatacaccggaataattacaacacgaaattttgaaatactaaataacgaaaatgatcgggactatgccttgcacgtccgtgcctccgacggaattttctctgcaattttaatagttaaaattaaggttttgtccgccatcgattcgaatttcgcattccaacgtgaatcgtacagattttctgcatttgaaaataacacaaaggtagctaccattggattggtgaacgtaataggaaacacactggacgaaaacgttgagtatcgcatcctgaacccaacacaattgtttgatattggaatcagttcgggagccctaaaaaccactggagttattttcgatcgcgaagtaaaggatttgtacagactcttcgtggaagcaaagtcaatgctatacgacggcatgaattcaaatgttcgcagagcagtaacgtccatagatatatccgtcttggatgtgaacgacaattgccccttgtttgtcaatatgccctattatgccacagtctctattgacgatccaaaaggaacgattattatgcaggtcaaggccattgacttggacagtgcagaaaacggcgaagttcggtacgaacttaagaagggcaatggggagttgttcaaactggaccgcaaatctggggagttatccataaagcagcatgtcgaaggtcataaccgaaactatgaattgacagtggctgcctatgatggcgccataacaccatgctcctcggaagctcctctgcaggttaaggttatagatcgttcgatgcccgtttttgaaaagcagttttatactgttagcgtcaaggaagacgtggaaatgtactcagccctttccgtatccattgaagcagaaagtcccctgggaaggagtttaatttacacaatatcttccgagagtcaatcgtttgaaattgattacaacacgggatcaatttttgtcgtaaatgaattggattacgagaaaataagctcacacgatgtttccattcgagcgactgacagtctttctggtgtttatgctgaagtcgttttatctgtttccattatggatgtcaatgactgctatccagaaattgagagtgatatatacaacctaaccattccggaaaatgcatcgtttggaacacaaattctgaagattaatgcaactgataacgactcgggagcaaatgcaaaactttcctattacattgagtccattaatgggcaaaataattcagaactgttttacattgacgtcacagacggaaatctgtatttaaagactccattggactatgaacaaatcaagtatcatcatatagtcgttaacgtaaaggaccatggatcgccatcattaagttcccgatcaaacgtatttataacaggtagaattctatgtcgctttatctcttacaaactaatttatgattctattattccagttaaagacttaaacgacaacgctccatgtttcgttgagccgtcgtacttcaccaaagtgtcagtggcagctgttcgtggacaatttgttgctttacctaaagcatacgataaggatatttccgataccgattctctggaatacaaaattgtttacggaaatgaattgcaaacctatagtattgataagctaacaggagtgatttcccttcaaaatatgttaaatttcactgataaaagtagcacagtcttgaatatttccgtctccgatggagttcatacggcatatgcccggctcaaaatatccttattgccagaaaacgtttacagtccactgtttgatcaaagtacttatgaggctcaagtacctgaaaacttgctacacggtcataatataatcacggtaaaagcatcggatggagactttggcacctacgccaatctttactacgaaatagtttcggaggaaatgaaaaaaatctttctcatcgaccaaacgacgggtgtaataacctcaaaagtaactttcgaccgtgaaaaaaaggatgagtacgtggtgctactgaaggtgtccgacggtggcggaaaattcggatttgcctctctcaaggtcatagtcgtcgacgtgaacgataacgttccttacttcctattgaaggaatacaaaatggttgttagcacaacagtggaagcaaaccaaactatcctgacggtcaaagccaaagacgacgatattgttgataatggatcggtgcatttccaaattgttcaaaaatccaacgataaggcagtaaaggatgtaatcgaaatcaacgagaaaactggggatattgtgtttaaaagcaaggcggaatcttacggagtgaactcatatcagtttttcgttcgcgcttccgatcgcggtgaacctcaatttcattcggaagttccagtgtcaatcgaaataatcgagactgatgccaatattcccacttttgagaaatcgtcagttctactaaagatcatagagtcaacgccaccaggaaccgtgctaacgaagctacatatgattggaaactatacgttcaaattctcaatagcagcggatcaggatcacttcatgatatccgatagtggtgaactgatccttcagcagacattggacagggagcagcaagagtcgcacaatttgattgtagtggcggaaacttccacggttcccgtttttttcgcctacgctgatgttttgattgacgttagggacgaaaatgataactatcccaagtttgacaacacattctacagtgccagtgttgcggaaaacagtgaaaaggtgatatccttggtgaaagtatcggccacagatgcggacactgggccaaatggcgacattcgctactacttggaaagtgatactgaaaacattcaaaatatttttgacattgacatttactctggctggatcaccttgctaacctccttggacagagaagttcagtccgagtacaatttcaaagtaattgctgccgataatggccacccaaagcatgatgcaaaagtacctgtaactatcaaaatcgtagactataatgataacgcaccagtatttaagttgcctatcgaagggctttctgttttcgaaaacgcgctgcctggcacggttttaatcaacttactcctaattgatcccgatatcgagaaacaggaaatggatttctttatcgtttctggggacaagcaagcccagtttcagatcggtaagagcggagagttatttattgccaaaccattagatcgcgaacaactcatgttctacaacttaagcataatagccactgatggaaaattcactgccaaagccaatgtggaaatagatgtaaaagacataaacgacaatacgccttactgcctaaaaccccgctatcatatctccactaatgaatcaatctcgattggaactacactcgttgaggtcaaggcgattgactttgattttcaaagcaaactgcgcttctatctttcgggcaaaggtgcggacgacttcagtataggaaaggaaagtggcatcctgaaggtggcaagcgcactggatcgggagacaacccccaagtacaaattggtcgcacatgtacaggatggcaaggactttacgcaagagtgtttctcggaaataatcatcacggtcaatgacataaatgacaatatgcccattttctcaatggctcaatatagagtgagtgtacccgaggatgcacaactgaacacattgatcacgaaagtgcacgcgatggataaggatttcggggtaaatagacaaatcaaatactcgctaatgggtgaaaaccatgattatttcaaaatatcaaaatcgactggtatcataaggctgcacaaaagtctcgatcgtgaaacaatttcattgtttaatctcactgtgaaggcggaggactgtggcgttccaaaactacactccattgcaacagttgctgtgaacatattggacattaatgacaatccacccgagttcagtatgcgtcagtattcgtgcaaaattctggaaaacgccacacacggcacagaagtgtgcaaagtttatgccacttcgatagatattggggtaaatgcggatattcactacttcataatgagtggcaacgagcaggggaagttcaaaatggattccacgacgggcgacttggtgctaaatgcaaccttggactatgaaatgtccaagttttacttcttgaccattcaagcaatcgatggcggcactccaccgcttagcaacaatgcatatgtgaacatctctattctggacattaatgacaacagtcccacgtttctgcaaaacctgtaccgcattaatgtcaatgaagatattttcgtgggctccaagattctggacgtcaaagccacggacgaagattcagatgtaaatggtcttgtaacttacaacattgaaagaggcgacaatataggccagttttcaatagatccgaaaaacggaacaattagcgtttcgaggccattagatcgtgagactatttcgcactacactcttgaaattcaagcctgtgatcagggagatcctcagagatgcaacagtgttccaatcaatataaacattttggacactaacgataatgcacccatattttccagctctaactacagtgtagtacttcaagaaaaccgacttctgggctatgtattccttaccttcaagatatcagacgcagacgaaacacccaataccacgccatacaccttcgatattaggtctggaaatgagggtgggcttttccggctggagcaagatggttccttgagaacggcctcgcgatttaatcacaatctgcaggacgaattcgtgattcaagttcgagttttcgacaacggcacacctccattatattccgatgcctgggtggttgtgaaaataattgaagaaagccaatacccgcccattgtcacacccctagaagtaaccataaattcattcgaggacgatttttcgggcgcattcattggcaaagttcatgcctcggatcaggacaagtatgatgaattgaactttagtttggtgtccggtcccgatgacatgtatcagagctcgaagctgttcaacatttccaacaacacgggaaagatctatgccatatccaacctggatattggtctgtacaagctaaatgtgtccgtttcggatggtaaatttcatgtgttctccattgtcaaaatcaacgtggaactggtaaccaatgatatgctaaaagagtcggttgtcattcgattcagaaggatttcagcatctgagtttctgctgagtcacaggaaaacctttatgcgctccattcgcaatataatgcgatgtcgccaaaaggatgtaattctcatcacccttcaatcggattatcaaaaagcatcacaacatgctgtgggtaatcgacgagccaggtccattgactccgatttgaacgtggtgtttgcagtgcgaaagcagcaaataatacccgattccgatgaattcttcacaagtgatgaaattcggcagacactgatagacaagaagaacgagattgaaaacgaaaccaacctggtggtggaggatgtactaccatccacctgtcaaagcaacaaaaacgactgcgttcacggggaatgcaaacagatattacagatcctgaagaacaacgttaccaccacctttacggatgtgattagttttgctgctccatcttacattccggtgaatacgtgtgtctgtcgaccaggattcgatggaaagcactgcaaagagactgtgaatgcctgctccacggatccatgttccccgcagaggatctgcatgccgtctggctcggctttgggttaccaatgtgtgtgtcccaagggattttcaggaacctactgcgagcggaagtcttcgaagtgcagcaatgagtcctgtgacatgggtctattcactgcggtgtcctttggcggaaagagctatgcccactacaagatcaacaaggtgaaggcgaagttcacgctggaaaacgggttttcctactccctgcagataagaactgtgcaacaaactgggactctgctgtatgccagcggcaaggtggactacaacatcctggagatcataaacggagctgttcagtacagattcgatttgggctcgggcgagggagtcatcagtgtgtccagcattaacatctctgacggcgagtggcatcaaatcagcctagagcggtccctcaatagtgccaaagtgatggtggacaacaagcacgtctcccatggcagtgctccgggtgtgaatggcatcctgaacatccagtcgaacgatatctttgtaggcgccgaggttcgtccgcatccatcgataattggctacgaggatattcagcgtggcttcatcggttgcatggcaaacatcaaaatagccaaagagtcgctgccattgtacatttccggtgggagtaccattgctgccttgaaacgttttacgaatgtcgagttcaagtgcgatccgtcgaatgttctggtgcgcctgggcatttgcggatctcagccgtgtgccaatagtggaatctgcaaggaactcgatacggacgtgtttgaatgcgcctgtcagccccgatattccggcaagcattgcgagattgatttggacccttgctcatcgggaccctgcttgtttggcggcaggtgcgactaccacggaccgaacaactacagctgcacgtgtcccatccacttatccggaaagaggtgtgagtacggcaagttctgcacgccgaacccgtgcaaaaacggtggcatttgcgaggaaggcgatggaatatcgcactgcatgtgccgcggctacacgggacccacttgtgagatcgatgtggatgagtgcgagaaccagccgtgcggcaatggagcgacctgcatcaatgaacccggaagtttccgttgcatttgtccatcttatctcacaggagccagctgcggcgatcccctgtattcgaactctatttctacaaagctgaagaacttttctatagagcacattagcgggatcatttccggcgtggccgtggtactggtcatcatcagttgtgtcctgtgttgcgtggtgttgaagaggagttcctcttcaaagcgaaggaaccgactagaaaaggacaagaacaagtcgtcgtacaaggaggcgaacttgaactcactggtggacaaggacaattactgcaaaccaaacgtaaagttgagtaacttggaggttaaccagcgtccaattagctacacagcagttccaaatgacaacctagtcctgagcaataggaattttgtaaataacttagacatcttgcgtagctacggttcggccggcgatgaactggaaaatgtgccattcgagtaccagaaggttaatcgaaacaaacagcatgtgaacataaactcctgccattcaaccgatgcagataatgcctacaaacaagaatggtgcgagcaaatgcatttaagaaccttcagtgaaaataaactgaacaatgaacttaaacgggatttcggaccatctgtgagtcgcttttcaactgggaaactaatccaagttgaaatgcccaacgtgtgccactcttccagtgcgaatttcgttgattattcagctcttgccaatggtcagtatcattgggactgttccgactgggttcgcaaaagccataatcccttgccagatataaccgaagttcctggagcagaaatagctgattcgtcgagcttacacagcaacgatagcaacgagtccaagtcgaagaaagcctttttcgtgcacagggaagacggagatgttgatccgacgagggatatagccgcgttgaatgaggatatcggatcggagtatttggactcggaggcagagagctgcttggagccgtttatgttgccaagatcaagtaatcagccactttcaagactgagttcttttaataatatcgagaatgaagactataaatcaaatacaggaaaattcagaggaggcatacctatttccatgcactgtcggagaaattggatccaacagcaacatttcggttcgactgtgtgaaattgaagattctgagttggaggagtttttaccacaacaacaaacaaacaattaaatgacatgcttaatatataagaactacattttacacaaattatttcatttcgttagatactattttccataggaaaactttggttatatattttcaataaaaaagacacaaagaacat

SEQ ID NO: 41619 - protein, 4643 aa, DROSOPHILA
MKIKKYVTPVKRKAFTILQWISLLCSLWLIPTVQSKADEKHTATLEYRLENQLQDLYRFSHSVYNVTIPENSLGKTYAKGVLHERLAGLRVGLNAEVKYRIISGDKEKLFKAEEKLVGDFAFLAIRTRTNNVVLNREKTEEYVIRVKAHVHLHDRNVSSYETEANIHIKVLDRNDLSPLFYPTQYTVVIPEDTPKYQSILKVTADDADLGINGEIYYSLLMDSEYFAIHPTTGEITLLQQLQYAENSHFELTVVAYDRGSWVNHQNHQASKTKVSISVKQVNFYAPEIFTKTFSSVTPTSNPLIYGIVRVNDKDTGINGNIGRLEIVDGNPDGTFLLKAAETKDEYYIELNQFAHLNQQHFIYNLTLLAEDLGTPRRFAYKSVPIQIKPESKNIPIFTQEIYEVSIPETAPINMPVIRLKVSDPDLGKNALVYLEIVGGNEGDEFRINPDSGMLYTAKQLDAEKKSSYTLTVSAIDQANVGSRKQSSAKVKISVQDMNDNDPIFENVNKVISINENNLAGSFVVKLTAKDRDSGENSYISYSIANLNAVPFEIDHFSGIVKTTSLLDFETMKRNYELIIRASDWGLPYRRQTEIKLSIVVKDINDNRPQFERVNCYGKVTKSAPMGTEVFVTSAIDFDAGDIISYRLSDGNEDGCFNLDPTSGSLSISCDLKKTTLTNRILKVSATDGTHFSDDLIINVHLMPEDLGGDSSILHGFGSFECRETGVARRLAETLSLAEKNNVKSASPSVFSDLSLTPSRYGQNVHRPEFVNFPQELSINESVQLGETVAWIEAKDRDLGYNGKLVFAISDGDYDSVFRIDPDRGELQIIGYLDRERQNEYVLNITVYDLGNPTKSTSKMLPITILDVNDNRPVIQKTLATFRLTESARIGTVVHCLHATDADSGINAQVTYALSVECSDFTVNATTGCLRLNKPLDREKQDNYALHITAKDGGSPVLSSEALVYVLVDDVNDNAPVFGVQEYIFKVREDLPRGTVLAVIEAVDEDIGPNAEIQFSLKEETQDEELFRIDKHTGAIRTQGYLDYENKQVHNLIVSAIDGGDPSLTSDMSIVIMIIDVNENRFAPEFDDFVYEGKVKENKPKGTFVMNVTARDMDTVDLNSKITYSITGGDGLGIFAVNDQGSITSLSQLDAETKNFYWLTLCAQDCAIVPLSNCVEVYIQVENENDNIPLTDKPVYYVNVTEASVENVEIITLKAFDPDIDPTQTITYNIVSGNLVGYFEIDSKTGVIKTTERKLDRENQAEHILEVAISDNGSPVLSSTSRIVVSVLDINDNSPEFDQRVYKVQVPSSATVNQSIFQVHAIDSDSGENGRITYSIKSGKGKNKFRIDSQRGHIHIAKPLDSDNEFEIHIKAEDNGIPKKSQTARVNIVVVPVNPNSQNAPLIVRKTSENVVDLTENDKPGFLVTQILAVDDDNDQLWYNISNGNDDNTFYIGQDNGNILLSKYLDYETQQSYNLTISVTDGTFTAFTNLLVQVIDINDNPPQFAKDVYHVNISENIEEESVIMQLHATDRDEDKKLFYHLHATQDPSSLALFRIDSISGNVIVTQRLDFEKTAQHILIVFVKDQGAPGKRNYAKIIVNVHDHNDHHPEFTAKIIQSKVPESAAIGSKLAEVRAIDRDSGHNAEIQYSIITGNVGSVFEIDPTFGIITLAGNLNINKIQEYMLQVKAVDLGNPPLSSQIPVHIIVTMSENDPPKFPTNNIAIEIFENLPIGTFVTQVTARSSSSIFFNIISGNINESFRINPSTGVIVINGNIDYESIKVFNLTVKGTNMAAESSCQNIIIHILDANDNIPYFVQNEYVGALPESAAIGSYVLKVHDSSKDHLTLQVKDADVGVNGMVEYHIVDDLAKNFFKIDSTTGAIELLRQLDYETNAGYTFDVTVSDMGKPKLHSTTTAHVTIRVINVNDCPPVFNERELNVTLFLPTFENVFVRQVSAKDADNDTLRFDIVDGNTNECFQIEKYTGIITTRNFEILNNENDRDYALHVRASDGIFSAILIVKIKVLSAIDSNFAFQRESYRFSAFENNTKVATIGLVNVIGNTLDENVEYRILNPTQLFDIGISSGALKTTGVIFDREVKDLYRLFVEAKSMLYDGMNSNVRRAVTSIDISVLDVNDNCPLFVNMPYYATVSIDDPKGTIIMQVKAIDLDSAENGEVRYELKKGNGELFKLDRKSGELSIKQHVEGHNRNYELTVAAYDGAITPCSSEAPLQVKVIDRSMPVFEKQFYTVSVKEDVEMYSALSVSIEAESPLGRSLIYTISSESQSFEIDYNTGSIFVVNELDYEKISSHDVSIRATDSLSGVYAEVVLSVSIMDVNDCYPEIESDIYNLTIPENASFGTQILKINATDNDSGANAKLSYYIESINGQNNSELFYIDVTDGNLYLKTPLDYEQIKYHHIVVNVKDHGSPSLSSRSNVFITGRILCRFISYKLIYDSIIPVKDLNDNAPCFVEPSYFTKVSVAAVRGQFVALPKAYDKDISDTDSLEYKIVYGNELQTYSIDKLTGVISLQNMLNFTDKSSTVLNISVSDGVHTAYARLKISLLPENVYSPLFDQSTYEAQVPENLLHGHNIITVKASDGDFGTYANLYYEIVSEEMKKIFLIDQTTGVITSKVTFDREKKDEYVVLLKVSDGGGKFGFASLKVIVVDVNDNVPYFLLKEYKMVVSTTVEANQTILTVKAKDDDIVDNGSVHFQIVQKSNDKAVKDVIEINEKTGDIVFKSKAESYGVNSYQFFVRASDRGEPQFHSEVPVSIEIIETDANIPTFEKSSVLLKIIESTPPGTVLTKLHMIGNYTFKFSIAADQDHFMISDSGELILQQTLDREQQESHNLIVVAETSTVPVFFAYADVLIDVRDENDNYPKFDNTFYSASVAENSEKVISLVKVSATDADTGPNGDIRYYLESDTENIQNIFDIDIYSGWITLLTSLDREVQSEYNFKVIAADNGHPKHDAKVPVTIKIVDYNDNAPVFKLPIEGLSVFENALPGTVLINLLLIDPDIEKQEMDFFIVSGDKQAQFQIGKSGELFIAKPLDREQLMFYNLSIIATDGKFTAKANVEIDVKDINDNTPYCLKPRYHISTNESISIGTTLVEVKAIDFDFQSKLRFYLSGKGADDFSIGKESGILKVASALDRETTPKYKLVAHVQDGKDFTQECFSEIIITVNDINDNMPIFSMAQYRVSVPEDAQLNTLITKVHAMDKDFGVNRQIKYSLMGENHDYFKISKSTGIIRLHKSLDRETISLFNLTVKAEDCGVPKLHSIATVAVNILDINDNPPEFSMRQYSCKILENATHGTEVCKVYATSIDIGVNADIHYFIMSGNEQGKFKMDSTTGDLVLNATLDYEMSKFYFLTIQAIDGGTPPLSNNAYVNISILDINDNSPTFLQNLYRINVNEDIFVGSKILDVKATDEDSDVNGLVTYNIERGDNIGQFSIDPKNGTISVSRPLDRETISHYTLEIQACDQGDPQRCNSVPININILDTNDNAPIFSSSNYSVVLQENRLLGYVFLTFKISDADETPNTTPYTFDIRSGNEGGLFRLEQDGSLRTASRFNHNLQDEFVIQVRVFDNGTPPLYSDAWVVVKIIEESQYPPIVTPLEVTINSFEDDFSGAFIGKVHASDQDKYDELNFSLVSGPDDMYQSSKLFNISNNTGKIYAISNLDIGLYKLNVSVSDGKFHVFSIVKINVELVTNDMLKESVVIRFRRISASEFLLSHRKTFMRSIRNIMRCRQKDVILITLQSDYQKASQHAVGNRRARSIDSDLNVVFAVRKQQIIPDSDEFFTSDEIRQTLIDKKNEIENETNLVVEDVLPSTCQSNKNDCVHGECKQILQILKNNVTTTFTDVISFAAPSYIPVNTCVCRPGFDGKHCKETVNACSTDPCSPQRICMPSGSALGYQCVCPKGFSGTYCERKSSKCSNESCDMGLFTAVSFGGKSYAHYKINKVKAKFTLENGFSYSLQIRTVQQTGTLLYASGKVDYNILEIINGAVQYRFDLGSGEGVISVSSINISDGEWHQISLERSLNSAKVMVDNKHVSHGSAPGVNGILNIQSNDIFVGAEVRPHPSIIGYEDIQRGFIGCMANIKIAKESLPLYISGGSTIAALKRFTNVEFKCDPSNVLVRLGICGSQPCANSGICKELDTDVFECACQPRYSGKHCEIDLDPCSSGPCLFGGRCDYHGPNNYSCTCPIHLSGKRCEYGKFCTPNPCKNGGICEEGDGISHCMCRGYTGPTCEIDVDECENQPCGNGATCINEPGSFRCICPSYLTGASCGDPLYSNSISTKLKNFSIEHISGIISGVAVVLVIISCVLCCVVLKRSSSSKRRNRLEKDKNKSSYKEANLNSLVDKDNYCKPNVKLSNLEVNQRPISYTAVPNDNLVLSNRNFVNNLDILRSYGSAGDELENVPFEYQKVNRNKQHVNINSCHSTDADNAYKQEWCEQMHLRTFSENKLNNELKRDFGPSVSRFSTGKLIQVEMPNVCHSSSANFVDYSALANGQYHWDCSDWVRKSHNPLPDITEVPGAEIADSSSLHSNDSNESKSKKAFFVHREDGDVDPTRDIAALNEDIGSEYLDSEAESCLEPFMLPRSSNQPLSRLSSFNNIENEDYKSNTGKFRGGIPISMHCRRNWIQQQHFGSTV

SEQ ID NO: 41620 - DNA, 3008 bp, DROSOPHILA
ttgtcccaacagattagtgtgagtctacagctttgctttcattctacctgggctgggaaaaatataccattttatgacgtttatttcctgggtcgtttggcgatttcttgaatcgaagtctacacatatgtagagagataggtgtgaactacatttaattactagcttacttcggattttgcacacttccttgtttaccgaaacgattctcagcaattaacagcagtttgcaatggttgatggtgtttgccaagctaatttcgaaacaaaaaaatatcttcgttcgaacctatcgctgcgtccattgcaaccaatcgattcgccgaagatcaaagtgaacaattaattaaagtcataaatgtagggtatcagaagatcacacgtaacatcgcactgcatggctggatcatcttcggcggcgctccgggtgacatgctgatgctgcccgatgaccttgtccacgtttcaacagctttccaggggcacaaggtatactcgcaccatactagaccatcgcacctgccactccatttggaagcctcgagcccagggcgcaactccaattgaaagttgtaacaagaaatcttcagctcgtgttgggaatttccaacgctgttttgaatgggccgaaagcgtcacattaaacagcaatatttattcgattgtaattcaacagttaatggtatctcgtgcgaaaccgaaaccgaaatcgaatctgaaactgaaaccgaattaaagcatacaatataaattgttggcaaatgactcatgtattttaactataggccagccgagcactgttgttattgttgcccaatattggtggtatgataagaagacattttggcaattatactcacctctcgggtccttgtgattccacgagaaaaaacttgtttagctgctaaactaaagagactaaagacaagggtctcatccatataaaagacgcacttgagctgatcaaattaaacagttgcactgcaagcaccatcatcacagcatcaccgctttaagagaagaaaattcccaattcccatcatcatgtacaaatatgtaagttcggttggacttggcacgcctcataccccagagtaccaatactgatcattgtactttgatcccaaaagctgttctgtcttgctctcatcggctgcgcctgcgccgacaacatcaacaaggatgcccagatccgcagcttccagaacgacgctaccgatgctgagggcaactaccagtacgcctacgagaccagcaatggcatccagatccaggaggcgggcaacgccaacggagcacgtggtgccgtggcttacgtgtcgcccgagggcgagcacatctcgctgacatacaccgccgacgaggagggctaccatccagtgggtgaccacctgcccaccccgcccccagttccggcttacgttctccgtgccctggaatatatccgcacccatcccccggcgcccgcccagaaggagcagcagtaatctggagtagcaccagcactccaaagcagcaaccccacatctaaactgcggccagtcattgttatttaggtagttatcgttaataaaggatttcgatacagatcattttcgtttttagtaatgtagtaaagatggaaaataaatgtttcatgtatatgtattcatatgtaaatgaacatatgtatagttcttcgaaaaatatagaagcgtacactatcttcaatagaaacaaatttcaggcggatggagtttacatttttaaacatttctttatcttaacattgctcttttttctttcaaatgaacaatttgaagaatgtatatgttagttaatgatttcggcagccagtaattgtataaaaccatttatctatgtaatagattttgatttatgtcatttatttttccactttcatttatactcaacgcattatgatttccgaactacaatagttaaatttttgaaaaccaatccagcggtgatgcacagatgagataaattaaaagaaacaaaatctcgtgtttaacaaactatacttttgggctacacgcagaaaaacaaacaaatgtcttcaacagaggttttcgcggcatttgcggcatttaattcgcttaatatgtagatatgtttggttgtttttaaattcgagtgagccgaacttgatcgaaattttgcaaatcctgcccgagacgcttttgaagaagttcaaacccggaaaaaatttccgtttattattaagccatcgaaaggtcgcccaaacagagccacgactcttttccatccagttttcaaatttccatatctgagaatagacgtaaatattaatcagacacgcagacaaataaatctgttcgcagttaatgggataacaagatagaattcgttggggtcgcccgagatactgtgtgttttgtgtttgggcgagccccattgtttgctctttatgggcgcgaagaccataaattccggcgtgaaagaatcgatggatgcatggacggattgatttataacccaagcagaacagaccgagggcaagaaacatttgggcatttcaaagatcttagaacatctagcaacaacttagtctaggtcttaagttttaagctactaaagttagttggtgattagtacatgctatagtattgtcagccttcttcacggacacttgcatccaagtcgatgtgtataatggataggatccagtcaggaacttcacaagaagtgcggattcttcagattgccatcctcggtgtgagtgcgaatgtactccaaggatcgcaggatatagtccggagtgggcggtggctgcggcagatgacgtcccactacatggaagcccagttcatcggctatgtagcgcgtctcgatgggaacgccctccggtgaggtgtagctatagatgccaatggtctccagcggagatcctgccgcttggacatcgattccattactggtcttgaaggcgtacttaaacactccttcgtcatccgtgggcgaaacgcggaagtccgttatccgtg

SEQ ID NO: 41621 - DNA, 934 bp, DROSOPHILA
agcatcaccgctttaagagaagaaaattcccaattcccatcatcatgtacaaatatctgttctgtcttgctctcatcggctgcgcctgcgccgacaacatcaacaaggatgcccagatccgcagcttccagaacgacgctaccgatgctgagggcaactaccagtacgcctacgagaccagcaatggcatccagatccaggaggcgggcaacgccaacggagcacgtggtgccgtggcttacgtgtcgcccgagggcgagcacatctcgctgacatacaccgccgacgaggagggctaccatccagtgggtgaccacctgcccaccccgcccccagttccggcttacgttctccgtgccctggaatatatccgcacccatcccccggcgcccgcccagaaggagcagcagtaatctggagtagcaccagcactccaaagcagcaaccccacatctaaactgcggccagtcattgttatttaggtagttatcgttaataaaggatttcgatacagatcattttcgtttttagtaatgtagtaaagatggaaaataaatgtttcatgtatatgtattcatatgtaaatgaacatatgtatagttcttcgaaaaatatagaagcgtacactatcttcaatagaaacaaatttcaggcggatggagtttacatttttaaacatttctttatcttaacattgctcttttttctttcaaatgaacaatttgaagaatgtatatgttagttaatgatttcggcagccagtaattgtataaaaccatttatctatgtaatagattttgatttatgtcatttatttttccactttcatttatactcaacgcattatgatttccgaactacaatagttaaatttttgaaaaccaatccagcggtgatgcacagatgagataaattaaaagaaacaaaatctcgt

SEQ ID NO: 41622 - protein, 122 aa, DROSOPHILA
MYKYLFCLALIGCACADNINKDAQIRSFQNDATDAEGNYQYAYETSNGIQIQEAGNANGARGAVAYVSPEGEHISLTYTADEEGYHPVGDHLPTPPPVPAYVLRALEYIRTHPPAPAQKEQQ

SEQ ID NO: 41623 - DNA, 44362 bp, DROSOPHILA
ctcgcttgggcattgatgtagatgcgggtgcgctggtggtacgactgctgggcattacaacaactggtttaagttcggaagcatcgggattgggtatgccaggattggggattccatggttggggatgccagggttagggattccatcattaggaatgccgcggtttggaattccatgattagggattccagggttgggaataccgtgattgggaatgccaggattcgggattccatcattaggaatgccacggtttggaattccatgattagggattccaggatttggaattccatgattaggaatgccaggatttgggattccatcattaggaattccacgattcggtattccatggttagggatgccaggatttgggattccatggttagggataccagaatccgaaactgatcttgtcacccgcaccttattatcagacttcacagtaggtggcaccactacctcctggacaacatggacctttcccggcttgatctcctgcacggtggcgatctcttcccgttcctggttggtcaggatcacgggctttccattggacagcaacggcacttggatagtaatccgaccgatttctgcatttggcacaacctgcgctgtggtgaagacgaaacacagcagcactggaaagtacaaaagtcaaactcaattctgtttcaatcgaaaatgatattcaattgcccacctgcggccaagtgatattgtggcttaaacatcctgtaactttaactccaatgtcttctctgtccttcactgctgcagaacccggcttatataacgcgttcaaatcgaaaagatcttatgcaatctttcctggaaagcaaacctgttcttcgcgtcacgcttccttaataaattaaacatttatgtgcattgtcttcaaacgagtttcgccaattagtatcgcttttattttagggccagtccaaaaaaaaaaggcgggcctgtgtttataaaatattcttctttttattttgatataagttcagcgacttgcatctagtaaattacatttaaaattccatatttcgcagcatgtcattaaaccttatggacttttttgttagagttatctaagccttagtacattttttaaaacatccgtttaaggcaataaaattttgattaacgattacacatcgattatcgagttttcttggatattattatagctaaattagggttgaccgcttgagttattcagttgctaagactattagggatcgctttcgttggagctatcatgtgtcatccctaaacgtttgcacattatgtccatttaatgttgttttatatgcagagtaagattagttttatctgtgctatacattgacatatgtgtgtggattaagatataacttctgaattgataaactcctcgtgataattgctctcatttagactcacatcaaactaaaactccgtctttgtatcctgggattgtccataccataaacgcaaattttttgatagatttttgtaactacattacaggcaaactagggaagatcttttcggagagtgcaaaatatggatagaaagatttaagaagtatgcatgtgatggaaagatttgaaaaatggagcacttgtcctagcaaaaaccttcttagctgccatgacgaaattggaaatatttcctgtcaagcatcaacagttcataaaatctctttatgctatacacattcacaattagattttctggcaattatcaataaattattgggttccatttcattaataagtgaaagattttttacgacttaaaatctaacaatatttataagtaatatctttatggatcaacaacacgaactatacaaaacgcaaactagaaacgaaggaaaataaacttttacataattttggactctctttatacaaaacataatctaatcaaattaaggacttttttatcattttgacatgcaatctttgtgttctctgcgttgttttggtttaaaaatctacattaaattgttataaaataaattatgacttaagttaggcataaatacatgtatagagtgtagcttaaaaagttaacatagagtatggtttagttagtttattaattttaggtaatgttaggtggttgtgacactctgccgagtgcctagggttggtttattcttccagtagactgcactactttcgctccatgggcttgacttccagcaattgaggatagttctccacgatgttgagtagaatggtatcaatatagtgcttaagccgaacattttcatcctccttttcctggaaggcctgttgtagctgcaaaacatacattattattagtatttcgaaaaatattaaggcaacacacaaaacatggataagaaaagaatttgaaatgtttatatatacacaaatgaatgttatatagttagccaggtgataaattgtccgtaataagtttgatcgaataaaaaaaaaccaataaccaatattagttttaagtcaaattttgtttaggtcaaactgcattgcgtgcacagtggctccaaaaccgtgttttattatttgttctttttgtttgcggcttttgcgtgattgaagcattacctgacttaaggatgctaatgtggctgaatccacagaatcctgtaatacaataaatgtcaatttaaatacacatgtgggctaagataagataaatggtttttaaaataagcgcagggcagtacggacactagtaggacactttaaaactgtaggttccaaaatagcattttaatcagttttcttttgcagtgactgtgcgtgtgcttttggacttggcatctagactgtgtttttgtgggtgtgggaatgatggattggactacactaaaagcggaagcaagcgacgtaacagatggactcaaatacagacctgggcttgtgacatctcctcgagctcctgagccaaactgttgagtgttccgttcagcagatggcgaccctgctccacgccatttgtcagcatggtggcctggttggtcagcatcgtggcctgcagctcctcgttctgttcttcgagggctagtaaagaaaaaatgtgcatattgtttagttgtaagccctcaaatataatatgtttacatacttcggttcttctggcgcatctcctcgagctcctgatgcagctcctccagtcttatgctctccggcgatgtggtcggcattgcccgggctccactctcctcgcgagcacgctgcagttcccggcccagctccagcatcagctcctcggtggacttcttctcctgttcgtggcggcgcagtgcctgtgcctgctcctcgtgctcctgttgcaggacgccgatttggtcgcgcgccagctccaactgttcctcggtgcgatggaggtcattggcctgcttgtcacacaggacacgcagtcgggcggcttcttcccgcagtgccgttgcctcgatctcggtggcacggatcttcatctggcagttctcgttctgcagcgaggcttcacgctccacgcgggccaaaatctcgcggtgccgcttctgctcctctgccaaacgctcctcggcacgcagttccgactgcaagaaaagagttatgattaaatctcataatctcataaattgattgttattgggattaatcaatctgatgacattacataaatatatttttctgagcaaagtaatttagttgctttaaatttgataaatttaattactatctttctaaaaactcactcacaaactctacaaactgaatacacaaaaacaaaattattatttgtcgaagaagtttgttttgtttttcttgacctctttcatatagcgtacttcctatctaccattaactatttttttataattaaacaagtatatatttaatacttaaataaataaaactcgaatgaattattaaatacaaacctctcggtactgctcttcgagcatgtgataacgcgcctgaaggactgcatattcggtcttggtgcgggttgtccgatcctcagctatattctgtgtatctgacagatcgtccaccttgcgctgcagcagttccagctgtaaatatatagaaaaagagaactgataagtctatattccaatacaaaggttcgtgcatcgactaacacaatcttttttcatgtgccgcagatcgaggagaagatcgttcaccaactgcacctcagccatgggatatttcacatacatttgcctatatatatatatatatggtgtgcaaatgattatatatttgctgatatatcttttcacattattcaggaatgctgttttctcgcaggcttaagaaaattcaaattatttctgcatcgccgcgtagtctttgctcatttgacggccgaagcagactgttcgtttatattttctcgaagcgacaacgacaactctctgaaaatgctgttaattacactagtcaacacgctaacaaaatgttgataacaaaacttgtgcctcaaagtacaatttttcaacaaaaacattccagttgagaagcactttcgatgcttttcctcctactcatctgccatgccactttgtttgcccagtgttattggcatgccttgcccatatgaatctcataaatattaagcatacgccccataggcaggcacttcagtagaaggcgtaaaaagacacgcacacacagattgctaatgttttgcattcaagttttggccaactagttgctggcatgtgcatctgtttttgccattacagatttgcagcctgctgatttttgcgcaattactcatgacccgcccgcgtattacaaaaacgtacagggaaaataaaaacagaagttttgaacatgagttggttgcctgttgataagaaatgtgtaagatgaatgcagtacaggatgcccgagagctggcttatcacagcaaccggaaacagggtgcgttttttccgtttttaacaagttttgtgctatatgcttgcatattgtttatttgtatctttaatctattacctggttttagtgtgtaactatgaaaaatgtatctaatattgaacagcaacgcgtgactcttgatgaattaattccgtcacccttctctgattgcatccctgctacaccccacaatcgtactgcccccataaatgtcaattgagaagttcaattagtgcctacaagcggttttcatttggggtcggcaaccaatgacgctccaactgtgcggcaaagggttcaattatgcttaattaactgcaattggctttggcaactattcgcagttaataattttgctagatttacagagagtgtggcactttatattcaatcgagatgagagcactgaaaagcgatggatggatacacggacacacaatcgacgtcaaaggctgcgcggcaagtactgaaaaatgggcctagggccccaccaaaaacaaacaacagaatgccatacaaatggagaaatagccagagagtggggaatatatagagagaagaataagcttgctgagtcaaccgaaaaagtacgatatggcggggcctcaattaggggctgggtatgtgtacaatgaaccatgccaaaaaactaagcatattatatagaaactagaatttaaattaaatgtctaccgaattcttccgaaaaaaaaatacggaaaggccaagaggtagaaaaatagcaccgaaaacagaagtcgcgactcattcagaaaccgtttggtcaaagcaaagaaagtaataaaaataaaatgttgctgggggcataaagagaaaacgataaaagtgtaagacaaattgagtaacaagtgacgaggcgttgtacatagaatcatgtaagaatattatggtcgagtagcccaactataacataccccgtactttgtttatggcaaatgtcagcactgatctatacaatatatacaaaatacaatatacgaaacacgaaggattatataaaattcttaaggtacgaaatgcatattgaagcttattagaataggaatcccatctacaatttgctgttcaaaaatagtcctttaaatatgtatatgtatatgtatatgtttcctttcctttaaatatgtacttataggtgtttagtactaggtatacgaaaagtcgtaagacaacggtttctggcttgtcactttcctctttctctcgcctgaaaaaggtgttcccgaggtcattaatgcctttcggcctttttaagggcctttgatttttccagtttagttttgacaagttgatggcacgacaggtgcaactgaacgatgggaaatgtgtaatgtcaagagcggaaatacgaaacagatgttatggggtccatgaagtttggccccgaaaatatggaaaattggggaaaataaaatggaaaaagaacacggtgtttaagtttaattttgcgctattccaaaatttttaccttgcaacagtttacacgttaacagctcgtaaattaaaaaaaaaaaaaaaaactatcgaaaagaactggaagcactcgaacattaatatcggcattagctttgaccccaaatggaaaatcctaacttgcaacactcactcacaatttcctcctccaacaatacaatgccctacaattgtttcatttatcaaatgagtttccccactagtttatgtggatcaagtatggtaaacaaatctagcatccgccggaggtttatcgctattcagaagcaaaaaaaaagagctgacctccagcgcagtggtagagatacgtagaatctcggtgctcccatttgctggcccactgggaataatacgcttgataattgattgcactaaatactgggagttgcatcagtagcttagggaaagaaattttacttcactgccccaaaactagagcaatcgccttagaaaccaacgtcttccttacttttctttcgatccaaacgagcttctgttactttcgttgacacattttctcttcatggctaatcatcaattttgttacagttttttgtatcattaattttggttccgtcaactaatttctcaaaatatctatagtatttcgattttcctttcttttctcactgatgatttgtggccgatgatctcatttggcacagaatgtagtattttttgtttatcgttagcagatgtctagaaaattatatggcaaacacaacaagttcttcgactttgaaattttatttttgggccagttttgacgtttaaaaaggtaaataagtcaaggaaatcgtaaacaaagttttcgaaaaggtggaagcacttggttgctttaaaacagtttaaactctaaaattttgtataaccaatgcaaaagaaaatattcacattttaagtcttgtatttaatttgttaaatacttatttaaaaaatttcattttctttagcttagttgtattttatttgaaagtccgtacgtatgcaatgtttcaaattttaccacggaaacctctttataagcttgcataatatttatccggaatcaactcatagtttaatggaattttccatcacacaacttcaactcacttcattggtttccagcatattatttcttatttaggtaacaattgattaatatgtcaaaatcgtagtgatatttcccacagctgaacaaaacagttgaactaaggcaattcaaagttagactaaagcaaattgcattcaattgcgacttatttatagtgaatggcctggacattattgacagaccgtatatactatatagtactgtatactacttagatgtcatgacatgcgaactaaaaaacggggacgtcacacacccccaatgaaccctgaacttttggatggaattagccccggaatcgggggaattagtggtgcactgcttacttgctcattgagattatcgcaaatctctgcgctgagggcgccgttcatcatgccaacaggtcctgatccgccactgccaccacctcctcctcccccgctattggtatcctcgaaatcacagagtagtttgttcttgaaattctttaggttctccaatttgaaaccgtttgtattcgtattattcgttttattattgaatttacttgtcaggttctccaaattgtagattttattgttattattattgtttatatgattgttgttcgattcgaggctattgttgttagtctccagcttgttttcgatgaaaaccagcgaattgggctccgaattggatggcacaatgtcctcaaagtccgctggattgaggctgagaaacgtctcctgatcgatcaatattggcgggtgttttccaaagccacagtagtcacttccagcaccgccagtgactcccaaactgtaggcgttgcttagcggattttgcgaggcacttgtgttaaaactcaaattcagatcctccagactatccgtagatagttttcggttttgttgcgctccgattctgcacttgttgttgttcaaattgctattgttgttgttgttgttgctgtttttgttgctctgctgatttgtgggtcctacgaattcgaattggcccgcccacatatcataggctaaatcgatgctatcgggctggctggcaggttgactactcatgatttactttttattttatttttgggtagttttgttccttattggggcgtggcactggttggattgatgttttgttttcatatattttcgcactttgatgttttgtttctttattttgtgatttttcatttgtgtaggaagactgttttattttagttttataggcacataattcagatatttttgtattgctttgttttcatctctcaatttgactttaaggcacttttctgggcatatttaagcttggctctggctaaacaaaatatgttatacataagaattttatattgcattattctgaaaacctttgtggcattcaaattgattaatttcaatttatttaaattaggtattttatgtttttttgttttatttttaaagatcatagtttatttttcgttatttataaaactgttaaacaatagatattttaactaaagcattgttggtacagtaacaaaatctacttataaccgctgctcagcacgtcttgaggtcccatagcaatctcatttaaaaattccccttgcataattataatcaaagcaattcttcagcagatctcatccaacagattgtcccccacgaatttctttctgtatctccaaaaatgagtttcttgaactgccagcagagttcacagagtaaacaaaagaatttttcttttccccaagcagttaaatgaattatgcagaaacgtaatagttgcaaaaaaataaatagaagctttgcaaatgatttcttcttttgtatcgcgatggcctttagcactattcttaacaaattgaaaggtaattgtttgagatttggatttggataggtcccatacagagaggagagttgcagaaagcagagcaagaaattgtctgcaaacaaaagcaaagaatggtggaaaagcataaagaatttttctgtatttcatgcaggaaatgtgcgcttgcaaaaagataaacgaaacaagagaatccacgaagacagtctccacaacactggatgtcccctctgcaaaccactcttctcccaaacagagtctcattctttctacacgactgggtttggtttcttctgggcttctggctaagtttaatttcctagctgaattgatgaacttcgtgtagataaaacaaagcaatggaaagaagcgaccaaggagaggaaaaactgttggtgcatgcaattcttctgccgtaactgaaagaattgcataatctagtcagagaccgtctttgctcttcactgctgtctcttctcaagcgatgattcaatccaacgctagaaacaaacggcatgggtaaatgtgtcatgaatttgaattttctcatctttcgctaaattgtttataataaactgtatgaatcagaagagcagaacagaaacgggaattatacgaattaagatgaaaataagaaggagagcagaatatacaattctgcacactgtccaatgtcaaatgggtttaagtggcttgtcataataaattagaatttatttgttttacttttttgcttagctaagaaattggaagcatactttcacatacgaaaagaggaaacgcgacgatttaaatctttatgaattcttaaagttttaatgctctgctttttaaaaatcactttgaagaccaagaccacaaatccctcaatgaacataaatagaagtcaaaaacaacttgaccgcaagactcattgatctgtggacaattttgtcaatgaagcatggcaaacgcagaagcaacaacaacaacaataacaacaacaacaactttcaccaacaaaacttgtctagtaaacaactgaaaataacaacaacaacaagccctgtcgtaaatatcttgtgcaacttgtttcgtttcgttggaaaaattatgatgaaaattgaaagtaagtgaaatagccgcttcaataacaatttctattttcaactgcaatattttcggaattttatgcagtagcagacacgttttatgatgcatctttcatcgcctaacgctcgaaatccgaactaaaggaatgtttggagttcagctgaaatatctgagtttaaatgggggatcccataatgaatgcacacgcgctatctcgggaactattcgagtttatgcgttcccagataaagcatttatgtggagccataaagattgacttgtttagcataaatagctcacatttgtgactgaggtattagctgaggtagcaagtcatggttaagttgggatagggtggatcgtaaatagatttctggggttgctcggaaaaatatttggggaatttaaaaatcaagaagattaatgtgatcgaagcatacccataaatgaatcacaccacttccgaaattcggatgcacttactcatttatgtattctaatatacatttaagtgggtagttacttccggaccctcatcatttatgtattctaatctatatataagtggctagtttctttcgaacttttgtattcctacgaacccctagaaaacttccaatatttcaacttggcaacaaattcgtgccaattaccccgtctaacctcgatttcttggcctggtgttgcagtttgcatttgcaattatttcttctgttgttgcattttacatggcaataaacctttcggacgaccgcccacgctaagacaaagaactaaaaggtgaaactgaaacaacatgctaaccccattttacagactggggaaaacgacaaggagggctagagacgaagggaaagagacaaaagtcgcgacatacaacagctgtttcctgccacaaactgatctaccacaaattgtttttaccttccattattattgcattggtataagaaatattaaaaaaaaaataagaagattacacagataaaagcattcttttttctggcattaagtgtgctagtcacagtatacattatataagccaaccctctctttacttcttcttttttttttagaaccaacagaccgtaaaattattttgttcagactttgagcagaattctagacaattttacatatcctcgtcgtacagctattttccaacctctccctattttcattgttattttgttcctcaggttttgaattcccgcctagtttctaattaccagaaaatgcaatggctggctaagtttgcttttcttttacttggaatttgtggcgtgctgtttacttttgtagtctagtaaactgaatcattcttagtcttatcaaatcgttcggcgacgtgtatagttaaggtgcccttgtcaaagcttcattttcacgttatcacatacaaatttaaataaaggtcaatatgagggccaattaaaagcagggcatgactgataaagattttactttttaaagaactttatttgctttgaatgattccaagttgatttacgaaataagcattcaaataaataaaatacaactttattacaaatgatttggaaacccttatcaaaatacaatccaattccttcaatacaagtacagtaagtaaccgaataatctgatttcaattcaactaaaactaatttgctaatgaagtaaactttcctttcttgtcagctgaatatttttggattatcatatctcttcaaccattttttcctcgcccatgtcaggcaatcaaaaacagcataatagaaaattatcattagctactcttcagcaaaattgaattccacaaagatttgcatacaatggtcgacgaaggaaggggtgaaaatggggatgagtcgaacgaggggagctcattaaatgcaaattttacttcgctgctgtgcacttttcatgcaacaaagtgaagtgaacaagttacaacaaaaaggttgtaaaatatacaatgattagccgaaattggatcaggaatgctgagtaccacataaaatattcatgatttcaaacaaatgtatatttaaagactttgcatcaattatatgggaatcatatacataagaacttgaaaaaaaattgtcattgattatttttaatgtactattatgtattctataactttcttgaaagcttttgcttaaaagaaccaaaaactaatgatgcaatcctttaaaatatttttaattttcctgccgattttatgatcttcaataatctgtgccgcgatctcacaaatatttttcaattttaaaagtgaatagctaattttttcgattatttaaaatggtgtattatgtattttattacaaccacaatcgagggagaaaaacaaatttcgattaaagcacgcgaaacgcgaaaagcaaactgaatgaaccagaaattcaggggcaaaataaaccgaggcagtcgccagcgatagagagaaaaatgagagactgggagagcgaatttggggaggcgcaatctttataaataggaaaaaataataatcaacaaacaagagcaatgacaagggaccgaagaaagagagcgatccgatcccccaaaggaaaagtttttcgccatatgtccgagggtgattctctcgccgaatccgcccgcctcctttattttgaacatatggtttttgagtcagggacagcgcataattatgtggaatttatatacggtcaccccaagccaaccgctcccaaaatgcctcccatcatatgttcatatatgcatacatacgtatgtatgtatatgttttactcattactaaataaaagcgcaagtgaataagcgtggacacgaaccgaaaagcaagagtaacgggacgcatgcgggattggatggtaatctccatccatttcgtcccatctctttcgtacaccccctttttgttgatgtcatcagagggtcttttccgttcttttgttattgcggctaccttaggccttttacttattggtttttagtgctagttttcagttccggttagttgtcttctgtgctgttagggcactgtgccgttagatttatatgcctactaattgacgaaccatcgctaatgaaagaatattttcctaccaaacttaacggtacggaaaatgcctagtaaaagaaattaagaagtacgagttatgtataatgaatgaacttggaactgctatgcgttattctcggtggaagcccttgatttatttaattccctttgaatgtagaaactgccgaaagcaatgaaaacaagacttgatttttaaagaggcaatattattttttttttttcatcttcctaagtttactaaactttttaagaaaatacttaaacttgtctccattaataataaaaaaaatcaacacaaaaagcacaattaatttacattgtgccggttttgcaaatttgatcaccttatctttcttcgttttacttcatcaattaccgtcagtgttttttcaacttttaacgccccataacgaagaattgctttgaattgtttaaagctattttattttttctttcattttgtcccatttattgtatcatttatcaattttatgccacacttgatttccattttttatgtttcgataaaacacttggcaaactgattcaaccgcacttttcaatttaagatcaatcaaccaatatatttgccagagggtatgaaaattagaaacatgagccgaacaaggctactttgattacgggttttcacaacagaccctgtcattaacgaatttgttttgatttcacatttttccttaaataagcggttaatgagccaaaggcacctgacacagctgataagcgaattcgatcgataataggtaacacacaaaaaacacacgaattgaggtaactttgggttaattttctcgaatttcgaaccttttttaatttggctattttgcttaggagagcagcagcagcagctgcattttccttttccttggcaattgcattgcccaacaacaaaacacccgcgcgagagagcgcgagagagtgagagacagggcgaccgttcgatgcgctgctccgcttttctagtgttgtgaacgcggcaagcgttaaatgcaatctgagagaggaaagcgctgaaaagccagcgccaagtcgcggcccctcctctgccgctgcctcggtcgacgtcggcagaagccgcgacttgttttgggtgcccgaaaaaataacgaaaagaaatacaaaaaaacagagccccaaagcaaaacgaacgcaatagaaaaattccactaatgtgacttagcagtgttggaaattcgtattacatgcacttgagaaaagaaaattttgtttgctgagtggcttatatgcacatacacatatacacattgtataacatagttagccaggtgtttttaggtttgaaaagaaatactaacttccaaatataatatttgtttaaacaaaacttatattgcagaatatatttaaaaaataatggattcaatttgagtttttgaatgtatttagtaaagtgcactttaccaaacatatacatatgtattactggtggttaattcttttttttcatcagtgtatgtgacttaatagacatttgcaaagtgcattcgggtaaagtggatagaatggcttgagggaaaggtgatgggagacagaatgagaatcgagtggaaagaatcaaaagcgacatatgtgagcaactcttgaactaaattgagtcaattaaaagtaatggaaagaaaaatcaaaggaaaatgagtcagggaactgggctgttcagggtgcaccggattattcaacgaattggtctgaaatgcgtaacatatgagagcgatgtaaatagttgaaccgacaaaatacatttttttgcacccccttttattttgcaaagttttcttgaaaagtataatttcagtgtaatagtgtaaatgtgtgattgacagcactattatgtattgacacccttcagagggctccgcagtcttcgataattactttcttgctggtcttcccatcttgtgaaccgtaagattctaccttctggacgatatccattccctcaacgaccttgccgaacacgacatgcttattatccagccatgtggttttcccggtgcaaatgaaaaactgagatccattggtattggccccagcattggccatcgaaagtacaccagctccggtatgctttagctcgaaattctcatcgggaaacttgtttccataaatggagcgtcctccagttccgttttgattagtgaaatcaccgccctgacacatgaaattcgggatgacgcggtggaatggtgatcccttgtagccgtaccccttctctccggtgcagagggcccggaaattctccgccgtcttgggcaccacatccgaacgtagttccatcacaattctacctaacttctcacctcctgcggctatatcgaagtaaacgcgtggcaacgacatcttcgcagatgccgaaaattttcggagaaaagccagatctattaggtttaaaatcgaacgatgccttgttcaaaaacaagaaatatatttaccggataacttggtggtgtcagctttatgataaaaaaaagtaacgactttcaagagaaccgtacagtagaacagctggaactgaactgacgaatattctgggctagtcagggatctgaagtaagggctcgttgaaattcatttcacagccttctttataaaatccagtagcaaaaaaaaatgcctgctttggcttccacaatttttaatacattgcaaatgatcggtatatttggatattttaaggtaatattgtccttaaaatacctttatccgtgtctaatcttacagaccttatttactcttctaatttgtttaaccgccgccttaatcaacgcaaaactcacagatacttttaaagccggctatatttacctttcatttgcagttgtgtacaaactttatatatccatccacgcgatgagtgtatgtttgtataattaggcaaaaaaaatagtcaatatttatttgccaaagcaaatacaaactgtgagaattatccacgttttaaagaagctgctattgcatttatatttattcatttgtttgttgtctatatgaacgcatagcactcctttaaaactcttctatccccgacttctttgggtttagcacattttgtgtatatattaaagtccagggcctagtgagtttccaagacaacaattgctatttgggtatacatatacataagaattgttataaggggaaaataaaggaaggttgaagtacgataagattggctagtaaccgagaacgttgtaaacacaatgttcgataaagtaggtttggcatatttaataagttgcacggactttccctttataagctttataatcattttttatgtatttttcgctcataaataaaaataaaaattaaaaacaagctacttcaagacccttagataatctcccctcaaaatgccaaaagttcaagatgatttaacgaaagaaggttattcgcacgtaggtcgtaattgttaactcgactctccactgtctcattacttataataaattgtagtgcgaccgaatagcgaagacaagaaagatacaatccatagttggccaagacaagtgtagccccaactgaactcgaactcgaaaccgattcgattcgttttgactagttacccattaatgtaacgccccgttcgccttggacaaccttgtgcaaaaagtaatatacggaaagccaacatgacgtaatggaaagcgtaggatttctacttgccaactgctcccactgccacgcccccagaaataggcgcctcttttatggacttgcgagtgtatgagtgtgtgtgggaacataaattcacattatggccaattcttcgggcgatttttcagcttagataaaaggtagacaagaaacacttttgtgggttcgttttagcacttaccaagtggaattggtaagataagagtgctcgaggtagtttgtgtttagctattgttttgcttacctggaaataaaggaaaataaagaacaaattattattagatttggaatagcagaagtcaagataatagatatggaaatgaggtgaatgtaaagtcaacacaagaagcactttaatgtcaagcaatgtttttcacaggatgtacaagacaaaggggaagaagaaagaacccaaaaacaactaacctcacacaaactgttacacttttcccaaaaactttaataccagttttatcgtaaaaaatataacaaaagccctaagaaatattttcatattttccaactatcgccgatcgatccatcaactgaaaacctgcaacgaaaaacgttttccgcacccacactctataaaaaaaaaccactgaaaatggattttgtctagcggttcgtgccattcgttccattcgccacctgctagggtcgtcttatcgattaaacaattttgctggcacctttgacgcccacctttaagaccatcagaagtcgaggcccggcacaacataaaaagcataaagccgagccgaatgagatatgtagggaaaatacaaaaataatacgaaaaaaaatcgagtaaaagccataaacgaaaatcaatttttaacccaaatgtgacgttgacccagaaaccatcgaaatcccaaagacaaagagacccacacacacaacgaattgaagcataaacgttgcaattatcataattaatgcaaatgctccttaaagtataccaaagtaaaaacggaattaaatactcaaaggcatttacgaaagcgtttaacccaaatgggttgaaattgctgctattgaatagatgttgcaagtccataagggggaggttaattggtcggaatgacagagaaattggtttgcttagtcataacatcttgggagtgtaatgttaatgttttaaaaacagtttacaaagtttgggaaatatttttgttcacctttagaatcataaatcatcttgtagaccataatatacatatataataccagtaagtaagccgatgttcaataaattcaaatgttgatttctttccagcgcactttgaatatatttgtttccttcctgctgactgaagcttcatttgtattccatttactatatttatgcattctattagccagacacctggtggaagtttttttgtaaaggcgatgccttgtaggtggctgtttccagtcgacgccttcgtcgatgttgtgcgaagatatatgcacatgtgtatattgccactggaagagccaaagccggggggagatattcaattcgagcgattaccaaatcctaaacattttgcttgggcaacttcaagtgatgtcgtcagcggagatactccacttgtgcatgtattaggccaagaaaataaaacagatttcatccccacatctcttgccaacactgacaattgaacaaattgcaattgtggcattgtcttgggcctgcctacagttataattgcataagtgcgacgatgcaaaacagctgcaaagagcccgagacaaatgcagattttaatcaacctctgacagcgctgggaaaactgggaagaccatgtcaagatccccccatcccgaaaccttacgcaacaccttcggttcaatccaatgcgattcttttcttccgcattagattgtctgatgagtgacctcagcttaattaagccaacggagcattaaaaaaaatgatggtcggggtgcggaaaattgggtcagcagtagtgaaagaagaaccaaatagaaaatcgtattcggtgcagtgaaaatctttttggatacgcttaacactttcctgggcatcgggccaaggtgagatgtggaaagtttcttcatttttcacaatccacttttacatagaagttaagattgaatattaagacagaatgggatataattactacttttatattgctgtttaggtaactgaaatgtattttgaaatcaaacgagcgaattaatatttcaatccaatgtacagttgatgccaaaaacattctccttcttaataagccatctgcttttcccaactcgcaactcatttcgtattcaacgcccagtttcacacaacaatcaaacgaattgcgaggcacttctttgacttgtaatgatcttttggcccaactccacctgtttcgcacctggccaaaaacccttccctcttctacaaataccacttccgtttcccgttggactgtgttgcataaaagaacaatcgcacaggcgcgtttaaaaaattgattcgtacgtgagatttttcgcaaaaatcattttcactccttgtgtttatatttctcctttgttttttcctctgcgcttttccacctttccttttgtgtgccggcgacttttaccacgttcattctccttttatttgtttattttgagcaattatgcagaaagcgattttacaccggtctgtatcaccattatatgtttgcacttctagcaattgattttattttgcttgctttcttttaggaaatcttaagggtttcaatgataggaaagaaagtttttgttagaaaaaaataacttggattggattttggtattgaaactttcataaaaggtaaacaaattatttatttatattaacgtaaactgcagaaaagtaaacatattaaacatgcataagctttgtactcaaataagcacatatccattacagaagtcgatgaaaaccacacacgtattgaacgcttcctcatatatgtacatatgtgtgtatttctttctgacgtttcccacaaggaaaatcgaaaataaaccctgcagccatcgatgatttcccgacctctttggcactcaatcaaataagcatccacatgggcagtgggaaatctaatcgacattgatccggcggaggctgagtgaatttcaatgaccttgaggcgccaatgcactccccccaatggccatggccaaaattgcagagagcctgctgaaatgcttttgctttttttcgctttatataatagtcggcggagcacaatcggattggatccgcagagatcgcgatagacaacggcaacctacacaaaaccaaagcactgaatttcacctgccaagtagccacgaacttccagtaaaaataccagcgaaggtgactgcctcagcgattgagggaaagaaaacacgtttgatttcattgcggccgaagatccaaagtgaaaagtcacaaattcacttttccagggatttcggttttttattttctcaacgaacatggaaaacattttcggaatttcgacttgaatgaaaatgatgttcaagctcacacacatgctgggaaataaaatttgcgattgcgaattaggttcaagtgcagattatgtctcttcatcagtaatttctctgatgaaatatcaagcattgacaatattttgccaattcatacgacggtacatttatttatttattccgttattttacgccatttaatgcaaagactttgaaatcgaattgtgcaaacaaaatgtgtcaaaagccgcggaatctatctatttgaatttatgttttaacgatacctaattatctaaactaaggaatccaaaacatagtaatacttgggttttatttaattataataattattggtgctttgtttaattggcacacttaccctataatcgtagtcatgacgattctccaagcttatgtcgctgtacatgtcttctgttgtatcacagttggagctacggcccgatgagttaaagctcgatgatctatagagttggctaaaaggagttgaatttgtaagtaattaaatcaaataatttttatatttagttttaactgtttattaaatttttaaagtcacattatattgatatatatatctgtgtctgtatatctctaaactttcaattttgttctagttagtgttatttttaaaacataacaaaaaaaataaaaaaaaaaaagttaaaacaatccattggacgaattcgccttagaattcgattaataccgtttcgaattcgcctcggtgtaatacatttttacttgacaatgtaaatgaaaatgtatataaattggtgcaagtctctaatatttccatcacatacagcaaaaaacttaaacaatgccaaaagacaaaaacgaaacatttacaacttaaaaagaaatttaaattaatttaaatttaattttagctatctttttaagttataatatagaatcttgcatttctttccgcaaactgagatataaagatttagccaagacattaaccaactaaacaattgatctcaaactgtagcacaatgttagcacacaatgcgaattcaatatgtgcggcatacttgccggctgcgaatgggcactgtaagcgacttctgtttcagtgctgtcaaaatttaacgcaaccagtgctgcccatgtgacattgtgagcccagcatgtaaaatgtaaaatttacataaactaaaaagagtctgtataaaacatcttaaaagttttaagattttaatgtttttcgtacagcaaaatatcattttcttgctgtattggaaaaaactccacaaaaaaactaatcataaaatcgtgtttataatatttcttggtaatgttataaataagtagcgaactcacctggctaaggcatttgaactaatttgcctgcggccggaactgaaaacggaaaataaaccattgattagtaaataaaaacatactttccgcactctaccaacaaaccaccaaaccactaagaatagataaatgcaaatttaaccctaagcctaagcgagccgcaacccatagaagcccttcaaaatggatgaaattccagcaattcgaaatgcaaataaattggctggcattgaatggccaacaaaaaagaaattatccacaaaaggcaacttgaataacaacttgacgcaggcagccaaacaaaaggaaaaagaaaccaaacacgtgataatgaaggaaacaacacaaccaatggtagcagccaaaatacaacaaaaactgcgccacccacgcgaacaggtaaaaagaaaatgggaaaagtcgaaatgcagccaagaaattgtagcagcaaagaaacgtcaaagacaaaataattgcgaaagatgttgatgtagacagataaagagactcaaaagacacaaagaagcagacgactaaatttcgagtaaaagtggaaaagtgggggaaaatgtgtgtgtttgtctaaagtgcatatcgggaaaatgggtcaaaggtgggagacattttgcaactacagatgagcagatgaaagccaaatgaaggagaaagaaatgccggaaaagtgtcttcatttatttgtatgcttttgctgaaaggctttttaaataaatattcagtagggatacttgagttgttgcatattaacaaaatattatacgcgtatagaaaaagactcgcttaaaattaaaaacaaaattatgcacagttttatttttaccaacacataaaatacccatcaaactataacatcacttgcaattgttagtattttgttctctttatgggctaaaaaaaaaaaattttgcggtttctatctgaggtgatctcacatggcaaattcatggaatatatttgtattttagtgaggccgtgcccttaaaaccgtggatttaaaaaccgcaaatagtttccgttttggaaaattgaaaacaagatattaagcaaaatttgcaaagccagaaaagtttgcaaacaaaacgttagttattccacttttttattcgactctttctgtctcactgcggccccaactgaactcattagcccacttttcagtgtagttgagctcaaaaaaaaaaaaaaaaaaaaaaaaaaccaataagacattcataaaaatctatctcatctgggtttatggcactctacgaacacaactttattttatgttttaatttactttatgtaaaaagcaaacatacaaattgaagttgcgtgctcgtagaaaatgcaaaaaaaaaaaaaaatcgaaaaacaagccagcaaattattgcaaattgaccagagccaaaaagtgttgaggggacctgctgcaaaatgttgcgcaatttttgcagccaaaaagcagaagcagaaaatgcaaaaaaaaaaaggaatttgcggttagttgaatagccgctttttatgagtcattggtccggctggcaatttattgatgcaaagtgaagttgacataaagtggcagccaaaaagttgcaactttatactcgtcgagcaaaagttgtattttactggtgctattcacaaaataatgaataaatgagaactaaagaattaagatacgtacttaatctgagaaaatcaagaaaaactggtggattaaatatatgtattagcataacagatttcattgattataaccttggaaattggcaaaattacagtcgactgttttattatgtgatgcaaaagcaattaaactacagcattaaaaatgaaaaattcagcgataaaacataaacttgtataacgcaaacaactttttttttttgttaatttgttgtttcctcacattaaagccaacgaaaagtccacataaaacaagccagaaaaagaaaataagctatcaaaaaatgacagttaagtgtagacaaaaaacgatcaaggtaatggcatgtaatctctatagcaaccaaaaaataaaaaaaaatgtttaaatatgattaaggtcgttggcagtattctgaggagtgttgatcaaaggggagtggagtctgaattactgaatcagttttcggcatttgggtaaccttgaatttcggagagggagtgctggaaaatttcaatgaaattcgagactttgaccggaaatcatgcagcggttttcctttgtactcatttgaactctttcatcgttttgggttctttttacgattctttgcatgtttccaaagataataaatcaaaagagacaatatgaatgttcaaataaattatggttaggtaaaaatggtcaatgcattttggcaaacacctgttgaatactaaagtctaccgcttctaagcatttatttttacgtttttaccaattactactgattgcatgctcatttccctgaccaccccccaccacccctcatttattctattccctctcgcaatgcgtttcgcttcgttgacctttgcgaggggtcacctgaataggatgggagtggggtaggcacgaaaatcggagtgggagctttgcaaaggtatttcaattgttatttagaatgatttgcagtcataaccaaatgtaaatatatatatatttgtttatgtaattttccacaggtattcgttggcctatgtagattgtataatcagcaacaagtggaatgtaatggtaaaaaggctgtactatagaattaaaactcctatttagaatttataactattaaatgcatatatagcacattgagtgcaaggtagattaacgtttaagatgtaattaaattttcataaagtaaacttcagtaagtttttgtaagacgtaaaaataagcgaaacatgagtgtaagcactttaaaagtaactaataactagtaatattcattttttaaatatctcgagttgatgacagagcgtctctcacacgaagatggcaaaaaagcggttcagttaaattcacttaactaccttgaggtacgtcacttgcagcttttagcaagaaattgttaattgaatgcagggaaagcccccctctcctcatcgtaagtcacctgacaaagggactcgtctcataacgagttaactctttacacagaagtggcaaccagtttaacgtatgtacatacatatgtatatacttgttacgaggctcgacgcaaattaaagtaaaagtccaacttgaatgatctcaagtctgagggccttccgaaattaaataatcaactaagttaaggtggcaaaagtttcttgaactttactacttaaaattcaaaacaataacagaaaaacagacaatgaatacccgtcaagtttgtgtgtttactgccattatcccctcgagtttcttccattttcagtatttctctttgttttccctgtctttctttagtgcaatttatgtctcatattttcgcgccaatcctcaaagcacgtcaatcaatcacgatcggattatgcaaaaataaaaaaacaaaaaggaaaaggcaaacaaaaacagggtaaaaataagttagacaaacacctgtccccgtcaggtgagattgacccacataatctggcggaagctttattttggcctgcccaaatcaagttttctattgcagaaattattgttcacggcgaaacgcctcaatgcacagtggttttgtgattcggacttactgttactgttactatttcagcagtcttgccaaagggtgaagcacaccttgcccactcacctggccacgcccctccgccacttcagcctgaaaaccgctcattaagcgcctgggaagttcagctaattgaaactattaaaaacaactattttttcggcaccctagaccggtttttcttacgagagtatctggtttcttttcagatttttgtggataattaaattatggaaagaggaggtaaggtattcattaaagttccacagagccagagaaagggcggcaatataaaaagatttcggaaggagatagttaaaaaaaaaaaggaattataataatacgtaggttatgtctattttctaattatttaagtaataaatataaaaacactaagaaaatcagaattcataaattaatacactcattggtagtattgttgaaacccaaaaattgtcccaaatagtttttccgacttacaaaaaacttttacccaaactatttcgttgtgcttcagttattttcttcagaagcgttaaagaaacaactgggggtcaagaaatgtcgcgattgttgcgatttccaaagaaataatgccgttgagtcacagaaaatataaagtagaaatgtgcgtcttttgttaccggacaagtgaaagtatttatggacatgtgggcgtcggcttctccggctaacttgtggtgggcgtggctcggtggctttcttgagaattaaatatggatatcgcaaacaatatgaattaagctaagtgcaacagtaacaacaagttggtgaaggatttcgaattctagtaaggggtttaatacgcacatgtctctcaaatgactgcgacggcggtcatagggaaaatactcaaaatattcatcatccatttaggtgagatctgttttcgttaactgaattgtttatttagatgtttatctttgatcgttgggttagctcacttggttatcagttttaaatgccattggccgcattgtgaacgtcattgacattaatatgttgatttaaaccgataacgtaaactttattatctttttgataagattaaaagcttgaattcctttgcttattttatttgtgtgttacaacaatattaacagctctttatgattaaaggcaatacaaagttggtaaatcaattaggaacttgtatgtaaaacgtgcaaaaatctggtgaatttaacatttttccaagaccctccacgatgtatgactatttacactggtgcaccagatgtttgcacctccattaacttcacttttgatttggtttatgagccgttcagcaaattgttagctcgttatttgccacaaaaaggaaattttcattcgagaaaacgcactcgcactcatcatcggcaaattagacacactttcgcaattgacggatccgccagccacacttcacttttcattacgagtcttctcaagccgaacatccaagccaagccgcaatttttgcactcgatgagcggatgagatggttaatatttagccaacacgctgctggaaatcgctctgataacgtcgttaaacgctctctgccagcgaaatcgaaaacgaacacaaactcaaaaatcgaaaagaaagaaaattgcagccaaactgcactctcgactgcactgaccaactaacaatgaaatcgtacagccgcgaacgggcagcatttatatggctgctcttcggataattaaggcgatataaaactgattcgattttgattgatgactctcgacaatgcgagtgtagaaaagggatgaaacgctatagagcccagttgaagatgatgcgatgagtgtggcaatagatggaaacgaaagcactttaaaaagtcgattactcttttagatctaaacgcaatctagagattcggttgattggccatgtcgttactgcttataaaaggtgttgaaataagtgtgtaatgttaaaggaaatgattaaaacatatactttattagaaagctaaagttcaaattactttaaaatgttatttattttgtaaaagaatacgcagctttaaacattaacttgtgtatgcaatattttaataactttctcacaatttaaaattcaaatgatccaacataactaacaccagttctgagttgtttatcaatattttagtatgctttaggaattatcaaacacgctcttggaggttttttattcttttttcgtggaaaactttgtggttaacaaataattggattttcaataagaactgttttggtagtacactcaaaataagataaaaatcgttattttaattcatgtaatagtttatttataaagcactttcagaaatgaatgaaagtctattcgaattggaataccacctgtgtatcaaaccctacactttaatacattctgaacaacctctttttttacccgtctgtgtacaaatgggccttaatctggatgaatgcatgggaaaagtgcagcacaaaagggcgtgggcccgtggaaaccccgggaaaagtcacgtgcaaaagacgagacacacatgtcgaagaagatggagatgaggacaacgcacgagaagacggcgaagaccctccgattttgcatgggaatgtgcagtatatagccaaagactgcgcttgttattgtggctattatgatggtagttggacgtcattaaggcgtgacgccgtaaattaccaaagtgtaaactacagcacaaaactatgtacgaaatctcataaaagcgcgcagctcgaattaaaaacgttttctattccgtggaaagcgaaatttatagccaaaaacaaaaccgacaaaaaaaaacacaattaaatctatttgcacaaacgtttcgcatacgccgcgttgtctggtgcgcccaaaaatcatatgtatgctatatacacatttgtatataaacaaatgccacacacacacacacacactttcacatactttggttttctcaatggatgcggcggaattttgtatgatttttattcggttttacaccggaacacaagtcacagactctcgggcgattaataaataatcaaatcaggccaaaaaaggacgacacaaatttcctgacatccgcacgcggttacagcgatgttcgaactaaaaccgaataccacattccgacttttgagccgcctgctccaatctaaaggcgaccagcaaacaggttcgatgcgagagagccaactagccaaataataaacaaaacggaaaagcaggccaaaagagcgaacaagtgtgtgtgggagagggctaaaaccattgttgcagttcgaacttgccagacagactaaaataattacacagcgagtgtgaacttacaaatgtcaatcatttgtgacataaaaaaatataattataatgaaaatggagaaatatatttgcttattcctaagagaaaatggtagaatatttataatttatatatttaataacataatttctaattctaatcatcttcattcaaattcctcttctttcagcattcaataatacgatttcacatatatcaataaatatattcttttcttaaaataatatactaaaaaataatattttaagataacatttcaatactgttaaatatttaatttactattctttgttgccacctaagtcaacatttatagtctcattagtaatgttgaaaggtctttgatgatggtactgtttttcttttttatctggcaactcttttacaatcccatacactttcccatgcaacttgtttgctgccaacatgttgttcggcgatactaaaaactaaaactatgcaacatctacaaatctggccaacaataaacattctcatgtacctattagatagatggcaattacctaaaaccgaagccaaattggcgacagacgtactttcaagccgttttcagctgccaaataattcaaatacatgcagggggaaaaaaacgggaaattgtcgccaggtctgccaaatagccaagaaatgcaagccaactgccaaacaatgttgggcccccgcaaagtggcttggaaactgcctcgattaggcagccggccacctttaaggctaattgagggccaaccacgtagacttgggaactatgcacgggaaaacagagatacacaatgaaataggtgaaaattaccacgaaagacaattggaaatcacttaaagccaaaacgcttgcgaaggcaagatgtcaaggttggcatagggctataatgaattacgatcacaacaagttttatacaaatcactatgaatggtttattacaaattcgagcactacaattttaatgaaatttcaatatgaaaattcctgaaaatagatctagagcttccatcccgttttcgtgtttgaaggagatgaccgtttacgcatatttctattttccacggatacattattttcagctataatcttcgtgggtttcgctatattaatgtgcttggtctcatctttggctggttttccctgatctgttagagcaaatcgcaccctattttttactacggaatcttctcgaggttcggcgtctggaatcacaggctccggtttattttcttctcgtactagcgctttagtttcactaattttgtcgaattctggggggaaaggatcaaagatttctttaaattctgaaagtttgtcatcatttgcgttggactctggttcatccaagtaattaatattactcctaatatcatcagaaatcgctagcggcggcttgggtattacggtcgaatttagggcttcttgcagcatggccatatccttggttacaaacttaacacgttttctcagtgactcaatctccgacataggcacctagaacaaaaccctattaagccccttctactgtacgttttcccccccctttaacttacatcgttccatttgtgtttgaatcttttaaatacaagtaagaggagtacgataaggacaatcgtaagaatcaccaggtaagttggtgatctttccaataccagaagtttcaacaaatcaatgcctttaagagtaaaccaacaagccgatggccaagaattgcaatacggcgatatctttaccgatgtttccaaatcaactttctgacgatagttccacattttgggcctgactttttgttagtttctatctgtaatttaggttgtattaaaacggataaccaaccggtgatgttatcacttttataatgtgatttgaaaagtattttctttgcttgctagactgaattcaaatgacaacatttaaaatgttcctatgtggaaaaatattcgttcttttaaagaaaataattgtagaattccactcattccctttcctttttcagataaaaatctttaacctcttcccacaattttccctaattgttctcggttctttaatgcattttcccccaccatttcccagtgcagcttttttgaatgccaagtgcagagagtgggaaaaacatgttcccagcagcggagcaaaaacaaaggcatttgcatgacaaattcaagtcggcccaagttgtagttgcttcgaaaagagtagaagccatgggaagaacatcaaggtccggaaagttgacagagcaaccacaatttatagcctgcgtggggttaactgatttgcacacgccttaaatgcagacgattttaattactttatccgatttcgtgcataattttcgaagaaatgtttatgaaaaaaatttgtttaataattgaaatgctaatcgatattgatcgatgctctagtaatgatctaactattacagccttagtttaatgatcaaaatgatcaaaagtatataacagtacataacgatacgagataaatgtgtcagaatcgataacatcagcagactgagttttattttgggtcaaattttgttcgcgacttgacaaaagtgccggcctaaattctgaagagttaacaattgcggcaagttaaacctgtttctggaaccctctcacttcacttcctccgatcggatgagcgaaaaaataaattccaacagcatgacaaccccatcgagtcagccaacttgtaagccacatcaagagggaaggagttggctaaattgaggggagacaagaaaagacccgcatcttctaccttcaaccttttcgctcggtccccgagaaaagttcacaaaagcggccaaactacttttggctcaagaagatggcagcaggaagcacggtcgccagttgacaagcagaactgccaaaggaagttatataaattgcagcagattccatcttggagctctctcattgtactaacataaatctcatgctgttaatctgatatatttattttactttcgttttggtttcagttgcaattaagtcccagaaaagagagcaatttttttttcggttgtaacttttatgacagcctcccccgccggcaataatcataaattttagtttttgggggtggcagcgttaggaaagctcttgaaaattgcccaattgaacatctatgtagttgtacaacaattgaaacaggcgaataagatgggaaaaactgataactaatttaggcagaagaaaaacaagcaattgagcaaaccagctaatggaaaattgggaaaaaaaccaaaggcaacttatagctgaaattaacaatcttagataagcgaagtcatggaaacgcttgtgaaaacatcaaatgtgatgaggacaaatactgaattaaaaactatatatatatattttttaaggagcagtgcaccaataatttttttaattaagataaattataaatatttttatttacaaatcaaaaaaccaaaaccaaaatggagcaagaatgggggttatgatttatatgaagctctacatgaaaccccgaaagaaattatattcaagggtgcttactgtctcatggatccccaacgacgctgggataaactatcaggattgctgtaagaaaaatttttatcaattgggatatctaataatagtcttattcggttcagttttaaccgcaatagaaacatagcaatatagcaatctttctaatcatcttattttcttttatataagttcatatatagaatgaaatttacgcctaattttccaaatatttatataggcagttatttagaattatttaaaattgccaatataattatataaaattgttatttaaataaatgatttattctagctataactaggtaacactcatcactgtataatttaagagaattgttgcactctcttacgatcagttgaactgtgaattcaccacggctatggcaacttgttgaacaaaggcggaaatagagtaaaagagacggcggaacacgaccagaaagagaggcacgatcgctgagttgtgagagattccgagacccgaagacagagacacgcatgaatcacggcccaaagcgattcatgagcccaagtcagagcatagaaaaaactggtttcagtctgtgtatgcatttttcatgccacacatacatgcgttgaaaccaacagacacaggtttacacaaagaaaaggttaactattcaaatacgctttttttatgctgcctcggacagacaaattgagagttttgaattgatgaagtctctgggcctggtcagctttattttatattcacggctattacgtattcagctggattatgtgcgcaaccttataaatgcccgacaactaagcaaattcgcattcgcttcgattgccattttaagagatgtgatccgatcaaaatgggcgagattacctggtgggagttcgtcgcagactgcgcctggcccaattatcccggggcattatgtttagttcgtcatcactgcaacaatcgaaatcgagttagtaaatgctcatcagttgtgacaatggaaatacacaaggcgtttcagtgtcagttagtttaaaagattaattgacagtaatcaagaggtaattccgcaagactaatgttctttgctttacaggagttacatatttatatgcaataaattcattaacagtttatagaacaactgtgttcatatacataagtatatattttgaatttatcgcaatgttaaatggatatgacacttttgaaacgcactatataaatgtttcaaaaacttactcttgaggtgttgatgagccgacgtgtggagccaaatcgagttcgacgccagtgctgccatttaggttgttatttccatcgttcgagtgtccactgtggttgtgtccactgttgttgcccacgctgatattagaattattgttaatatgattgctcatattatggctcccattggaattggagctgcgggcttcgcgaagttgggtgggatactcattttcgccatatccctcaaaggattcgccatccgaaagggaagaacactgagatttggcaacgcctgctgaagtttaaaacataatttcgttagtaagctaatctatgtattattttaatgttatccatacctgtactggatggcggactgctgggggtgggactactgtcgccggacattgtttccgcaaagagaaaatcatttgtgctagcctttatggaagaatttccattgggtaactgaattcggggcattggtgccatgtttggtggaaagcttactgcagctgcaaaaggaatacaaaatttaagatattaaatttgttgtgtgcgaagtttatatagatgttcaattggctacagacatgacatgcaggtcaataggtcaaagtgccaacaaaaaatcacatgcaattgctgaaagttttgcaaaagcgcaaaaaacgagcccatcaatacattacttattgattggaaaacctatcgagaaagcacgtctaagctgcctagagcacttagtaaattgaaaattttcgaagccctttgagattcttcgaaaagaaataacacaaaatctacttaattcctcttcaaagtatcagcataaactatgtgctaaacaaatatttgtagtatactaattacactttccttgccaaccaaaaatgcctgttcaggaacaaacttcaacaggtgtgtttctccgtttccggaaaaaggaaaatgaaaattatcagcccaaaacgtcattagctaaatgggtcgaggtttttcagcggacattacttcccttcctggctggtcacttgcattactacccgctttcccctttccatcaattacccaaaactttgaggcatgactaagggcctaagtacttttatagaagtccctcgatctaagcgtgagtaattacgtatatttcttttttaattggtcgtggctctgccttgccaacatattcgttttcctttcccattttcacgctttcgtttcttttgggcattgtcaccaaatatcggtgggcgtttaaggggggcagatgtagttggagtacaaaaacctataaataccgtgagtacaattgctcgagctcgattgtctgattgattgatatgtcagggccgttagttgtagaaagccgaattgggtcaacttttgttttgggaattaggcaaaattataggaacaaataaatagatatgttcaatgattagggttaagaaaaacgcaaacctatccaacatatgcaatattaatttaaaaaaatatatatttcacaagtaataatatttactgggtagtgatgttgttgttggtagtattcagaattaaaaaaatcatttcgtaactaatttaaaatattttaaattgtgttttttttaagacttaacctttctttgccaatttcacttttttaatccaaattacatgtaccaacatagacaacccatcaatttcataataaactaaccataaacttgtgattaaatatcgattgcttggttaattcgatgcaaaaagcgtttagctggaataatatgcaataatgagcatacataaatatgtgattacacagaaaagactgaagttcaaaagaaagcaaagaaaatagtaaacaaccaaccgacaatcaaataaaatcaaatcaaatcaaatataccattgaccaacccacaaaaggaggcgcatttggagaaaaatgcaaaagcaaaagagcaacgaaccttgggcgaaccccacgatagcaacaacaagtgtgcacagaaaaaatcgatgaaagttactcaaaataaagcaaagcccaaataaccacaaacaaaaatgtttttcccttatgcaatggtttctctggctttgttggttgctttgcataatggcttggagttgggcgtggggattttatgtgcgagctgccacccccgatggttcacatggctaacagctatgacacttgactaacttggctaactccgattgcagtagtaaaattggtaaattagcccttgaaaaatattattattttataaataattcattgttccacatttattatgattgcagcgatttttcagagttaggtcactattttcacaataggaaaatgttggaatgtactctactaagctttcttttatgaataaagaaaatagtttcataatacatgatataaacaaaataacgattatttactatttatttatttatttataattattctaccatgttttctttatttttctaccttcaatacaatcatggcacagttattaatgcaaatgacagtctttttgccagctgctttgatcacaaaaaaggcaagaaataaaactaaatccacaaccagctaagcaagaaatgcagttagaagagaatccatgccgctcggtttacagttactgcagatgctcgaggggctcttagtttttccaagcttcccatgaggttccccctctctgccccactgaaattataaaatatatttcccatgaacggttttcttttgtttttagcttcgttgcaattatagctacctgatatgcaaagtatagttagcaacatttgaaatagaaataaatgaataaagaattgtgtgaaattcgtaaacaaaagagagctacgaaagctaggcgtaataaccaggcaaagaatgtcgtgatcaagttgttggtctgagcttccacgagagatcggagatttcgaacatgcaatggttttgggggcactgggaactctattgcaattgatgatgacagctgttcatacactcaaattacctacactttattatgaaatactattttctttaacgtaaaaagaaatatccatatgcaaatttcgaaaaaatgacttaatagtacttttatttgttatcagtttctattagtacattaatattttccaatttgaattgataaatcccatttcgcactttacggttttgaattcccatttaccattaaccattaaccaagtgacccaatccagccttgaaccatttctcaggccactttcaattcattaacggccacaacggagcgcatgaatatgaggcactgcagttcataaggccgaaccattagccatatgctaaagatcaaaaacccgatcccgcccccgcaaaaaaaaaatgaacaaaactcacacgtatgtataagtacatatgtataagtatgtctggtcgactctatatggaattgtataattatagcacaagttgagaactgaagggggcggtgcgctgacagcatgcaactgaatttgggttttatttttattagatgttatccgagacttgaccagctggttgccctcccccgatgccaatgctatccccccaatccactttatgactaataaacttgaacttgtgcgagagaaaacaattgaaaaattgaaccgatgagaacagcgaaagaaaaaaggggagatatgtacatatatctcctagatgttcaattactagccagttgttttgtcagacacacatgtaatccatccatctatccattcaactcaataattatgcagatgtcgtgttgttgtcgcaataatacttgtggattatgaaaccgcacgtaccaaaataggagatacaagaaccgaaggaagctcattaaagattccaagccatgtggctaaggggcgggtttgaattcgatacgattcagagagtggattgcacatttcaagagaactattccgaaaattcctacgaaaaatcccaattaaagcgagtaaagtgcggagatttcaacagatccttttcactcaagtggcaacagatgcgtagatatatatttctactacctgctcgaaagatcgcatcgcatcgataagcagaaacagctgtttttcaattagttttgcttgactcaacaaatcattttatccggggtatttgcttatctaactctgccaaatctgttcgaaaaatgcattaaaagaggcaaacgtgtttaatgcctgaaaacgggaacttcgtttagccgcaatgaatttcaaataaaattacgtgcttttgctgaattttcagcgacgcagtaatcaattgtttaggtaactaacaaaggcagtgcgagatacaaaaattttaaaccattctccacttgaatgctagcaatgcttgaatgaatatttagcaggcaattttccagaattcagtagtttaatttttttttttttggtagtattccaccaactctacttttatctctcacttaaccctcaaataagctaatctactaaattagcccccaaagacccaaagtaaacgccccagataaacaatacaaatacgcccacaaaaaacagacacactgaaacaacaatcgaagaaaatgacagaaagccaagaggttgaagcaatattgatgaattatacaaaacacagtctggaaaaacaaagaagaaaactttgttgcaacacttgaatcgggaaaattaggtcatttaagggtgtgaattgaaggggaacataatgtcacttaataaggaaagtgaaaaatgtcgggaaaaagaaaataacttattgaatacttcgagagaaaatcaagttatatgtgctagtaagaattggtatacaagagtacatacttcacaatcacattgctttccgagtaaatctcgtaatccttatgtcgctgacacgcactgtataatctcctcccaccgtgtatactttaaaatcaattagtaagtccacagcacgtctgaaacaactttgagacaaatctcatttgcgactatgctgacatattttattttagctcagtgaatttattttcatgcctcgaactgtcgacacccatggaggaggaactcccttcgaacatcttgctctctagtttgcactctatttctgatccggcgaatgcttcgctggcagttcccgctaatttgtgtccctcccgccggttttaaattctccgggcgcacacggaaagcggaagcccaggagaagaccgcagagaatccacaagagcgaaaattccacgtcaggtttttggtgaatgccttagctgaatgaataatgaggcaggcgtgccactccttatttgatgggtgtgtagggagcagggaggaggaggagggggcggaagaaaacccggcagatttcgtagactcgtctgcgagatcttaaggaaagactgaggcaggtcaagaaaaacaggccggaaaacacagttctggctagagagattgctatatatggagtggtgcaatgtttcgcaccaaataggaaatttaaaagaactataaatgttgatgattttaaatgttcatagtattaagaatgaaagtcaaatataaatataatgaatgtctaataaaaataccgaaaagtaatagaactaaaagcttgttggcaaaggtcaagaaaatcatggcaaatattacattacattacatggcgaatatagttttagaaactcttctttgtaacatttcatattctgggacatatgtataaaaaacggatgaacacttattgtaaaataggaatggaattttatgtataagtctacacaaggatagcagtgaagattacaaaatgttcaaatatatttgtgtaccagaacgagaaagcttttcatcggaataatatgtatttcaacatttttatgcttcaataattcagtaaggttcccttcgcggcgacttaaaataattcaagcatggaaaacaagccctagttagtgtatttagtgaaaggtaaatacggaagtatatcatagacatataaacctggtatatatgtacatacatatgtatgcacacatgtgtacctgcaagatgcactcaaatacgacaaagatgaaaagcaaaacacacacattgcaccaacatgacagaacgacaataaagaaataaaaacacagggaaacaaaacagactgtcataaaatgcgacacctgtttaaagttgtgcgccggtactcccaccaccacctccttgcccaccttttccgttcttttcgtgtgtttgcagtgcatttcatttaccgcaattatttacattggttagatgcgggttcttcaaaaaggtaaaaagaaccaagtgcggatagaagatattcattcaaactgcactctgaaaaatatttcattaaaataagatttgaattaattaaaaaaaaaatatgttaagtgcattttcgaataaaagtcacgtttgctttatattttttcaaaagtttgtagtagctctacagtttttataatgagttatattttttagagattatgttataaaaatgaaactaactttagagtgtatacagaaaagtatggagtaaacttaattgatggcttcttcttcattttggtgcattgaaccggcggcacaggtggaagaagaggaagcagaggaagttgaagaagcggcatttgacccagtttgatggaatggcatttgaatgcatttcaatttgagtcgctcattcagtgagtcgttcgatcaacgagtttttttttcaggttgttgtttaaaccaattaaatgtcaattggcgacgtaatcggactcttcaatcagccattcgttcattcaaccctcctgagagcttttcccaccccatctaaacaggttcgtgccccaaattgaattctttcacatattgtctgctctctctctctttggtttcttatcttatttctacacatcattcttgtttagattttggcacaataacaataataacaacaactggccttgtttataaacaaaagcacaaaaaaaagctggcgtaaaaaattaattgaaaagaaatacgaaatctttttatttcaacttgtttaccttgaatcgccgcaaattgaagttcaagcaattaattacactcaatttcagctacacttttttataattttctcgcttttgcatttttatgcattttgcttaaatacgattttgtaaaaggctgctcaataagataattaaaatactaacgactttttggttaggggttaaaaactgaaagcgagtatttactggttataaattattattggttcaaaaaatgcattctaaagtaatacattcaatttacctttgttgcataaggcgtccattcactttacttaaatattaattaacatttgttcgatttgtttgtgttaaacaatttaaattgtatttttttttttgacccccgttgaaaattaaaaatagaagtgcacaaaaaaacacgaccaaagccgcataactgtgccaaggcgaaatattccaagccaacagcaaagtgtatttctttcttgttttctctctctttagtttgttggccagtattgtttttattttttggcagactttgcaaagtgcaaatgtgaaacgagaacctctaaacgatgttaaacagaggccaaaatgaacttagaggaaatggacgcacttacgaaccgaaaaaaaaaatatcaaattacactctgcagcatgatgcaatccgcagaggaagcagctgcccctacagattttccatcttcggccaagtggatctcggattacggttggggaaaactcagaagatactcgagtgtcagatgagccacttgtagggctgcatcctgcggaataagaacaaggataaggcaggtggtccggaaatagttgacaatgcaccggcactttaattaattaatcggtggtacaacttcctcaaactcctaaaaccacaaaagtcgcgaaaaaacaagcgggtgggggagaaacaaaagctaaaatagcaagtgagccaaacaaaaagtcaacgatgtctctgcctggcacgaaaagctggctcaaacccacaatgaaaaaaataaaacgtagggagaattgcaggcgctacacaaggggaatgcgaaaatcaacaaataaataaaaacaattgcgaattttcgcattcgtggaaatgttacaactgtcccaccacaagcaaactttccaaataaataaatgagtaaaagtcgcttacttaatggcccaaaacaacagaatgacgataccaaagtgtctttttctaagctgtttcaaatgactgcgtatttgagaatcaatattattgagaatgtgtgattacacaaaaagaaattaataataaaggatgggaagcaattaagtgcgtcatctgacaggcacactagtcacgcagttaatataaatgtgttaaataacaaacattactttctctaacaataatatgtttaaatgatatcatgcctataatatcattttatgttttcctaacctaatttacatagtaaactattaggataagttgaatacttaatatgacaagctacttttttttaaatagtttcacagcttagctgtaaagaaactatttatctcgaaatatttataactctgtcttagtataagcttagtataaactaaagatcagattagatgagatgagatcatttggggtatattatctttcctacagtcagattctgtaggaggtttaactttcgagatttgtactatagaacttaatattttgcacccaaaagtagttattattgcccaattagatctccttatctattcagttatctcgtttttccctcttcttcttttaaagaaacagtataacagtacagtttaaacatttgctaattgggaaccgttttgcacacagttagttcgggcaacgcacctgttgaaatatatttgcgtatccaattggagcagacgagtggctttaaccgttagctgaacatgaatttggttaaaaacaaaaaaaaacgaattatttgcacttggcgaaaagccacaacaacaactgaatggtgaaaatacaggaacacacacacacacgcgcgcagtctaaggagagagggagacgaagatagccggcgaagcgcaacagttggatctcggtgttgttgttgtttctgtttatgtatttgttgcagaacaggtagttgagccgaatattgcctaaaatcggctttgtttattgtgttttattcgattttcttacactttcacttaattcagcattcttcgcatatcaaagcacttatagctgcattttttattggtaaattgtatttgtacgcgtgcgtaacgttggcaacgtctttaacttattttttgagctgtgttgtgatttggtggttttacgtgggaaatatcaccgcgcgcgctatcgaaaatatgtaaaagtaataaaacgccaaagtccaattgtatattcctaatggttttaaataatgtcgttttccgatacttctatacaattcgacttcacgcgcgcagcaacaactaacgcttgattacgagtaaaaatattaaaaaaatgcaattgcagtttcgatatatgccagcccgacgatgcgtccgcttcaaactaaattcgacgaccgaaatcgcgttgtttccggtttgcattggcttatatatggcaaagtgtggccagtctcgtagatccacaatatccttgatttcttaggattgcttacatgcagtatatttcgctgccacaaacacggtcactcttcttttcgctagctatgttaactctctgatattttgaactacttaacagagtagcaggtttctgaaacacaaatgcttttgtgctctatctaatttttttattttgcacatatataattttcataggtgttatagaactttatttatatagctttcttgtaaagtatttaccttaggaaatacattagagttttatttcaactgtctgattggactatcgtagacacataccaaagttgttatcggacctagtcctcgctaagacctatcgaactactaagcgactttaataaacatatactttagccgccttttttgcttaatcgattattattcgatagcttcatttgggttgttgtcccaattaattagctgaaatattttgggagatatcaaagctataatattttatgtccttatggcaagcgggctcactctagcaaatcataagttgaaatccactttagttccgcataaaatttttccacgtcatcgctacgaagtcattgacacttttttctgctaggttatctgttaactgtcagttctggactgtagaataaagtgaccttaatgaaaacataaatttcaataaatgatttaaattgcttataattgaaagtgaaattttgagtattgtctggtgtgaacgctgtgtaacaaatcttgtagaatactcgtgtagttaaaaatgtagaaaatattgacacggctaagccctgacagcgaggacatgaaccacactgtttaagtcaataattttcgaattcaaaattcatttttaaaagtaataaaccgtttatttatttataaatcattgttccccaaacttaaataatgaaaaaatacatttttaaagctaggcttcatagtggactttatac

SEQ ID NO: 41624 - DNA, 3331 bp, DROSOPHILA
cggaaacaacgcgatttcggtcgtcgaatttagtttgaagcggacgcatcgtcgggctggcatatatcgaaactgcaattgcatttttttaatatttttactcgtaatcaagcgttagttgttgctgcgcgcgtgaagtcgaattgtatagaagtatcggaaaacgacattatttaaaaccattaggaatatacaattggactttggcgttttattacttttacatattttcgatagcgcgcgcggtgatatttcccacgtaaaaccaccaaatcacaacacagctcaaaaaataagttaaagacgttgccaacgttacgcacgcgtacaaatacaatttaccaataaaaaatgcagctataagtgctttgatatgcgaagaatgctgaattaagtgaaagtgtaagaaaatcgaataaaacacaataaacaaagccgattttaggcaatattcggctcaactacctgttctgcaacaaatacataaacagaaacaacaacaacaccgagatccaactgttgcgcttcgccggctatcttcgtctccctctctccttagactgcgcgcgtgtgtgtgtgtgttcctgtattttcaccattcagttgttgttgtggcttttcgccaagtgcaaataattcgtttttttttgtttttaaccaaattcatgttcagctaacggttaaagccactcgtctgctccaattggatacgcaaatatatttcaacagctgcagtaagctttccaccaaacatggcaccaatgccccgaattcagttacccaatggaaattcttccataaaggctagcacaaatgattttctctttgcggaaacaatgtccggcgacagtagtcccacccccagcagtccgccatccagtacagcaggcgttgccaaatctcagtgttcttccctttcggatggcgaatcctttgagggatatggcgaaaatgagtatcccacccaacttcgcgaagcccgcagctccaattccaatgggagccataatatgagcaatcatattaacaataattctaatatcagcgtgggcaacaacagtggacacaaccacagtggacactcgaacgatggaaataacaacctaaatggcagcactggcgtcgaactcgatttggctccacacgtcggctcatcaacacctcaagatgatgacgaactaaacataatgccccgggataattgggccaggcgcagtctgcgacgaactcccaccagttccggccgcaggcaaattagttcaaatgccttagccagccaactctatagatcatcgagctttaactcatcgggccgtagctccaactgtgatacaacagaagacatgtacagcgacataagcttggagaatcgtcatgactacgattataggctggaactgctgcagcgcaaggtggacgatctgtcagatacacagaatatagctgaggatcggacaacccgcaccaagaccgaatatgcagtccttcaggcgcgttatcacatgctcgaagagcagtaccgagagtcggaactgcgtgccgaggagcgtttggcagaggagcagaagcggcaccgcgagattttggcccgcgtggagcgtgaagcctcgctgcagaacgagaactgccagatgaagatccgtgccaccgagatcgaggcaacggcactgcgggaagaagccgcccgactgcgtgtcctgtgtgacaagcaggccaatgacctccatcgcaccgaggaacagttggagctggcgcgcgaccaaatcggcgtcctgcaacaggagcacgaggagcaggcacaggcactgcgccgccacgaacaggagaagaagtccaccgaggagctgatgctggagctgggccgggaactgcagcgtgctcgcgaggagagtggagcccgggcaatgccgaccacatcgccggagagcataagactggaggagctgcatcaggagctcgaggagatgcgccagaagaaccgaaccctcgaagaacagaacgaggagctgcaggccacgatgctgaccaaccaggccaccatgctgacaaatggcgtggagcagggtcgccatctgctgaacggaacactcaacagtttggctcaggagctcgaggagatgtcacaagcccagctacaacaggccttccaggaaaaggaggatgaaaatgttcggcttaagcactatattgataccattctactcaacatcgtggagaactatcctcaattgctggaagtcaagcccatggagcgaaagtagtgcagtctactggaagaataaaccaaccctaggcactcggcagagtgtcacaaccacctaacattacctaaaattaataaactaactaaaccatactctatgttaactttttaagctacactctatacatgtatttatgcctaacttaagtcataatttattttataacaatttaatgtagatttttaaaccaaaacaacgcagagaacacaaagattgcatgtcaaaatgataaaaaagtccttaatttgattagattatgttttgtataaagagagtccaaaattatgtaaaagtttattttccttcgtttctagtttgcgttttgtatagttcgtgttgttgatccataaagatattacttataaatattgttagattttaagtcgtaaaaaatctttcacttattaatgaaatggaacccaataatttattgataattgccagaaaatctaattgtgaatgtgtatagcataaagagattttatgaactgttgatgcttgacaggaaatatttccaatttcgtcatggcagctaagaaggtttttgctaggacaagtgctccatttttcaaatctttccatcacatgcatacttcttaaatctttctatccatacaaagacggagttttagtttgatgtgagtctaaatgagagcaattatcacgaggagtttatcaattcagaagttatatcttaatccacacacatatgtcaatgtatagcacagataaaactaatcttactctgcatataaaacaacattaaatggacataatgtgcaaacgtttagggatgacacatgatagctccaacgaaagcgatccctaatagtcttagcaactgaataactcaagcggtcaaccctaatttagctataataatatccaagaaaactcgataatcgatgtgtaatcgttaatcaaaattttattgccttaaacggatgttttaaaaaatgtactaaggcttagataactctaacaaaaaagtccataaggtttaatgacatgctgcgaaatatggaattttaaatgtaatttactagatgcaagtcgctgaacttata

SEQ ID NO: 41625 - protein, 502 aa, DROSOPHILA
MAPMPRIQLPNGNSSIKASTNDFLFAETMSGDSSPTPSSPPSSTAGVAKSQCSSLSDGESFEGYGENEYPTQLREARSSNSNGSHNMSNHINNNSNISVGNNSGHNHSGHSNDGNNNLNGSTGVELDLAPHVGSSTPQDDDELNIMPRDNWARRSLRRTPTSSGRRQISSNALASQLYRSSSFNSSGRSSNCDTTEDMYSDISLENRHDYDYRLELLQRKVDDLSDTQNIAEDRTTRTKTEYAVLQARYHMLEEQYRESELRAEERLAEEQKRHREILARVEREASLQNENCQMKIRATEIEATALREEAARLRVLCDKQANDLHRTEEQLELARDQIGVLQQEHEEQAQALRRHEQEKKSTEELMLELGRELQRAREESGARAMPTTSPESIRLEELHQELEEMRQKNRTLEEQNEELQATMLTNQATMLTNGVEQGRHLLNGTLNSLAQELEEMSQAQLQQAFQEKEDENVRLKHYIDTILLNIVENYPQLLEVKPMERK

SEQ ID NO: 41626 - DNA, 11779 bp, DROSOPHILA
tgtgcacacccacctgccgaggcggtaccaattaaaaggtaggtcagctgacgacgatggcagccaattcgggcttacataatttggggacagaatatttattttgccaccttagatttggcattcaatgcagtgaaaatgacatcattttgaaatttttagaaccgcttgtgttttgtttggtgaattttataatatttgcaatatttcggctgcagttgcatcattgacagcgaaccttaagtttagttctctgtaaaggtcaccaagcccagacttaaaaaacagatgttttttaacaatcttggtacgtcccactactaaagcacttataatttaatatacatttaatccgccagtaaaacacctataaatttgaattagaattcaattttattctcatttcaagtttcaatattatttctatttcaaatacttgtagttcatttccttacttaactctcgggcaccgaacaaaactgcattgcattttccttttaataatccactacatttagctttgagagtttcaggcttaattatctaattgaattcgttacatttcgacacttgtttttattcagagtttcattttcgtggtatttttaggctaaactacttagtgcatgtgcccatttgaattaaattagtgagtctacctgggtttattagtttagggttttaacattaacttaaagctgcttattgtttgcatatcattcaatccttttctttttagctctctcgaatcacaaaacatttacatagttaaagtattaacagtgagaaacatatacggagacaatagattagaatgtaatcaacatttatacgaaaatagttggtgtttatatcctgtgggtgtagagacttatcgatagtggtgcacatttaaatgcggcgttcaacgttttacaattacttttcattattcatttaatataaacaaatctgatatggggctggctgaagaagtctcctctggccccctagttgctcactattccagagagcgcctacgcagcgtcttgcgcactccgccgaaagcagcactgctgcgatccaggagctcgttggacaacctggccaacaggggcaactcccgcatggaaacgtttacggagggcaagggcgccagttgctgttgcagcttcttaatgggcgtgggcggtgcaaggtgattcagctggtgatggggtgtgactggcaagctggctgtggtggcgcaagaggtgaccttcacctcgaccacatcgcagtggcgtttcaaggcctcggcgcccaatgaatcgggtcgctgttcggtggacttcaagcggttcgtttgctgccttttggctgtttctttcagcatcatcaagtgatccagcttgtccaccgtggccttcagttcatgctcccacacatcgttctgctgctgtccatctccgccctcgatgggacgcaccgccaggatcttgaccttctgtcgcagcgcctccaaatcgcgttcatccactacacctctgagctccccggctcccgtttcatcgtagtcgcaggcatcttcctcatcttcagtttcggcagctgcttggggagtttttgcgcccaaagacatctggctgcccgctatggagggatagtcgcacttctcaagctccagctggaaatcgggcagtgatggcaaggcactggaagtcggagagtttaactctgctcccacacccggctcgcggggtcctggtggagtgggaaaatctcccctctgcctatgtatatcctcactgatcctctccagattgcgtaaggccgtggagtaggtgctcttagcaccggccacctgctgctgcagctcctgaatgcggtttttttgtgtctgcagctgatcctgacacacctgcttctcttcgaagtacgggcgtgacttgttgatgctacgacgaaaacgatcctcaagctgttgcagcttttgctcggcggcgttaaaaagtttggtgagcctctggtgctcagcatgacagtcggctttctgcgtttcggcatccatcaccttctgggtagcatggttaagcatctcctgccaggcattgtcgaactgccattcgtgcgagttggacataaaacgctgctcagcaagcgccaccgtctccttggctgcggcatggatttctaaagcaaaaattaagacttcttaactctttttttttcaatatttattttttttctactaaccattagctcgctggaacttaaccgctgctttttggcattcgatttgtgcctcgcgtgccttgtccaatgcctcgtagtagggtctagccttctctatgcagttgcccaactttttggaggaaactttaaggcggcgtgtagattcatttaacaggatgcgaaaggtggaattagcctcctaagcgaaatatgaaggaattttattaggcttttatatcattaattaaatgactatggcacttgcctctagctcgatttctagcttattaatctcatcggttgcactattgagattctccagttcaatctgaagaagaagaaggaagaatttgtaattagaataaagatttaatattaattttaaacaaacaatcatttcagtatttgcttaacgcctgcccaccgaagttagcaagatgcctaagtcgggtcgcgacggaggagcatccaaggactccaaatacgatctaagcaaaatctcagctcgcgtggatcgcgtgaacgtcagcggattgctgcgcacccacaacgactatgtgatgagggcggcagatggcctgtttaaggccagtaacttccaggatctaatgctggaggccatgtccaccaaatcatatctgcacgagctaggcatcttcaaggatgtgagcgtgcacatcgatgttagccgtggagcggatgcctcgccacagggatacgaggttaccttcaagggcaacgaaatgtcgcgcatgatgggttcggcgggcaccgagattggccagaacgagggctccctgcgaacggagttgactatccccaatattctgggacgtggcgagaacatctcactgcagggcagctatagcagcaccagggccaatgatctacaactgaagttctggaaacccttcttccacacacgcttcaaggaaaatcggcctgagtaagaatctgttttctatattgatgtaaatttacaattaacagttgctcttcttttacagaatgtctttcagcatttttaggcaaaccgatcggtttgacataagttcatttcaaaccaccaacataggctatttggtggacttctcggcgcatacgatggttggagtggatgtaagtttaaaaatccttcaaagtaaacttaacttcttagccatttatttcaattttcagttgacgcactcgctgcagtatgagaacgccatcagagacgtgggattgctaaacaaatcagtgcccttcgccatacgcgatcattgtggccccaaattggcctctttgctgcgctactccgtggtctacgacaatcgggatggaaacgtattccccacacgcggtatttaccttaaatcagttaacgaatactgcggattgggcggtaatgtcgcctacaccagcagcactgcccacggagagttgaatgtgccactgtttgccggtttggtggcccagttttgcgctcgcgttggcgtcgttaaagagactaaaaataccacccagctgcctattagctcgctattttactgtggtggtccattgacactgagaggatttaaatttggaggagctggtccagtagttgaaagcacgccaattggagcacagtctttctggtgcacgggcgctcacctgtgggcaccgctacccttcgccggagtcttcaaaaacctggccagccactttagaatgcatttcttctacaacattggcaacaacaatagtttcagcacaggttagtttatgcaccctaaagcaatctatccactggtctttaaatatatatctttgcagaaaacatgcgtagtgcatttggaatgggtctggcggttaagctggccgaaagagcccgaatcgaactcaactattgtgtgccagtgcgtcatcaggatacagatagaatcctgaatggtttccagtttggcattggctatgaattcgtttagatgcccttttccccgcaaccatcaactagatgtagcaccagcaaaagccatgagagtcacaacagcccagttagaaacaaatccttattcacaacatatggctgccctgttcgtagtttcgagcgtttacagattctgtttcgtatttttgtcaatgcattttattttcctctgaaaatgtattcgtagtccagcgatcatttaagtagttcctaaggcgtgtacatacgtaaaacgaaaggttaaacaaaatataaaaaaaattttaaacgaatgagaggtttttatgaagtacaaattgggcacggtatatattcgatttattttgcaatgtattttgttgaatatgacaaaaacaaaggccaattaattcggatattaaaatcagtctgataatttaacatctacaagttgaataagatttttatttacccgttttataggctataaataatgatacagacattaaagttaaatcttaagtgtttcttaaccctgaaaatgcaattcgacgatcttatctaatgttgatttattagctacatatttgtgcaccaacttaaaaatgcaaaaatgcatctgtttaatgaaatttaagtccatttttccttcggaaatgtcaggttggtcgtttgcggatatcccatggacacggtggacaggcgatggcatggagttcatggatgggtgagccgcatgcggttacagtgttttgtttgtgcttttgggtttcttttttccttttttggaatttaagttcgggacccacggcagattgtggtcgagaaactggttttaattataaatgctgttcgttgtgtttgcccctttttttttatggcggcttttattaacgctgtcctagtttgatttttatcgtgtccgctgctgctaaacatttctccacatcccggacatgaatatgatgtgatgatgagggcggggaatgtttttttttttttttttttttttttggtaagggcacgctcgagttgcctctgtaatcgagattgatttaagaccgagccaagtgcgagcgaacctctgaaactccgaaaccggttattcgtgtaaacaaacaaaaccagtttgggcatccggcgcagatgaacacttcaacacttgaactttccaggaattttcagcagcccaaggaacttgtttcgtgcatttcgctgcatttgcctaacgattggctaatgaaaagttcgcttgtttgcccttcacttggcagtttttcatgcaggtaaaagatttaagataaaaagttccgacagatggtgcataaacatgcctgcccagagtgtaagtatattttttatcgactccagctcctccgtagggcacgtatcttctccaatgggtaaatatcataaaaaccatttattgcaatgcgattcaattgtaaatactggcaaaaaaggctaacatatttaatcgccaaggcagctgtgtgtggctggctggtagcaaaaatatttgattatcatcaaacaaacaaaaagtattgtgcataaattaaatgttaaaatgacaacgcaaattgaataaatattttcacaacttcgccttcaagcactcaaaatgcaattggggtgcaaaaattcgaataatcgaatcgaaatattctcgataaaattgaacatctttcacttttcgggaatcaagcaaatatacataactttatgagcgagtggaactttcctccagttattgattttatgcgttcaatttaaagcttacaacagggtcaaaaccaaatggaacgaggcctggcccaaaaacttaaccaaatcacgcgatgtgcgctcattttgcattcgtcagaatcgcgctgttaaagggcgtctagagttcaacctgagtcacagactatgaataaagccaatcaaatgcgaaaggttatagccaggagcgtcgcttctctaggcaactgctaacaagaagatgacgtgagtgcggctcgttaggatccaaaacaattcgtcagacatgagggcgccgcccactctttggaaattcgaggatggcgattgtttggctagtaacaggcgtaagtcttcagcaaacagcgctcataaatagacataactaaattagattaggaaatatatagatatttgcgttgatagataaataaatattgttaaattacttaggaaaatgaaaagcagccaagctcattattagatatcccaggataagcttattcgcttgtcccagccactttccacaatatactccctactttggacacccatttggccacgacactccctcctgttccgctcgcagttccgccagttccgcaatgacgccagctgccctttgtgccggtggcgtgatgccgaataggtcgacctgacctacatctgctggtgacagctttgtccccagctcctgccagaaccaccccactttcctggccagacttgggcataatcgcaatggaggagctgtaatgcaaacccacatcgacttgacttgcgcaacaacaaaaaaaaaaaaagaaggaagcctcaggaactcgtaggacattcaactcaagcggaaatagacgtcatcggccgaaaataatgcgacaattgtatgtaaaaaaccgcaagccaaggggaaaactaaccaaagtggaactgctgagaaagtcttggctggtaggtcaaaaagatggttatataaaagaaaactcaacggcgatgcgtgagtgaatgtctgacgacccgaaaattaagtcaacgtagcttgacaattgcaattgaccgcataaagtttttgcttttttaattagagttatgtcaacttcgtataaaacgataaacttctgtgttgaatatgatgttttttttttttttgtgtggaactctcgtgtgcctgacccactttgaacaaattattttcaattgctatgctaactcaaattctcgactttctctttatgaccaagcaattcagatcaaaggtcaaccaaactcattttgagtctatagaaatctaatagttgttaatgcaagtacaagttcatgactgataagattgcctctgaaaatcgtatctctgctgatttgataaagcaggaaatgactgcctaagttcaactacataaacaagcgcaatcattgaatgtcattaacaattccgacgaccaaaacaaagccgatccaaactgaattcattaaggctgaaaatgcatggaaaattgagtgcggtaaccgctcttcgaaagtagcaactgtgttgtgcgccatcgactataatgataatgatgatgatgataattggtgatgatactgatggttaaggaaacccgggggattgcactcgaccaaaaggttacaaaacctccagttaattgagaaaataaaccttctgaaagagacagtttgtttatgaaagtgcaatcccagctgctttttaagtatttattattgtttcctacaattgtttttgttatttttgctataaaaatggtaaatataaatatagcacttgcgatcagaagcgcttatgaccagcgatgattatgggtagcgtggccgagcggtctaaggcgctggtttaaggcaccagtctcctcggaggcgtgggttcgaatcccaccgctgccacttgagatttttttttttttgatcagagaaagttgtaattgttttggaagcgcaaacaaaataaaaagtaaactcaataataaataaatgagagcaaacttattcatcaaatatgaagagtgctatgtagtattaaatgcagtttttatcgggactggttatgaactttgtattgtatgcacataaataatcttgcgatataagcacaagttcgtattcgcaataaaagataagcataaagaatatcatatacacttttgggagacacctttacggtatatttttacatatatagagtagacgttgactcacttttcggacacgattttctgattcatagacgcctggatcgagttctctaattcgcgatacccgtactctcaccttgcttacgtaactgagaccagagatagccgacttcattagtcatttataattttttatcaaattcacctgcacataaagtttcccttgctaatctaattatcaaatggggcaaggctactaatttatttttaaattgctacaaagcttttctcactaatttctatcgtaaaaaaaggcccctttgtttttttaataaagcaattatcatctaatcgataagtgacgctttgatgtggattggtatgagattagaaagtttggggctcgaaaaacaaatccgtagcacgcaaatgaccatatttttaagttaactgacgcgtgtggaattgtttacaaaaaacatctgttaggacacacgtttttggttaaatagactttgcgacatcgacgcggtgcctattctttgtctattgtttggcgtcatcaacttgaaaacatctctttagataagaaattttgcacgcgcaaaataaaaaaaaaagaagaacgccaaatgctcattgataaatcattggcaaatcgaaggcaaaaaaacaacaaagtcgacttgtcgaaagaggaagtcgagcataaaaacattgagaaagaaggcaaaaataggcggagcaaaatatttcgcgtttttttgtataatgtagcatgcggtttttcgtagaattcttaaccggtttcggtacagttttgtatttggtttatagagccgcactaaagattgtttatagacaaagtgaatatctcctacacattttcccatacctatacatatgtactttcggacattatcgacgaatccaatctagtcacatgccgtctgtcttctgggttcgaaatcaaattgttgttaatgactttgcgccgcgtgtggcgtctctcccactaagttttgcatttaaaaataggaattattgtaggtctacaccgggattttcctttgtctatgtagggggtattctcacaatggacgtaccattcgattgatcgccctggataaaggtgtttttaacttgaataaccattttatacttatatactcatatacataaatatattctcctattgatcacggtttggaaacattgtgtttttcactatactcatccgatttgagtttttatttttacagactcgtattatttcctgcccatttaaggctattaggcgagtgtgcgactattttgcgcagttgaatgagcagcatatgaatcttgatttatgcaaaaactgcgacttgcgcttcaagacacttttcaattgtctggcttacacaataatatataaaatactcgaaatagaaacaaaggcgtgtttgttttttgttgttgctgctttggcttgcgtgtgcgctttggtatttccatttattaaatttgtatgcatacctcctcctctctcccaaaaatgcgaagagatgagcaaagaagaaggggcgaaagataaagagcaataaccaagttgcacttgaatctcatttaggtaccgagttcaaatccgttgcgggtaaaaagaaaaaaaaaaccagtttacttggaagtgcgtgggattatttgacaccctttgtgatcccttttttcctgcactttgtattgttttcggttttacaatgcatattgaatagttcgtcggaaaaggaaacttgcaatttgcttaaatggctcgtaaattgattttctgtgttggtttttgctgttgtatcgtttttgaaaaccaacaaagcgtaaaaaaggttcacgcaataaatgagtaacgaaatgcaatgcaaaaacgcctgtttcctatttccaaaatacagtgctctatgttttttgcttgtaagttgtaaacatatttttgtatgaaaatctaggtgcacatttatcactttggtacagtggataccctcggtcttcacaattcaccgaatcgggtatgcactgtaccaacaaaaactgcactgcaaagaagagcaggtgatagagagaactagcaagcaaaccaaaaacaaagcagcctgaatattgttattgtcattaaaataccgttccattcagtgccaggtacgaaagagagaggcatacaatgagagagagagggggagaaaataggaaggacagcaggcaaattgccgaaggaaaatcacctgaatttggggatccagctcgccgtcttctgcactcgacatttttactggttttcactgaattcgttccaaatgcaaatatatcgctaaacgcgttaattttcacttttctgcagcccgcttttcaattgaaaaacgcttttgcatttcactatttgatctcgttgctacacagacacatcccacgactatcaatttgcttgtgtgttttgtttttcttttttttttctgtgtttttttctataatattatgtaaattggtgttggcaattttaactggcaatttgctatgcgggtacagcagcagtattaaaacaaatatttcattttgcgtcttatgtttcacaacgaagttaaaagcgaaaagggaaagggacacatggcgattacattaagtgtgaacaagacgaacggtacaagtggacagggcacgcggcttttcaccttctccttcgctcggggcatctaagatatttaattaactcgcttataaaggctaaactatcctaaaaattaaagacgcgtccagacgcgacgaaatgagaagctgaattcggtgtgaccgcagcgcggtgttaccagatagtgaaatgctgaccagcagttgctgaaataaacatttggtatttttattgtattggtatatttcattacaacgctggcattgttgccaactattttcaagaaaaataaacaattaaaaaaatgtttgattttcattgcaccagtttgataatgtaacaatttatatttaaaaaaatgctaagttaacatattagtcttcaaaattactcttggcgggcttggtattttctcttaccattacgtcatatgcctcatctacataaccatcacatcacgttacgtagttgattcacttcgtaacgttatgaataattaaaaaaattttgtttcaaaaaggatttttgttaaagttgctaaatacgtattaatgaaatataaataaataggtctgactaagtaacaaaatatgcattaaaaccagaaacattttactatgaaagtttactttatttgttatttgttttcatcatttttgttttgccctttatgtgctttacatgtttgtgattttttcgtatttaatttgtttacttttccttatatgcgtttataaatcgaatactccaatttcctctaatgatatgcgcaccaaacatatttttaactgagcgcaattaacagaaaaccgaaaatactctcaaaaaacaaaattttcactaaaagatttttatttatgtaaattataaagaagaaggcaattcagttgtataccacggaatttcatacgttattcagcatcaatgcccgattaaacataatttataaagatggattcgtttccttcttttatttttgatttcttaatttaacgctaatataagatttatattttatataatgcatctttttactttgtatggaataacacttaattatacattcatttcatatagtttgattttagttgtaatcataacaaaaagaaacatttctgtgcagcgtga

SEQ ID NO: 41627 - DNA, 1921 bp, DROSOPHILA
ctggacgcgtctttaatttttaggatagtttagcctttataagcgagttaattaaatatcttagatgccccgagcgaaggagaaggtgaaaagccgcgtgccctgtccacttgtaccgttcgtcttgttcacacttaatgtaatcgccatgtgtccctttcccttttcgcttttaacttcgttgtgaaacataagacgcaaaatgaaatatttgttttaatactgctgctgtacccgcatagcaaattgccagttaaaattgccaacaccaatttacataatattatagaaaaaaacacagaaaaaaaaaagaaaaacaaaacacacaagcaaattgatagtcgtgggatgtgtctgtgtagcaacgagatcaaatagtgaaatgcaaaagcgtttttcaattgaaaagcgggctgcagaaaagtgaaaattaacgcgtttagcgatatatttgcatttggaacgaattcagtgaaaaccagtaaaaatgtcgagtgcagaagacggcgagctggatccccaaattcagattgaactggagaatctcaatagtgcaaccgatgagattaataagctagaaatcgagctagaggaggctaattccacctttcgcatcctgttaaatgaatctacacgccgccttaaagtttcctccaaaaagttgggcaactgcatagagaaggctagaccctactacgaggcattggacaaggcacgcgaggcacaaatcgaatgccaaaaagcagcggttaagttccagcgagctaatgaaatccatgccgcagccaaggagacggtggcgcttgctgagcagcgttttatgtccaactcgcacgaatggcagttcgacaatgcctggcaggagatgcttaaccatgctacccagaaggtgatggatgccgaaacgcagaaagccgactgtcatgctgagcaccagaggctcaccaaactttttaacgccgccgagcaaaagctgcaacagcttgaggatcgttttcgtcgtagcatcaacaagtcacgcccgtacttcgaagagaagcaggtgtgtcaggatcagctgcagacacaaaaaaaccgcattcaggagctgcagcagcaggtggccggtgctaagagcacctactccacggccttacgcaatctggagaggatcagtgaggatatacataggcagaggggagattttcccactccaccaggaccccgcgagccgggtgtgggagcagagttaaactctccgacttccagtgccttgccatcactgcccgatttccagctggagcttgagaagtgcgactatccctccatagcgggcagccagatgtctttgggcgcaaaaactccccaagcagctgccgaaactgaagatgaggaagatgcctgcgactacgatgaaacgggagccggggagctcagaggtgtagtggatgaacgcgatttggaggcgctgcgacagaaggtcaagatcctggcggtgcgtcccatcgagggcggagatggacagcagcagaacgatgtgtgggagcatgaactgaaggccacggtggacaagctggatcacttgatgatgctgaaagaaacagccaaaaggcagcaaacgaaccgcttgaagtccaccgaacagcgacccgattcattgggcgccgaggccttgaaacgccactgcgatgtggtcgaggtgaaggtcacctcttgcgccaccacagccagcttgccagtcacaccccatcaccagctgaatcaccttgcaccgcccacgcccattaagaagctgcaacagcaactggcgcccttgccctccgtaaacgtttccatgcgggagttgcccctgttggccaggttgtccaacgagctcctggatcgcagcagtgctgctttcggcggagtgcgcaagacgctgcgtaggcgctctctggaatag

SEQ ID NO: 41628 - protein, 477 aa, DROSOPHILA
MSSAEDGELDPQIQIELENLNSATDEINKLEIELEEANSTFRILLNESTRRLKVSSKKLGNCIEKARPYYEALDKAREAQIECQKAAVKFQRANEIHAAAKETVALAEQRFMSNSHEWQFDNAWQEMLNHATQKVMDAETQKADCHAEHQRLTKLFNAAEQKLQQLEDRFRRSINKSRPYFEEKQVCQDQLQTQKNRIQELQQQVAGAKSTYSTALRNLERISEDIHRQRGDFPTPPGPREPGVGAELNSPTSSALPSLPDFQLELEKCDYPSIAGSQMSLGAKTPQAAAETEDEEDACDYDETGAGELRGVVDERDLEALRQKVKILAVRPIEGGDGQQQNDVWEHELKATVDKLDHLMMLKETAKRQQTNRLKSTEQRPDSLGAEALKRHCDVVEVKVTSCATTASLPVTPHHQLNHLAPPTPIKKLQQQLAPLPSVNVSMRELPLLARLSNELLDRSSAAFGGVRKTLRRRSLE

SEQ ID NO: 41629 - DNA, 4376 bp, DROSOPHILA
gatagcatccatagtgtggcctaattattatagcgaatttactaatcaataaaaagcagtctataaaatgtcacaaacaaaaagttgtaaaaaaaagaaaattttaattttaattaaagcatagcaaaaagtactttatctaggtctttttttgtattgttagattgattgcatttgttgctaggcaccgcggtgtgctgaaatggtttatttaatcaataattgcgttttgatatgcaaaaaagttaataatggtagggaagagcaaaaagaagcgtaatagcaaggattctacatccagtaatgcaggaagtggcgaaggcgaggagaagaagaagaaagagggcggcaagaagaaaggaggcgtgggaaagtccattggttgcgacattttcaatgacgccgccatggaaaacgcctactatgtctgccataatgttcaggtaagtcattacttaaagtacataatctattaaaaataaaaaaaaatatgtaaattattttaggacgttctgaagtcaagaggatttgcttggccggatggccaaaagaagaaaaagaagggaaagcgctaagcggctaaataaaccatttaaataagtgaaataattttagttattttttataaaaatattcttgcaattaagcttatggtataaatgatagtgtacttcccccttggcctggaaaatcgagagctacgcgctcatttttatttttataaatccaaaacaagacatcatcgatcatatccaaacaattccaaaaacgcaggctgccccaagtaaagtgtcagtggcaaacgcttctagaacaaacacacacacacacttttcgatttttcggcgtgcgaaaaatataggaaaccaaaattttattcgttgctgcaccatataaataagtgcaacaatcgcgcttttttcagttcaaaatcaacactagtagctgcagcatcacacattttggatattcagcataaggcgattagtaaccagaaaaaatgggtaaaattccggccatcggcatcgacttgggcaccacctactcctgtgtgggagtttggcagaacagcaaggtggagatcatcgccaacgatcagggaaaccgcaccacgccctcgtatgtggcattcaacgagacggagcgcttgattggcgatccggccaagaaccaggtgagtcatggtctcccatctcaattgtccaaatacgcggattgtctagctccaatatggcctaatgagaattgcgagtgttttaattggaatcatataaggtacacaaataattgtgggaactgaggaaagtgggttgtgagtggtctccttggatacatacttaaatatttgaaataatatgcactgggttaagtcatttaatatgaataaaaacaagaggaaagagcaatctctgagatgcattcacttgaaaaagtatcttagattctcaggactttcacgaatgagaagcatagtgcaattaacttctgtttatccagtaaagtttttaaagcgaaaatgatgcatgatatttcatcaaaatatattattattaaaaggaagtactaataaaattctatagaataagtataaatcttttaatatgtatttattaacgacattatttcccaggtggccatgaatgccaagaacacggttttcgatgccaagcgattgattggacggaagttcgacgacaagaagatacaggaggacctgaagctctggcccttcaaggtcatcaatgagaagggaaagccgaagatcgaggtggagttcaagggcgaacggaagcgatttgcccccgaggagatcagttcgatggtgctgaccaagatgcgcgaaatcgccgaggtctatctgggtggcaaggtgaaggacgcggtggtcacagtgccggcctacttcaatgatagccagcgtcaggcgaccaaggatgcgggctccattgctggactgaatgtgctgaggatcatcaatgagcccactgcggcagctctggcctatgggctggataagaatcttaagggagagcgaaatgtgctcatcttcgacttgggcggcggcaccttcgacgtctccgtactgagcatcgatgagggttccctgttcgaggtgaaggccacggccggcgatacccatttgggtggtgaggatttcgacaaccggttggtcaatcattttgccgaggaattcaagcggaagcacaagtcggacatcaagggaaatgccagagcgttgagacgcctgagaacggcttgtgaacgggcgaagaggacgttgtcctccagcacggaggcatccttggagattgatgccctgcacgagggcattgacttttactcgaaaatttcgagagcgcgtttcgaggagctgaacatggacctcttccggtccaccatgcagccggtggagcgggcactgagcgatgccaagatggacaagaaggccattcatgatgtggtcctggtgggcggctccacgcgtattcccaagattcagaaactactgcaagatctgtttggtggcaagcagctaaatctttcaatcaatcccgatgaggcggtggcttatggagccgccgtacaggctgccattctcaccggcgtgggcagctcacagatccaggacctgctcctcgtggacgtggctcccctttcgctgggcatcgagaccgctggcggcgtgatgaccaacttggtggagcgcaatgcccgcattccctgcaagcagcagcagatcttcaccacctacagtgacaaccagaatgcggtgaccattcaggtgtacgagggcgagcgggccatgaccaaggataacaatctactgggcacctttaacctcaccggcattccgccagctcctcggggagtgccccagatcgaggtggccttcgacttgaatgcggatggcatcctgaatgtgaatgccaaggacaacagcaccgggaagagcgaaaagatcaccatttccaacgacaagggcagactttccaaagcggaaatcgatcgcatgctctcggaggcggagaagtacaaggtcgaggacgatcgtcagagggagcgggttcagtccaagaacaatctcgaggcatacatctacgcatgtcgccaggccgtcgacgacgctccatccggcgttctttccgaaaccgaacgctccaaggtgcgcgacaagtgctcctccgaggcatcctggctggacaagaactcgctggccgagaaggaggagttcgagagtcacctgaaagagtgccagcgcatctgtactccaataatgtcgaaaatccatggcggcaaaaagggcaaatcatcgatgggcaagggttcccatcccactgtggaggaggtggatggatagtacgatccaccgacctaaattattcagtcattttttgattaatattattttgaaaataaagtagaccttcactttcaattcatttcggtgctcatttggcggagctgtaaggaggttctccattcggaaactctttcgattcattctaattccaggtattagcttcttttttttgcggctccatttggtcaagagcaccatgctcattcagtgagtccaactgattttccgggtactaaaagtaatgtttttctattttccaaaagcgaatggaacgctcgagtgcaatgaattgattaaatgttatgtataccgcttaaatatacgtttccaatgttttgcatattaacccttatgatcccatgggcaagctttgaacagtcgggctctctggatacccatccgttcgttttcggatatgagcgatcagtagcaatcgaatatcgtcgcgttatggtcgcaccgagcaaactcctggagccgcccctgaatcgggtgcactgcgccatactgcacagcctgccgggccagagttgcacgaaggccttcctgtggaatctctaccgcaaccatgtgtccagtgccaagtactattcacctttgttgctggtctggtagtaaattcttattaaaaacaaatacaaattaattaaacctactagtatctataattttaatgcattttcttgcagttacctttgataatgaactggcgaaagttgtccaaaagcatggtgctttctgtggccaagaactatgctcaatccgccagttttgctgcctggataaatgccattaccttttacttgatgtgcatgggaaggcgtctcaacgatcgatttgtattcatatttataccatttctgccctgctggattgcctcgcagttgagttggttgatgcctcctcaggtgcttcacttcttcgtgacgggcataacaccagcggtaagaataccctgtaattccaaaaagaactatacaatcgaaaatattcacaggcaatggaaagcctaatg

SEQ ID NO: 41630 - DNA, 1920 bp, DROSOPHILA
atgggtaaaattccggccatcggcatcgacttgggcaccacctactcctgtgtgggagtttggcagaacagcaaggtggagatcatcgccaacgatcagggaaaccgcaccacgccctcgtatgtggcattcaacgagacggagcgcttgattggcgatccggccaagaaccaggtggccatgaatgccaagaacacggttttcgatgccaagcgattgattggacggaagttcgacgacaagaagatacaggaggacctgaagctctggcccttcaaggtcatcaatgagaagggaaagccgaagatcgaggtggagttcaagggcgaacggaagcgatttgcccccgaggagatcagttcgatggtgctgaccaagatgcgcgaaatcgccgaggtctatctgggtggcaaggtgaaggacgcggtggtcacagtgccggcctacttcaatgatagccagcgtcaggcgaccaaggatgcgggctccattgctggactgaatgtgctgaggatcatcaatgagcccactgcggcagctctggcctatgggctggataagaatcttaagggagagcgaaatgtgctcatcttcgacttgggcggcggcaccttcgacgtctccgtactgagcatcgatgagggttccctgttcgaggtgaaggccacggccggcgatacccatttgggtggtgaggatttcgacaaccggttggtcaatcattttgccgaggaattcaagcggaagcacaagtcggacatcaagggaaatgccagagcgttgagacgcctgagaacggcttgtgaacgggcgaagaggacgttgtcctccagcacggaggcatccttggagattgatgccctgcacgagggcattgacttttactcgaaaatttcgagagcgcgtttcgaggagctgaacatggacctcttccggtccaccatgcagccggtggagcgggcactgagcgatgccaagatggacaagaaggccattcatgatgtggtcctggtgggcggctccacgcgtattcccaagattcagaaactactgcaagatctgtttggtggcaagcagctaaatctttcaatcaatcccgatgaggcggtggcttatggagccgccgtacaggctgccattctcaccggcgtgggcagctcacagatccaggacctgctcctcgtggacgtggctcccctttcgctgggcatcgagaccgctggcggcgtgatgaccaacttggtggagcgcaatgcccgcattccctgcaagcagcagcagatcttcaccacctacagtgacaaccagaatgcggtgaccattcaggtgtacgagggcgagcgggccatgaccaaggataacaatctactgggcacctttaacctcaccggcattccgccagctcctcggggagtgccccagatcgaggtggccttcgacttgaatgcggatggcatcctgaatgtgaatgccaaggacaacagcaccgggaagagcgaaaagatcaccatttccaacgacaagggcagactttccaaagcggaaatcgatcgcatgctctcggaggcggagaagtacaaggtcgaggacgatcgtcagagggagcgggttcagtccaagaacaatctcgaggcatacatctacgcatgtcgccaggccgtcgacgacgctccatccggcgttctttccgaaaccgaacgctccaaggtgcgcgacaagtgctcctccgaggcatcctggctggacaagaactcgctggccgagaaggaggagttcgagagtcacctgaaagagtgccagcgcatctgtactccaataatgtcgaaaatccatggcggcaaaaagggcaaatcatcgatgggcaagggttcccatcccactgtggaggaggtggatggatagtacgatccaccgacctaa

SEQ ID NO: 41631 - protein, 633 aa, DROSOPHILA
MGKIPAIGIDLGTTYSCVGVWQNSKVEIIANDQGNRTTPSYVAFNETERLIGDPAKNQVAMNAKNTVFDAKRLIGRKFDDKKIQEDLKLWPFKVINEKGKPKIEVEFKGERKRFAPEEISSMVLTKMREIAEVYLGGKVKDAVVTVPAYFNDSQRQATKDAGSIAGLNVLRIINEPTAAALAYGLDKNLKGERNVLIFDLGGGTFDVSVLSIDEGSLFEVKATAGDTHLGGEDFDNRLVNHFAEEFKRKHKSDIKGNARALRRLRTACERAKRTLSSSTEASLEIDALHEGIDFYSKISRARFEELNMDLFRSTMQPVERALSDAKMDKKAIHDVVLVGGSTRIPKIQKLLQDLFGGKQLNLSINPDEAVAYGAAVQAAILTGVGSSQIQDLLLVDVAPLSLGIETAGGVMTNLVERNARIPCKQQQIFTTYSDNQNAVTIQVYEGERAMTKDNNLLGTFNLTGIPPAPRGVPQIEVAFDLNADGILNVNAKDNSTGKSEKITISNDKGRLSKAEIDRMLSEAEKYKVEDDRQRERVQSKNNLEAYIYACRQAVDDAPSGVLSETERSKVRDKCSSEASWLDKNSLAEKEEFESHLKECQRICTPIMSKIHGGKKGKSSMGKGSHPTVEEVDG

SEQ ID NO: 41632 - DNA, 5425 bp, DROSOPHILA
ggttggatccatactgacaatatgtaaactttgggactgccttctgtgtcatctgtattcattggaacacagttgccatcagcgcgtttaattaacttatctgaattgatttacatgcataccaaattccaaagatcgctcacagagtataaaggaacttgaaaccgatgttcgtttctttacaattatatatttcaagttgcttgacatatatacgtgcatgcatatatttgggcgtgtttgcggcctgtgtttgtttgttttgggtgtgaatctggagtttatggaagtggaaagcgggattgttcacctatccttacattttacggggatcactaggtgttaggaagcatcactatttctgaattgatttgtgccgatttcggaacttaattttcatcaaatgtttgtgtttaaatcgatttatttagtgtaattgttgagttatcttgtaaatacatacatttattatattccaagtttctcacataaactctatgtttatacattttttgtcgctttcatcttgcagttttgtctatactattactaaacctagatacgatatttaagaggcaaccaaagagatctggcttgagatccctggcagcctagtgcgaaacggaccgaatgaacaatttgatttattgaattagtttttttcctttgcttgggtaataagaaatctttcttttagtttactggagtgtttaatacatatactaaatgtaaatatatattgaaaaggttcgtgtgtgtatttttctgtcttcgtgttcagttgtctgtaaagttggttcggttgtgggtgtcagggagtgggtttcaaattggggtgtgcaaaagtcctccagagatcttgagcgtgcccacagctaaaacctaaaacaaacgaaaaagtatgaatatcccagttcacgctggtgattcctttaacttaccagtcctcttcgcatgccagtatggtatagtggtcatgaccacgcccctagggccaatcctagtcggtctttgtctccgtaaactcctccagggcaaaaaagctgccgccggaggggccaccagtgctgctggccgtgctcgtggcaacaacggtggtggatgccgtgccactagatgcctccgacacttgcacttcctcgccggccgagtcggcagccgcctccttgtcatctgcacctccggaagcgctggctgcctgctgtgcggcctccaggacctgttgctgaacctggacgatgggctggccatcttccgtgtacgacacggacactgggatgcgggtaccatcctcgctaatgacatgagcgccttcctcaccatcctgtccctgctggataattaactgcccctcggagttcaacagggaggcatcgataagctgctgttcattgttgtcaccatggacaagtaccatctggccactgccatcggtcatcatctggagggtttcgccctcaagtccctcgccggactgcagaactcctacactttggagcagctgctgtatttgctcgggatcttgcacaattatttggttgccttcggcgtccgtcaggatgtggttgtccagctggaggagatggccgttctcgttaacaatgaacttgatctggccaccttccacctgtgcctgcatggcttcgtcaagttccatggcaacatgctcgccacctgcagcttcacccgcctcgccctcggctccagtactggcagtaacctcgccttcgccagattcaccggcttcagcggtcgtggcattggcctccgactcagttgtgggcgtatctgtagcctcacgcttagcaactacgtctccttcgtcagatggttgtggttcctcagcagcggcggcttcctttgacttggcgctttctccagccttggccttggctttctcttgacctgctttgctagccgtcttggtttcctctgaggcctcagcttcagcagctgcagcctcgttgtcatcatctaaactgggcatggaaaccggtgcggcattggatttgctatcggcagaggaggcctcgccgctttcgcccttggcatcgatgctgccctgggactgtgattcgtcttcggcttgatccaaatttggcatgtcaatgctaacagagacaggtgctgtggtattgggcgaatccttttgcgattggtctccgtccggttgcgggatagtaatgttgaaggttatgcctccactgccctcctgcgaggtaataaccatctcgccgcctttgcttcccggtttgggcgcctcaccgctctcgttcttgtcggagtggagcttttcaaacaggctctcaatgtcggcctctgcgttttgctcgccgctctcgtcaccggccttaccagttgcctctccgggctcatcgcttagtaaagccgtagctgccgaatttagggcagtggctccggccgaagttgccttcttgtcacgtctgtgggtctccatgtggtggttgtagtatgtctcctggatgaaagtcagtgagcaaatgctgcacgagaagaagcgtatgttgttctccgactcggtggttgccaccacagcagctgtcgaagcaggcaggctatcgctcagtgcctcatcaatggtctcttgaaggagcttctgggtgttcaggttctggctaactgactgcttgggcgataccgtcgatgcggaaggactctgatgcacttcgaagtgcttaacaagcatctcccgtttcgggaaggtcatcgaacaagtgccgcacttgaagaagttggtctgatgctgtttggcatgcacagtagcagcttcgcgcgtctcaaagcgctgagagcacaggcggcacttaaaaggcttaggtttaccagcggcatgcttgcgcatatgctcatcaaaaacgaccttgtccgttgacttgaactggcaatgattgcatgtgtatagcgatgttccaaccagattctcgttggcagcagctgcagcggcagctgcagcagcagccacgggagcagctgatgccggtatggtggtggtgctggtcaccagtacattggtagcgtgattcgtctccatgtgcttgcgcaggctgttctcgttcacgaagttaatgtgacacatggcacacgtgttatccatggcggtattgtggtcgcgcaccatgtgctgcttcatggccccaaagtgcgggaagattttgcggcaggtcttgcactggaaggtctgctgcttgcaggtttcataatgcgtgttgaacagccgcatatccgaggttttatagtcacacgaggtgcatttataaatcttggtggccttgcgttggactgtctgggtgccttggacgctgctctgggtggttcctggggcgatcttggactggccaactgtacgattgcagaatatgcattaggaaagctttataatttctgtatttatgtacttacctgggtttccctgcaggagtttacgtggacgcagcaaatccgcactaggactctcctccaacgagcgattggcggatccgccgaccattttctgcatcttgagcggcggactgccttcctggcccatatcctcgttaatggcatacttcttgttaagcaaactgatgaggttcgtcttgacgcgctccacatcgttttccaggcggtcgtagtagttcaccaggttggtacagcgtgagcacacgtaatcctcgccgcaaacaatcacgaggaaaccctcgcccacgagctgggccagtttgttggggaatttggtggaagtgtgcgtggtgcacatatcggttagcgaagtctgtggctcgcagcggtcatcgcagatatagcatcgcgtggctaatccgccgatacccacgccacccgactctgcatcgttgaccgcctgctgctgtgctacgccgccaacggctgaggctcctccggcagaggcacctcctcctccgccaccaccgggtaccaccatacgcgtcgacttgaggattcgcggctggctgggaccggtcacagtgaccgctccgctactgagcagattgttaaacttgcggtaggtggccggattcagttggttgttcatttcgtggcgttttggattcaggtgagcacgccgtagtgatggtgttattcggtttgtgcgggcgctacacgcgcaactgcaagccgctacctttcaatattaatcggcgattacgacaaactacacttctgcactccggtttggcagcttgctgggatttatgtatcgatcgggtacggatgagccactcgaacgaaacaatctatcttttttggacaccaggaacaacaatctcttccgtttttaattttcggtttcgttctgagttgtcgcggcgtcactttgactgtactaaagactcggtgctgtattttttagggttaaaaatgcgtatgtgctgtagcagttctcgacggacgcgtatggtcgtctcgctctttagcatgctcgctgccctggcacggcgggaaaacatgggctagtcgtttcactcgcacgccacggaaatggcggctgcctgggaggtcaaccatggtcagacagagaaaatctcacagcgttgccgttcattacgataacgtaattatttacttgaaataataaagcatttatttttcttattgcgattgctgagtggttaaatacaaataaatacttacttgttgtgcttgtatttgtaaaaggtaaataattagcacattttgtcttgaaaaaaggctcagcgtcattcctatcatgcaatgtcaaaattaacagtgcgttttgtagacagtagagggcgcctttgcccgcccactttaaattcacaaatattctcctcgtaaatatttggcatacccaacctgtgaggtaagcattaaatacttgcatttacgcagtgataaaggccaacatcactaatgtgctaatacataggaccgataagattccgaaattccagttttacctattcgatttaggtatatcttttagccaaaggaaagttgaagggaagggggctctcttatcagtagcgataatataacatacgacctgataaacgttccagccaaaccacagaattcagttaacgaacgaaacgaaaagcgagcggataccgcctcgatcgaagcgaaacataaaaaataaaagcccctggccagttggctttttgttataagagccattatcgcaaggtttatcgggaaatatagtaaacgggtggcgaactcaattgtccggctcgatcgttcagttggccaacagacgtcgcgtactgcaaaagcgcactcaacccgatcgatttgagtcccgcatacggggcgtgagaatatctcccagtatctggaaaccacccctatatatcgaacagtcactgcaaaatgtattcagcaccagcggcaaaaatcaagcactttggctcccttaaaacggtagcagcttgggccggaattc

SEQ ID NO: 41633 - DNA, 3365 bp, DROSOPHILA
cgagacgaccatacgcgtccgtcgagaactgctacagcacatacgcatttttaaccctaaaaaatacagcaccgagtctttagtacagtcaaagtgacgccgcgacaactcagaacgaaaccgaaaattaaaaacggaagagattgttgttcctggtgtccaaaaaagatagattgtttcgttcgagtggctcatccgtacccgatcgatacataaatcccagcaagctgccaaaccggagtgcagaagtgtagtttgtcgtaatcgccgattaatattgaaaggtagcggcttgcagttgcgcgtgtagcgcccgcacaaaccgaataacaccatcactacggcgtgctcacctgaatccaaaacgccacgaaatgaacaaccaactgaatccggccacctaccgcaagtttaacaatctgctcagtagcggagcggtcactgtgaccggtcccagccagccgcgaatcctcaagtcgacgcgtatggtggtacccggtggtggcggaggaggaggtgcctctgccggaggagcctcagccgttggcggcgtagcacagcagcaggcggtcaacgatgcagagtcgggtggcgtgggtatcggcggattagccacgcgatgctatatctgcgatgaccgctgcgagccacagacttcgctaaccgatatgtgcaccacgcacacttccaccaaattccccaacaaactggcccagctcgtgggcgagggtttcctcgtgattgtttgcggcgaggattacgtgtgctcacgctgtaccaacctggtgaactactacgaccgcctggaaaacgatgtggagcgcgtcaagacgaacctcatcagtttgcttaacaagaagtatgccattaacgaggatatgggccaggaaggcagtccgccgctcaagatgcagaaaatggtcggcggatccgccaatcgctcgttggaggagagtcctagtgcggatttgctgcgtccacgtaaactcctgcagggaaacccagttggccagtccaagatcgccccaggaaccacccagagcagcgtccaaggcacccagacagtccaacgcaaggccaccaagatttataaatgcacctcgtgtgactataaaacctcggatatgcggctgttcaacacgcattatgaaacctgcaagcagcagaccttccagtgcaagacctgccgcaaaatcttcccgcactttggggccatgaagcagcacatggtgcgcgaccacaataccgccatggataacacgtgtgccatgtgtcacattaacttcgtgaacgagaacagcctgcgcaagcacatggagacgaatcacgctaccaatgtactggtgaccagcaccaccaccataccggcatcagctgctcccgtggctgctgctgcagctgccgctgcagctgctgccaacgagaatctggttggaacatcgctatacacatgcaatcattgccagttcaagtcaacggacaaggtcgtttttgatgagcatatgcgcaagcatgccgctggtaaacctaagccttttaagtgccgcctgtgctctcagcgctttgagacgcgcgaagctgctactgtgcatgccaaacagcatcagaccaacttcttcaagtgcggcacttgttcgatgaccttcccgaaacgggagatgcttgttaagcacttcgaagtgcatcagagtccttccgcatcgacggtatcgcccaagcagtcagttagccagaacctgaacacccagaagctccttcaagagaccattgatgaggcactgagcgatagcctgcctgcttcgacagctgctgtggtggcaaccaccgagtcggagaacaacatacgcttcttctcgtgcagcatttgctcactgactttcatccaggagacatactacaaccaccacatggagacccacagacgtgacaagaaggcaacttcggccggagccactgccctaaattcggcagctacggctttactaagcgatgagcccggagaggcaactggtaaggccggtgacgagagcggcgagcaaaacgcagaggccgacattgagagcctgtttgaaaagctccactccgacaagaacgagagcggtgaggcgcccaaaccgggaagcaaaggcggcgagatggttattacctcgcaggagggcagtggaggcataaccttcaacattactatcccgcaaccggacggagaccaatcgcaaaaggattcgcccaataccacagcacctgtctctgttagcattgacatgccaaatttggatcaagccgaagacgaatcacagtcccagggcagcatcgatgccaagggcgaaagcggcgaggcctcctctgccgatagcaaatccaatgccgcaccggtttccatgcccagtttagatgatgacaacgaggctgcagctgctgaagctgaggcctcagaggaaaccaagacggctagcaaagcaggtcaagagaaagccaaggccaaggctggagaaagcgccaagtcaaaggaagccgccgctgctgaggaaccacaaccatctgacgaaggagacgtagttgctaagcgtgaggctacagatacgcccacaactgagtcggaggccaatgccacgaccgctgaagccggtgaatctggcgaaggcgaggttactgccagtactggagccgagggcgaggcgggtgaagctgcaggtggcgagcatgttgccatggaacttgacgaagccatgcaggcacaggtggaaggtggccagatcaagttcattgttaacgagaacggccatctcctccagctggacaaccacatcctgacggacgccgaaggcaaccaaataattgtgcaagatcccgagcaaatacagcagctgctccaaagtgtaggagttctgcagtccggcgagggacttgagggcgaaaccctccagatgatgaccgatggcagtggccagatggtacttgtccatggtgacaacaatgaacagcagcttatcgatgcctccctgttgaactccgaggggcagttaattatccagcagggacaggatggtgaggaaggcgctcatgtcattagcgaggatggtacccgcatcccagtgtccgtgtcgtacacggaagatggccagcccatcgtccaggttcagcaacaggtcctggaggccgcacagcaggcagccagcgcttccggaggtgcagatgacaaggaggcggctgccgactcggccggcgaggaagtgcaagtgtcggaggcatctagtggcacggcatccaccaccgttgttgccacgagcacggccagcagcactggtggcccctccggcggcagcttttttgccctggaggagtttacggagacaaagaccgactag

SEQ ID NO: 41634 - protein, 996 aa, DROSOPHILA
MNNQLNPATYRKFNNLLSSGAVTVTGPSQPRILKSTRMVVPGGGGGGGASAGGASAVGGVAQQQAVNDAESGGVGIGGLATRCYICDDRCEPQTSLTDMCTTHTSTKFPNKLAQLVGEGFLVIVCGEDYVCSRCTNLVNYYDRLENDVERVKTNLISLLNKKYAINEDMGQEGSPPLKMQKMVGGSANRSLEESPSADLLRPRKLLQGNPVGQSKIAPGTTQSSVQGTQTVQRKATKIYKCTSCDYKTSDMRLFNTHYETCKQQTFQCKTCRKIFPHFGAMKQHMVRDHNTAMDNTCAMCHINFVNENSLRKHMETNHATNVLVTSTTTIPASAAPVAAAAAAAAAAANENLVGTSLYTCNHCQFKSTDKVVFDEHMRKHAAGKPKPFKCRLCSQRFETREAATVHAKQHQTNFFKCGTCSMTFPKREMLVKHFEVHQSPSASTVSPKQSVSQNLNTQKLLQETIDEALSDSLPASTAAVVATTESENNIRFFSCSICSLTFIQETYYNHHMETHRRDKKATSAGATALNSAATALLSDEPGEATGKAGDESGEQNAEADIESLFEKLHSDKNESGEAPKPGSKGGEMVITSQEGSGGITFNITIPQPDGDQSQKDSPNTTAPVSVSIDMPNLDQAEDESQSQGSIDAKGESGEASSADSKSNAAPVSMPSLDDDNEAAAAEAEASEETKTASKAGQEKAKAKAGESAKSKEAAAAEEPQPSDEGDVVAKREATDTPTTESEANATTAEAGESGEGEVTASTGAEGEAGEAAGGEHVAMELDEAMQAQVEGGQIKFIVNENGHLLQLDNHILTDAEGNQIIVQDPEQIQQLLQSVGVLQSGEGLEGETLQMMTDGSGQMVLVHGDNNEQQLIDASLLNSEGQLIIQQGQDGEEGAHVISEDGTRIPVSVSYTEDGQPIVQVQQQVLEAAQQAASASGGADDKEAAADSAGEEVQVSEASSGTASTTVVATSTASSTGGPSGGSFFALEEFTETKTD

SEQ ID NO: 41635 - DNA, 3960 bp, DROSOPHILA
gagctaatccgcgccagcgcacgcagaatgaacatgggtgttctgaattgctatgtgaattttgcggccttcagcacaggggatctagattcggtgccggaacgggaacgccacctgagcagcatgctgaccaaggccatggagccggtggtgtgccgcacggagttccttaactttcagctggacatacgggtgcttattctcgacgatgacggctgcctgctcagcactgccatcaattgctgcggagtcgctttggtggagtgcggcatttccacttacgacttaattacggcctccacagcttgtatctatcgggatcacgtcttcctgaatcccagtgccaaggttgaggagctgctctggaagcatcgcaacagcagcaccgatagcacaaccagcccatcatccgcccaggagcacggcctgatcattaccgccagcatggatacctttgaacagatcgcccagtgccagcagtgcggatatctcagtccagccacctatgtaaagctgctggattacaccctggccattaacaagtccctgagagaactagtcaaaggcgtgctcacgaagcgggtgaaggagcagcacgaactagatctacgcgagaaagccgagaccgctctagaagatcagcgtttggaggaaataatcgagaagctaaagaagcaaggaccagaggagtttatacaatcgaacatccgggaggatccctatgtaaagaggcagtagttggttgagaataaatcatactaatataaatcccagatctatttgaacaacaaccaccacttaaaaaatgattactacaaatatttagagtccagataaaacttttattcgttatttttgcacttccaaagttccgaatagcttcgaaaataataacatcaaatgcgtagcgcgcttcaaaactttaattcagacttgtatctttccgaaagtgaatttgtagaactgtagtgtatctagcaattcttaaaatgccttttatctactgctgatccgtggaggcctcaagcacggctccggagtaggccagatcccagtagtgttcgacctggtgcttctgaaaaaactcacgggccattttttccattggaaagatcttaaacttgatctcgccaaagtgccgtcgctgactagtcccctcccagacgagtacgcatgagttcggcacgtcctggccgtcattgcccttggcgttgtcctcctcccacttaatgcgcgttagcatgagcctgcgatactttttctgctgcttgggcccaccctccacgacaaccacacagcaatcccggaacaacaccacgctgccggtcatctgcagctgcttggcattggtctccaccttgaatttcttgctctggttgtcctgcagatctcgtatgcgatagacgctgacatgtacaccgcagctggtgtcttccctcagcttgcgctgcttcttttcgctcttctgctcgctggtcagcttgcgcgcattgttggcatcttcgtgcgccttctgccgcttggccatctggtcgcgcacatgctgctccattttggtcggatcttgtacggcctccgagccaagcacacgcatcaggttggatatgcgcagtttcggctctggtggggccaccaaacccagtcggatcttctcctgctcctccttccaggcctcgcgacggttctggcgacgaagctttttgcgctctttctttgtgaggaaaaccggcagatacactggtttcaagggctcatctgaaggagtaggtggttagttgcttgtgggacatgttctagctttcaacttacttggcggcttcatttgtgtgggatgctctataaggttggttatggctgtttggcgtatgcttatcttaccgcttgcgtcgtctaccgtctccagatcctgggtcagtataactgagtcccaccactccatggcaggcacatcgtccggcatgtcctgcttgggggcaatcaatgccagtttggtggccgacgagatgcccgttttccgggctatttgcgaaatctcattctgtagtcgctccagctggcttttcatgcgcattcgttcggccagctgctggaactttccgggctcgtggaatctcaacgtcctcttggttctaacagtgggcttcagggctatgcggtcgtcaaagtacttaatagcttcttcctgggccgaagtgcccgattcactccgttcacccaaacccgtttggcgttggaacacctcccgtttcttggcgcgtatgttggctttcaatgtaggtgtcaccgtgggaatattaatggtacgtccgctcttgtccacagtgcgtccttcatcgtccagaatcaggggtttgggtcgctcctgcgcttgagcagcagctgcagcggcggccgctaccgcagtgggctgaatcaaactagccaaattgccagtaagcttggccctgatctgtgcctgcaactcggcaatcttcctggccttctccgagtcctcgggcgtgggcttcttcgccagcgcttgagtggctaaggcaactggcattccgatcgatggaactgacgccagcagcggatccttgtctcttagattactcagggcccgcttgcgttcctcgatctcccgctgggcatgggccatcatcagcttgatctgcgtggaactcagcgaggcgggcacggcgacctcttctttcttctcaccaccgccgccattcttttccgggacatcgaagcgggatttcttgggcgcttcaagggcgcttccaccaccacttttggaatctgaggcggcagcgcgctttttggacaatttctggtcgtcgccatccttgcgcgtgataatggacgacataattcgcaattaaatgggtcggactaaaaagtaaatgttatttaccaactgcttggcacattccttgagcttaaatcagcgatttgcaattcaaaaacaatacacaaggtttttggtctttggtgaaaaattctccgaaacacgttaggacagggtcgttaaaaaaacataaaagtcagggttgtcatgtcgccagtgtgaccgtttcgctttcttttatcggggtgcaaccctagttctctcactttttgtcgctctccgctccgccatatttgttgaagccgcttacaattgactatttttttctcgtcgtgtctgtgtgtgcttaattatttgttgtggaaattaagacaatttcgtgtgctcaaacagtgtaaaagttgcattcgagtgctacaatggcatcggaggaagagaatgacgataatttccagggtaagtgcattgtttcagtcggccaaatgtcggcgtgaaaaaaactcggtccgaccgtcgctcggtcaggctaagaaccgtggtcatgttcaagagccgcaaagccgcgcagcgtgctgcgtccccctcccattgtttattgttgcctattatcctaattggtcattgtcattgctgtacctcgttataaactatttgtattacagcaattggtgaaatttgtacatgtgtggcgcgtttttttggggtcttttgcgcctcctccattccacacatattttttattgcatttttgtgttccctccattcgcgaatgcaggcaatatatagacgtcctgctcactcatcaaaacatatgttttacatggttgttttggtcgaaagttttgagtggaatactctgtaaatcctttaaaattaagttttatcttaagttctttagcaattaagatgtttactttacctgtgaattgtcaagtgtcaattgtaatatacggaaaattcattttagttcacacttattgtggtgttaccgtatatgcagtgttatcatcggctgtgcaatggtatcaccagaaaaatagtgtgccccttttggagctagtcgagaatgcccagacggcctcatctgccaccatttacattcattgttgcttggacgtggcagccatgac

SEQ ID NO: 41636 - DNA, 1906 bp, DROSOPHILA
ccttgtgtattgtttttgaattgcaaatcgctgatttaagctcaaggaatgtgccaagcagttggtaaataacatttactttttagtccgacccatttaattgcgaattatgtcgtccattatcacgcgcaaggatggcgacgaccagaaattgtccaaaaagcgcgctgccgcctcagattccaaaagtggtggtggaagcgcccttgaagcgcccaagaaatcccgcttcgatgtcccggaaaagaatggcggcggtggtgagaagaaagaagaggtcgccgtgcccgcctcgctgagttccacgcagatcaagctgatgatggcccatgcccagcgggagatcgaggaacgcaagcgggccctgagtaatctaagagacaaggatccgctgctggcgtcagttccatcgatcggaatgccagttgccttagccactcaagcgctggcgaagaagcccacgcccgaggactcggagaaggccaggaagattgccgagttgcaggcacagatcagggccaagcttactggcaatttggctagtttgattcagcccactgcggtagcggccgccgctgcagctgctgctcaagcgcaggagcgacccaaacccctgattctggacgatgaaggacgcactgtggacaagagcggacgtaccattaatattcccacggtgacacctacattgaaagccaacatacgcgccaagaaacgggaggtgttccaacgccaaacgggtttgggtgaacggagtgaatcgggcacttcggcccaggaagaagctattaagtactttgacgaccgcatagccctgaagcccactgttagaaccaagaggacgttgagattccacgagcccggaaagttccagcagctggccgaacgaatgcgcatgaaaagccagctggagcgactacagaatgagatttcgcaaatagcccggaaaacgggcatctcgtcggccaccaaactggcattgattgcccccaagcaggacatgccggacgatgtgcctgccatggagtggtgggactcagttatactgacccaggatctggagacggtagacgacgcaagcggtaagataagcatacgccaaacagccataaccaaccttatagagcatcccacacaaatgaagccgccaaatgagcccttgaaaccagtgtatctgccggttttcctcacaaagaaagagcgcaaaaagcttcgtcgccagaaccgtcgcgaggcctggaaggaggagcaggagaagatccgactgggtttggtggccccaccagagccgaaactgcgcatatccaacctgatgcgtgtgcttggctcggaggccgtacaagatccgaccaaaatggagcagcatgtgcgcgaccagatggccaagcggcagaaggcgcacgaagatgccaacaatgcgcgcaagctgaccagcgagcagaagagcgaaaagaagcagcgcaagctgagggaagacaccagctgcggtgtacatgtcagcgtctatcgcatacgagatctgcaggacaaccagagcaagaaattcaaggtggagaccaatgccaagcagctgcagatgaccggcagcgtggtgttgttccgggattgctgtgtggttgtcgtggagggtgggcccaagcagcagaaaaagtatcgcaggctcatgctaacgcgcattaagtgggaggaggacaacgccaagggcaatgacggccaggacgtgccgaactcatgcgtactcgtctgggaggggactagtcagcgacggcactttggcgagatcaagtttaagatctttccaatggaaaaaatggcccgtgagttttttcagaagcaccaggtcgaacactactgggatctggcctactccggagccgtgcttgaggcctccacggatcagcagtag

SEQ ID NO: 41637 - protein, 598 aa, DROSOPHILA
MSSIITRKDGDDQKLSKKRAAASDSKSGGGSALEAPKKSRFDVPEKNGGGGEKKEEVAVPASLSSTQIKLMMAHAQREIEERKRALSNLRDKDPLLASVPSIGMPVALATQALAKKPTPEDSEKARKIAELQAQIRAKLTGNLASLIQPTAVAAAAAAAAQAQERPKPLILDDEGRTVDKSGRTINIPTVTPTLKANIRAKKREVFQRQTGLGERSESGTSAQEEAIKYFDDRIALKPTVRTKRTLRFHEPGKFQQLAERMRMKSQLERLQNEISQIARKTGISSATKLALIAPKQDMPDDVPAMEWWDSVILTQDLETVDDASGKISIRQTAITNLIEHPTQMKPPNEPLKPVYLPVFLTKKERKKLRRQNRREAWKEEQEKIRLGLVAPPEPKLRISNLMRVLGSEAVQDPTKMEQHVRDQMAKRQKAHEDANNARKLTSEQKSEKKQRKLREDTSCGVHVSVYRIRDLQDNQSKKFKVETNAKQLQMTGSVVLFRDCCVVVVEGGPKQQKKYRRLMLTRIKWEEDNAKGNDGQDVPNSCVLVWEGTSQRRHFGEIKFKIFPMEKMAREFFQKHQVEHYWDLAYSGAVLEASTDQQ

SEQ ID NO: 41638 - DNA, 3011 bp, DROSOPHILA
ataacaatgccgcctacgttccggaaacccgttccatggccgagaccatccaggtgaacgagggagccatcgtgcgggcggcgcacttgtcgatggactcgaacctaatggatcgtcgcttcagggacctcaacgcgtaccagcagtacccgcctccgaatccgcagcaaagtcgcccgctgaagcaatcttcgcagaatcccatggagaccattgtggtggccacctcgggattccccgtgccggactactccccgcagcccagtcccaatggcgttctgcgccacaaccagtactagattactaagccccttggcgcccccaaaaaagccctcttcgatactataattctcaaataatcccagctaaagtttagttcaaattttatcagggggggcaacttcttctgcgtttttattcttatttatttgcatgtttataacgatataagtgtacagctgtaaatatataaagccgttctagttccgcagtggaatggtatttgtttatatatgctaatttgttttttttttttttttttgtagagctgataaggaaataaatcggcccccagcaacgattaattgggagtagataagaaatacaggaggagcatcgacgtgttgtcggaaattaagatgactgctttaatctttagtctgatctcaacatttagaagagataaaagtaaagcacctgtttgaaaaatacattatgtatgtttgatttctttacattttttaatatttcaaatagaagcaaccattttgacaacttatgtaattgaagtatttttgtggtgcactattttctaattaaatcgaaagtgcgaaagctcaaatttaattataagaaatacagtccaccaataaactaaataaatcttgaagttttcaatctgcccgccgaaatgttgggcagtgcgataaccggtaatctattatcgctatcgatatgcatgccttacgccatttttaggcacattttgaagaagccgctgtttactcgggtcaacaaaagttcacgaattatattctggattgtgataagccgggcaatattcgactttcatcccgattgccgggcattaaacgtagcgtgtgtgttttcaaatcggatcacttgtcaccgaaacacccccgggaacggttggaaaattcatctcgccggcagttgcctttgtttttgactgggaaaatatggtattcataacgaaattcgcaaggattgggctgcaggccgcccgccagcttagtgtcacgccccttggcgccgtccaggctcgcgccattcacctgacaagccttctagccaaaggtaaggcaattgtttatgcaatagccactgaatctcaaactgtaatccccgccagaacgccgatacacaaacaaacacgagtgggtggaggtggtatccggcagcaatgccatagtaggcatctccagctacgcccaggaggctctcggggatgtggtgttcgcccaactcccagaacccggcacggaactcaagcaggatgacgaatgtggggccctggagagcgttaaagcggctagcgaggtgtattcacccgttagtggcaaggtaattgaaaagaatgccgaggtggaggacacaccggccctagtcaacagcagttgctatgagaagggtaagatttgcgtgaagacccctttttaacttcacttgaaacacgtacttttcttttacaggctggcttttcaaggtggacctgaagaatcccaaggaactcgaagcccttatgaccgaggatcagtacaaagccttcctgagcagcagtggggatcactagaaccagcagctaatcctaaccctaaagcatcttgactgtagcctttaaaacgagtaattgttagcatttgttatcagctgaataacgctacactcatacccaaatatcaccaaccaaactcatcgccatacacacgttgttgtagctcttgaaatttgttacgaataagaatcaacaataaatccaaatgttatatttaaattgggcatcttgacctgcgggtggcagacgtcgtctgctcccccatggaaaccttctaggtgataagaccaaaagaccgaagagaaaacgtgttgagagttgctcaaagataagaagtcactcaacagaagattaagagagcggacaaggcactcagtttcataataatacagatcagcttaatacggcgtgcttggctggaattaagaaaaaacatttaacactgttgcttggacacgcgatggcgcacgccacggcactcagccatcacctgatggattcgatgatggaccgatgacacacctacctctctggaaagttacgccgtgctctggcgataaggatgtccaagtcgcgccttgaaaatacatatgcccgatcaagttgataagccttacaaaaagcgccgcccatgtctcattgaacttgaagagcgtgttcgcggaagcttttccattcggaaagctatggcaacggaggcgaaaagcttggcagtagctcattcgaatggtcagtgctcaaaaagaactcattccgtgcggtgcgagaagcgcatgctgctcgagaaccaacccctgaaaataataaaaacaatcacacaaagctaaggataattgcaaaacaggataattgaaaacctaaagcaaggaaaaacagttgaaggacatacacaaataactaaaaccacaactcaataacaaaatgccagcggaaaaatcaatatacgatcccaacccggccatcagccaaaatgcctacatatccagcttcgaggagtaccagaagttctaccaggagtcactggacaatccggccgagttctggtcccgcgtggccaagcagttccactgggaaacgccagccgatcaggataagttcctcaagtacaacttcaacatctcgaagggacccatttcgatcaaatggatggagggtgcctccaccaatctgtgctacaatctcctagatcgcaacgttaggaacggcctgggcgacc

SEQ ID NO: 41639 - DNA, 896 bp, DROSOPHILA
tttactcgggtcaacaaaagttcacgaattatattctggattgtgataagccgggcaatattcgactttcatcccgattgccgggcattaaacgtagcgtgtgtgttttcaaatcggatcacttgtcaccgaaacacccccgggaacggttggaaaattcatctcgccggcagttgcctttgtttttgactgggaaaatatggtattcataacgaaattcgcaaggattgggctgcaggccgcccgccagcttagtgtcacgccccttggcgccgtccaggctcgcgccattcacctgacaagccttctagccaaagaacgccgatacacaaacaaacacgagtgggtggaggtggtatccggcagcaatgccatagtaggcatctccagctacgcccaggaggctctcggggatgtggtgttcgcccaactcccagaacccggcacggaactcaagcaggatgacgaatgtggggccctggagagcgttaaagcggctagcgaggtgtattcacccgttagtggcaaggtaattgaaaagaatgccgaggtggaggacacaccggccctagtcaacagcagttgctatgagaaggggctggcttttcaaggtggacctgaagaatcccaaggaactcgaagcccttatgaccgaggatcagtacaaagccttcctgagcagcagtggggatcactagaaccagcagctaatcctaaccctaaagcatcttgactgtagcctttaaaacgagtaattgttagcatttgttatcagctgaataacgctacactcatacccaaatatcaccaaccaaactcatcgccatacacacgttgttgtagctcttgaaatttgttacgaataagaatcaacaataaatccaaatgttatattt

SEQ ID NO: 41640 - protein, 177 aa, DROSOPHILA
MVFITKFARIGLQAARQLSVTPLGAVQARAIHLTSLLAKERRYTNKHEWVEVVSGSNAIVGISSYAQEALGDVVFAQLPEPGTELKQDDECGALESVKAASEVYSPVSGKVIEKNAEVEDTPALVNSSCYEKGLAFQGGPEESQGTRSPYDRGSVQSLPEQQWGSLEPAANPNPKAS

SEQ ID NO: 41641 - DNA, 5082 bp, DROSOPHILA
aacaacgccagtagcagcagcagcaacagcaaacgagcgattgcccggcgtcgctccacatcggagaggaccaaggcgagcggatcgacgggaggaggagctggtggcgtccgcaccaggctatcggtgccggccaagtatgagaggcgctgacgcaggcgccgccgctgctgctgctgctgctccaactcatcctcatcctcatcgtcctcctcctcctcctcctcctcaataatcgcctcccgttgaccacatgcatcgcagggcttagtttgtttaattcgtagacgcaatgccagaccaggccattttgcaaaccctaagtttattgctatatattctattctattatgttgtgttatattttaactgattgatcatgttggacatttgttaagacttgtgtcgaatttgaaattgacctcaaaatcgttcatttggttcgttgctaccagttgctacgccacaattgtatctaaaatcaaatatactttaattctaatttggcagttacttaaacttaacaaatctacagggctaatggaaaatcaaaattcaaaatcgatttgaattcccatgcttacacttcacatccggtttggattgtgtaaaccaaccttttgtggcgaaacaatgagacaattttatcatatgtaattagtgcagagtgtatacaaatatatatatatatatatttacagcagcaataagtaagtctatttttaaagtaaagttcgtacaagcgaaacaaacagctccaaaaaaaaaatccagcaagaacactatcactagagcctacgactacatacatttatatatacgtatacatgcataaataaaaatccacttcgagcacacgcaaaattaatattgctaaaagccactgaataaagtttgcatatatatattttcacacaatgcgtttgtgtcgcctgcaattgccagttttaaaagcggtttgtagttatgggtaataaaaagagcacagcgtttattctttatatgtagatatatttcgtattaattgaatcatttgaatcaactgccagtggggggaacaaataattattgggagttagtggctgaacttcagtttctcgcatgaccttaaacgttaaatgtttgaatgcacttctatttcacaaaatttgggttctttttcagtataacgaagccctccatgaccggagtgagggccagatactcatcggtggccagctcggcgcgctcgccaatggccagcaggacgggcgtggtgtgcgtttggaagccggtgatggtcttcggcttgcctgcctggccgaccacatcgatggcaatgccgacgcgcacgggcacctgcagctgattgagctcctcatcgaaggtgatcagcatgcgagcctgcatggcaggcaccagtgtgtagagcagatagtgcgatcggttcagtatcaggttcttcacgtccagcagggaaaccagcgtagccatcagtccagcgacggccatggggttcatcagctgcctatcgctgtggtagggactcagcgagagcgtgcccttgcccaagtgcgtcaagctctgggcgatgcgcaccatgaacagattgctgggatccttagaatggtactgcgccaactggcgtagcatggaggccagccgagcgttattcgtgccggcgcccaccaagcccatggcgaagatcgcattgtgggccacctcggcgtcgctatcgtgcgagaacttgctcagcgtgtcgatgatgttcagcttgggattggaggcggatatcaggcccaatgccagtggtacggcccgacgaatggctggctcgcaatagcgcagcaggtttccaaacgagcggtatgccatttcggcaccaatgtcctcgcccatggcgatcagggcaattcccagcacggcgatcgattgggtggccgacaagtccttctcgcgttccttttccttctctttctccttctccttttcctacaaagttaacgaattgaagaaattagctgaaggaactaaaaaacgaatggcgaactgcggcattaccttatccttgcccttgtccttcttgctcttttccttctcgtcatcggcactggacgtctcgtagtgatcggagcagatgtggagcagctgttggatcttgaggacgttgccagtaccagcgtatgcgcaaatgtccaccatggtagtggccatgctgcggtacggctcttccaaaacctccaaggtcatcatcacggcttcggtggacttttggcggcccaagtaaagcagacccagacccaaaaacaggaacctcgtgtaggtgtccttcagatcggccttggtcagacccataatcgtctgcagcaagatctcggtgatctccgaattgcacgaaccaacactgatgagacccagcgacagagccgtaatacccaatatctccacgctggccgaactcttgttgttgctgccaaacgagaagaccgtcttcagggtgtcgatcacaatggagcgattggagccagcgtaggcgatgcccagaccgaggatggcgccaacgcgcatgcaggagttctggttgtcgatataatcggagagcagagcatgagccggatcgacttcgttacggatgccgcagttgacgattccgcaagccagcaaagcgccggacttgatgttgtcatcggtggagtacaagtacttatcgatcatggtcagaccaccatccacatcccacagaagtatcaaacccagcgatgcggtggccgagagcatgccgtgctccttgttcttgtacaaccatttgtttccgtcttccgacagcaacttgtccacaccgaaaccggcgttaacaaaaccatttacaaagctagcggccagattttgcttggcagagtctacctggatggatgcaaagcgggagcgcgagttgtccaaatgcgacttgtaaatgtcctcaggcgttttgggctccatgatgtccagttcgcgagccagattgaggaaatgcttgttcagattagcattcgacatgatctccatgagatcatcgtagtccggcaccaattcatccagctccaggcaaatctgttggcgggccagcataaaggccagctgcttctgcatggccggctccttgggctccttgaagatctcaccgatcttgtccatatcgttgagcatcaacgccagtcgcatggcctgtgtgtactggttgaacttgcgcgacagctggagcgcggtttccaggataatggtgttgtccgggtcgggaacatacggatagcaggactgcagatagagacagacgcggggataggccgactcgtccacaaagtcgctcagcaggtgcaagtgatcgatttcgatcagcagatcgcaggcatcagcctcggcattgtgctccatattgtacgggatgatctgcttgaccagttcgatgagctgtacacgaaagtctcccgttgtatcgtgatagtgggccgaaatttcgccagacaaatgacgcacatactcatggccccagtccccgatgcgctgcttgcgatcgcagaggaatcggtaggccaggcaatccttgccgctgcccatggtcatcgagagcactgagatgatgtcggcgcacaactggcgagcctgctcattgggcatgtgcttgtacaccgtcttcatggtttcgtagtgcgggcgcatgaacttcaaaggcttgggcaccgaggtcatcgacgtcgtggaggctctgatcaatttggccatactctccagcgtcggctggtagagcttggcatccggctcctgcaagtgctgcaccagcagctccagctcctcctgcagctgctggtcctcgtcggagagctccggctgctgctccttgtccttgccgtccttcttttcatccttcttggccttcggatccttggcatcgccttcggatgccgccggcttcagcggcttcttctccagcttggtctcgcccgtcatgatttctttcctagcttgtcggacttaagggatttaattggcactacgttttcttcgattgtaatgcggtttatgcggctttgttccttctttttcgttgttgaaacagcagaattacacagcgctttttgcagtgtgaccgcgcggcgaacgccaggctatgccgcgctaatctgtttaaaataccagaataatcagctaccgttaccacgagctggtaacgttcaaatagtgatggcagtgactttcaccttatcgatttttaggggccttgccaatcaaaattgaaaggtttagaaagtgaaagaaaaagctaactatatttgtgtatgtgtatatatttaaaaatgttgtgatatgcagatattttaaatatccatttaacttccggcctttgcagttgtattagctgtaattccttgatatcaacggagatcgtttatattttcaaacatgttgggctacttatgacacaatgcgttattttctggccaaaaaactcttgtctgcttttgctgcggaagtatttggtgaagtagcgagtcccaatatgcaaaaatgggtctcttgaaattaactgatctaatctgatttcttcagaaattggttgatggttggttaggatgttaatggatctctctagttccaacattcatcctgcgtaatatcttcgtgagtttaggaaaaacattatttcactgacactgattcattagatgaattctcggcatctcctacaaaactgtctccgtcatcggaccccaaaagctgtgaatttgagaaatcctcttgatccgaggtattgtggttctaatttttttctctcttgactttcatatcagcagcaatggcagaacttttggtcctgcaaaaaaaggaatcagtcgtcaggtgtatataatattagagatatgggtttcaaactatgaatgggtaactccgaaataatggctattccgcatggcttttacttgtcttgaattttcttttaagataatactaaagctagcctcgcaactcttcactgaaattcaaaagtaaaatctataacgcgggcatatatcctaccatcagtattctattccgcgacacactattccaggcctgatgcaaggccat

SEQ ID NO: 41642 - DNA, 3013 bp, DROSOPHILA
tgtaattctgctgtttcaacaacgaaaaagaaggaacaaagccgcataaaccgcattacaatcgaagaaaacgtagtgccaattaaatcccttaagtccgacaagctaggaaagaaatcatgacgggcgagaccaagctggagaagaagccgctgaagccggcggcatccgaaggcgatgccaaggatccgaaggccaagaaggatgaaaagaaggacggcaaggacaaggagcagcagccggagctctccgacgaggaccagcagctgcaggaggagctggagctgctggtgcagcacttgcaggagccggatgccaagctctaccagccgacgctggagagtatggccaaattgatcagagcctccacgacgtcgatgacctcggtgcccaagcctttgaagttcatgcgcccgcactacgaaaccatgaagacggtgtacaagcacatgcccaatgagcaggctcgccagttgtgcgccgacatcatctcagtgctctcgatgaccatgggcagcggcaaggattgcctggcctaccgattcctctgcgatcgcaagcagcgcatcggggactggggccatgagtatgtgcgtcatttgtctggcgaaatttcggcccactatcacgatacaacgggagactttcgtgtacagctcatcgaactggtcaagcagatcatcccgtacaatatggagcacaatgccgaggctgatgcctgcgatctgctgatcgaaatcgatcacttgcacctgctgagcgactttgtggacgagtcggcctatccccgcgtctgtctctatctgcagtcctgctatccgtatgttcccgacccggacaacaccattatcctggaaaccgcgctccagctgtcgcgcaagttcaaccagtacacacaggccatgcgactggcgttgatgctcaacgatatggacaagatcggtgagatcttcaaggagcccaaggagccggccatgcagaagcagctggcctttatgctggcccgccaacagatttgcctggagctggatgaattggtgccggactacgatgatctcatggagatcatgtcgaatgctaatctgaacaagcatttcctcaatctggctcgcgaactggacatcatggagcccaaaacgcctgaggacatttacaagtcgcatttggacaactcgcgctcccgctttgcatccatccaggtagactctgccaagcaaaatctggccgctagctttgtaaatggttttgttaacgccggtttcggtgtggacaagttgctgtcggaagacggaaacaaatggttgtacaagaacaaggagcacggcatgctctcggccaccgcatcgctgggtttgatacttctgtgggatgtggatggtggtctgaccatgatcgataagtacttgtactccaccgatgacaacatcaagtccggcgctttgctggcttgcggaatcgtcaactgcggcatccgtaacgaagtcgatccggctcatgctctgctctccgattatatcgacaaccagaactcctgcatgcgcgttggcgccatcctcggtctgggcatcgcctacgctggctccaatcgctccattgtgatcgacaccctgaagacggtcttctcgtttggcagcaacaacaagagttcggccagcgtggagatattgggtattacggctctgtcgctgggtctcatcagtgttggttcgtgcaattcggagatcaccgagatcttgctgcagacgattatgggtctgaccaaggccgatctgaaggacacctacacgaggttcctgtttttgggtctgggtctgctttacttgggccgccaaaagtccaccgaagccgtgatgatgaccttggaggttttggaagagccgtaccgcagcatggccactaccatggtggacatttgcgcatacgctggtactggcaacgtcctcaagatccaacagctgctccacatctgctccgatcactacgagacgtccagtgccgatgacgagaaggaaaagagcaagaaggacaagggcaaggataaggaaaaggagaaggagaaagagaaggaaaaggaacgcgagaaggacttgtcggccacccaatcgatcgccgtgctgggaattgccctgatcgccatgggcgaggacattggtgccgaaatggcataccgctcgtttggaaacctgctgcgctattgcgagccagccattcgtcgggccgtaccactggcattgggcctgatatccgcctccaatcccaagctgaacatcatcgacacgctgagcaagttctcgcacgatagcgacgccgaggtggcccacaatgcgatcttcgccatgggcttggtgggcgccggcacgaataacgctcggctggcctccatgctacgccagttggcgcagtaccattctaaggatcccagcaatctgttcatggtgcgcatcgcccagagcttgacgcacttgggcaagggcacgctctcgctgagtccctaccacagcgataggcagctgatgaaccccatggccgtcgctggactgatggctacgctggtttccctgctggacgtgaagaacctgatactgaaccgatcgcactatctgctctacacactggtgcctgccatgcaggctcgcatgctgatcaccttcgatgaggagctcaatcagctgcaggtgcccgtgcgcgtcggcattgccatcgatgtggtcggccaggcaggcaagccgaagaccatcaccggcttccaaacgcacaccacgcccgtcctgctggccattggcgagcgcgccgagctggccaccgatgagtatctggccctcactccggtcatggagggcttcgttatactgaaaaagaacccaaattttgtgaaatagaagtgcattcaaacatttaacgtttaaggtcatgcgagaaactgaagttcagccactaactcccaataattatttgttccccccactggcagttgattcaaatgattcaattaatacgaaatatatctacatat

SEQ ID NO: 41643 - protein, 919 aa, DROSOPHILA
MTGETKLEKKPLKPAASEGDAKDPKAKKDEKKDGKDKEQQPELSDEDQQLQEELELLVQHLQEPDAKLYQPTLESMAKLIRASTTSMTSVPKPLKFMRPHYETMKTVYKHMPNEQARQLCADIISVLSMTMGSGKDCLAYRFLCDRKQRIGDWGHEYVRHLSGEISAHYHDTTGDFRVQLIELVKQIIPYNMEHNAEADACDLLIEIDHLHLLSDFVDESAYPRVCLYLQSCYPYVPDPDNTIILETALQLSRKFNQYTQAMRLALMLNDMDKIGEIFKEPKEPAMQKQLAFMLARQQICLELDELVPDYDDLMEIMSNANLNKHFLNLARELDIMEPKTPEDIYKSHLDNSRSRFASIQVDSAKQNLAASFVNGFVNAGFGVDKLLSEDGNKWLYKNKEHGMLSATASLGLILLWDVDGGLTMIDKYLYSTDDNIKSGALLACGIVNCGIRNEVDPAHALLSDYIDNQNSCMRVGAILGLGIAYAGSNRSIVIDTLKTVFSFGSNNKSSASVEILGITALSLGLISVGSCNSEITEILLQTIMGLTKADLKDTYTRFLFLGLGLLYLGRQKSTEAVMMTLEVLEEPYRSMATTMVDICAYAGTGNVLKIQQLLHICSDHYETSSADDEKEKSKKDKGKDKEKEKEKEKEKEREKDLSATQSIAVLGIALIAMGEDIGAEMAYRSFGNLLRYCEPAIRRAVPLALGLISASNPKLNIIDTLSKFSHDSDAEVAHNAIFAMGLVGAGTNNARLASMLRQLAQYHSKDPSNLFMVRIAQSLTHLGKGTLSLSPYHSDRQLMNPMAVAGLMATLVSLLDVKNLILNRSHYLLYTLVPAMQARMLITFDEELNQLQVPVRVGIAIDVVGQAGKPKTITGFQTHTTPVLLAIGERAELATDEYLALTPVMEGFVILKKNPNFVK

SEQ ID NO: 41644 - DNA, 6453 bp, DROSOPHILA
cccggtcctcggcaacaggcttgggaataacaattcaattatcaaaattgctcgggattgtctttatcaaagattcagggcatgtgtttgcagtacaatgtgtacatatacgtctcttgtttttcttacttttattggacattgcttggcggttgttgtgggtcgaagaacagcggcaaactgaatatcaaacgatgttgagcgggagctttatatattggggctctctcggagatacttatctttatactctcttaaagcatttactaaagagaaccggttcggccggctttcttatcactaatacaggtaaggtcaggtcagtaatgtgtatagattaggtttagctcgttttcgtggacttattgaacatgaggaacatatgtataataataaaaaaccaaaacaaacaacgcccctagagataaggctatataatttatttacttaaattaagctcatttctattttagacattttctcttgtcttcgttatttatttttaattagtatattatatttaattatacgtattcaatacaagaaaataagtaaacaagtaaataacttgtaggggaatatctgaacaatctgtcatgtaataacaatgattgctttagaaatttaagtaaagtgtgggtaatagtggtattaaaggcacttattacaaaagctattttcaaacagtttcagtttaaccgcaatttgaaggcgtcccagagctgcaaagaaacgaaatcgatttttcttgccaaaagagagagttggggcaacacaacacatatcgatattcgtttttttctggcttatgcgatgactgtaaatgatcttctagacttttatggaaatcttaaatgtgtcatttgcttgtacaagaatcaaaacaagcttataaaatccacgcgctctctgcaacataatttatattgaacataaatggaataccttccaaaataaaaagtatattttcctgagccggacagtattagttcttaacagttgaacggtcacactacgtgtcaggaaacattttagcgcgttaaaagtcagcgaaaacgatttttatcctcgtggcggctgactagtccaaagttgaagagctctatcgaattaaggataacctgatcctggacagtgtgcagtcatgtcgcatcactacgtggtgacggcgcaaaagccgacggccgttgttgcctgcctaacaggtaagaacaagagagcgtgtgaaagagaggggctccctatgcggtctcccccggcgaaaacagaaaacaagcatgtttgccggtcgccggattacacaagcccatgaaacagatttgtttgcttagcaccggcttctttggtatgctcctcaggcaacttcacctcgcccacggatctcaatttgatcattgcccggaacaatcaggtggaaatcgatctggtcacgccggagggactgcgccccctaaaagagatcaacataaatggcaccattgccgtgatgcgccacttccgaccgcccgacagcaacaaggatttgctcttcatactgacgcgtcgttacaacgtcatgatcctcgaggcccgtatggtcaacgacgtcatcacggtggtgaccaaggccaatggtaatgtttccgactcggtgggcatcccctccgaaggaggagttattgcggccatcgatcccaaggctagggtcatcggaatgtgcctttaccaggggctgttcaccatcattccgatggacaaggatgctagcgagctgaaagccacaaatcttaggtaattccggtgaattctatagtagtttgacaaatacgtgtgagcatgacatcggcgccttatcatgttttaccctgttttgtatttttaatgaatcattttcattttttcattcactactagttactagtaagtaactagtaaatgttttatgattgaagctgtattaagctccaaaataatgtatcccttcacccttcagaatggatgagctaaacgtgtacgatgttgagtttctgcacggctgcttgaatcccacagttatcgtgatccacaaggacagcgatggccggcacgtaaagtcgcacgagattaatctgcgggataaggagtttatgaaaatcgcatggaagcaggacaacgtggaaacagaggccacaatgctgatcccggtgccgtcgcccatcggtggtgttatcgtcattggtcgggaatcgattgtataccatgacggaagcaactatcacgctgtggcgccgctcacttttcgccaaagcaccatcaactgttacgcccgtgtgagtagcaatggattgcgctatctgctgggtaacatggatggtcagctgtatatgctgttccttgggaccgccgaaactagcaagggagtgactgtgaaggacataaaagtggagcaactaggcgagatctctataccagagtgcattacatacctagacaatggtttcctttacattggagcacgtcatggagactcgcagttggtgcgcttgaattcggaggccatcgacgggtcatatgtcgtgcctgtagagaatttcaccaatctagctcccattctggacattgctgtggtcgatctggatcgccagggacagggccaaatcatcacatgctcgggaagctttaaggatggatctctacgcataattcgcataggcatcggcattcaggagcatgcctgcatcgatctccccggcattaagggcatgtggtctctaaaggtgggagtcgatgagagtccgtatgagaacactttggtgctggcttttgtgggacacacaaggattctcacgctttctggtgaagaggtggaagagaccgagattcccggatttgccagcgatctgcagactttcctttgctcaaatgtggattatgatcaggtgagttgccacacaaatcctactatccagaatcaatttaattaatatttaccttttacttcagttgattcaagttacttcggatagcgttcgcttggttagcagtgccactaaagcccttgtggccgaatggcgtcctactggcgatcgtaccatcggtgttgtgtcctgcaacactacccagatcttggttgcctccgcatgcgacatattctacatagttattgaagatggaagcctccgcgagcagtcccgccgaacattggcatatgaggtagcctgtttggacatcactcccttggatgagactcaaaaaaagtcggatttggtggcggtgggcctatggaccgatatatctgctgttatcctgtcgctgcctgatcttgagaccatctacaccgaaaaactaagcggaggtaagcagaaaaaacgttgaccagctatgtagaactataaatcaatgtatttatttttggcagaaataattccccgctccattctgatgaccacatttgagggaatccattatctgctttgcgctttgggcgacggttccatgtattactttatcatggaccaaaccactgggcaactgacggacaagaagaaagtcactctcggtacacaaccaaccacgctccgcaccttccgatccttatctaccactaatgtgtttgcctgctctgatcgtcccacggtgatttactcgtcgaaccacaagttggtgttctctaacgtaaatctgaaggaggtcaaccacatgtgctccttaaatgctcaggcgtatccagatagtttggcgctggcgaacaagaacgctgttattttgggcactattgatgagattcagaagctgcatattcgaacagtgcctcttggggaaggaccacgcagaattgcttaccaagagtcgtcgcagacttttgctgtgtccaccctgcgtattgatgtccatggaagaggcggagctaaaccacttcgcaatagtgcctctacacaggcccaaaacataacgtgtagctcgaatttcctacccaaaccgggtggtggtaattccacggctgcaaatgcggaagttggtcaagagatcgatgtacacaatctactggtcatcgatcaaaacacgttcgaggttctgcacgcccaccaattcgttgcacccgaaactatatcctctctaatgtccgccaaactgggcgatgatcccaacacttactatgtggtggccacatcacttgtaattccagaagaaccggagccgaaggttggaaggattatcatcttccattatcacgagaacaagcttacacaagtggccgagaccaaggtggatggaacttgctatgccctggttgagttcaatggcaaggtcctggcaggaatcggtagttttgtccgtctatacgagtggaccaatgagaaggagttgcgcatggagtgcaacattcaaaatatgattgctgctttgtttctgaaggccaagggcgattttatattggttggagatctgatgcgctccatcacgctgctgcagcacaagcagatggagggaatctttgtcgagatcgcgcgcgactgcgaacccaagtggatgcgagcggtcgagattcttgacgacgatacgttcctaggatccgagacaaatggaaatctgttcgtgtgccagaaggacaggtaagtgaaataggcttcttgaaatcaagacacaaattcacatgaaatcctttcagtgctgctaccaccgatgaggagcgtcagttgctaccggaattggcgcgttttcatttgggcgatacggtgaacgttttccgtcacggatctctggtgatgcagaacgttggtgagcgaactacgccgatcaatggatgtgttctgtacggaacatgcaacggagccattggcattgtaacccagataccgcaggacttctacgacttcctgcacggcctggaggagcggctgaagaaaataatcaagtcggtgggcaagattgagcacacgtactaccgcaatttccaaatcaacagcaaagttgaacccagcgagggattcatcgatggagatctaattgagagctttttggacttgagtcgcgacaagatgcgcgatgccgttcagggattggaggtgagctaaattgcatttgaccactaggagctgataataacagtcttacatttgctttccagttgacactgaatggcgaacgaaagagtgcggatgtggaggatgtcataaagatcgtcgaggacctcacgcgcatgcattgaggtccttcggtagtttgtatataagtattggagaaggaactgtctcaccgcggactatctgattgtacatgaaacttcgataccatgtatcccgcttaaccacgtaaatatccactcaaatcaatccccgtgctagatgctgctacgactgtcggataacaagacgtttctcgagttcctcgtaaaaaaaaattgacaatgtagcaaaaaaaaaaactgttttaggtgcgcctcatgcgctctttcaaagttgcgccagtcacgcattgatttaataaaaaaaaaattaaatggaaaaaaaggtttgaaattttaagggttttccggtttccaattggatattgttgctactattcttacaacgtttatttagcatacttttgggatattcaataaattttattttttaacatatcaattgctttgttttcataatatctaaattttgttatatttgacttaattttcaaagtttaaccatttaaagctgttatttttttccttagaattatataagctgctgattgtgttaacttaaatgagttctaaaaatgcaggtaagtgcacggaagtaattatatttttattgcttatacacatgtaaaactattccgatatttcaattcatatgtaaattgagttttagaagttattatatagaaactttttgttaaggatccgctcagaaaataaatagaatacacatcaattataatttggatcagtaatatacgtacatttcgcaaaaggacacctattgacatagttattcatgaaactgagtgatgctgtttcgagaacctggccaaatgccgatccacctggctaataccttttggcatgccgcacgcatgcgcagcgcagttccttcgccaccggtcgccgagcacgtccacatcatccagatccggcggaaaacgtgagcacatacacacggacaggcataccaaggggtgtgggaaaactgaggtgggtggggtgctcggggagggggtggcgcggtggcattggcgtttcattcattaatacacgcacactggcgcactggtaaacgggaaagaaggctggaaagttgcatgcttagccaccaccaacaccagcgacttccagtcaaggggattgaagtggtgtccgtgtgtgctgcctctgtgtgcgtatgcgtgcgcactcgtcgcgcctccacatcacttgcctgtgtgttggtgttgccgctgggatgtgatgttgctgccgtgctgctgctgcttatactgctgctgcggctgctgctgctgctgcttctgctg

SEQ ID NO: 41645 - DNA, 3853 bp, DROSOPHILA
tgaacggtcacactacgtgtcaggaaacattttagcgcgttaaaagtcagcgaaaacgatttttatcctcgtggcggctgactagtccaaagttgaagagctctatcgaattaaggataacctgatcctggacagtgtgcagtcatgtcgcatcactacgtggtgacggcgcaaaagccgacggccgttgttgcctgcctaacaggcaacttcacctcgcccacggatctcaatttgatcattgcccggaacaatcaggtggaaatcgatctggtcacgccggagggactgcgccccctaaaagagatcaacataaatggcaccattgccgtgatgcgccacttccgaccgcccgacagcaacaaggatttgctcttcatactgacgcgtcgttacaacgtcatgatcctcgaggcccgtatggtcaacgacgtcatcacggtggtgaccaaggccaatggtaatgtttccgactcggtgggcatcccctccgaaggaggagttattgcggccatcgatcccaaggctagggtcatcggaatgtgcctttaccaggggctgttcaccatcattccgatggacaaggatgctagcgagctgaaagccacaaatcttagaatggatgagctaaacgtgtacgatgttgagtttctgcacggctgcttgaatcccacagttatcgtgatccacaaggacagcgatggccggcacgtaaagtcgcacgagattaatctgcgggataaggagtttatgaaaatcgcatggaagcaggacaacgtggaaacagaggccacaatgctgatcccggtgccgtcgcccatcggtggtgttatcgtcattggtcgggaatcgattgtataccatgacggaagcaactatcacgctgtggcgccgctcacttttcgccaaagcaccatcaactgttacgcccgtgtgagtagcaatggattgcgctatctgctgggtaacatggatggtcagctgtatatgctgttccttgggaccgccgaaactagcaagggagtgactgtgaaggacataaaagtggagcaactaggcgagatctctataccagagtgcattacatacctagacaatggtttcctttacattggagcacgtcatggagactcgcagttggtgcgcttgaattcggaggccatcgacgggtcatatgtcgtgcctgtagagaatttcaccaatctagctcccattctggacattgctgtggtcgatctggatcgccagggacagggccaaatcatcacatgctcgggaagctttaaggatggatctctacgcataattcgcataggcatcggcattcaggagcatgcctgcatcgatctccccggcattaagggcatgtggtctctaaaggtgggagtcgatgagagtccgtatgagaacactttggtgctggcttttgtgggacacacaaggattctcacgctttctggtgaagaggtggaagagaccgagattcccggatttgccagcgatctgcagactttcctttgctcaaatgtggattatgatcagttgattcaagttacttcggatagcgttcgcttggttagcagtgccactaaagcccttgtggccgaatggcgtcctactggcgatcgtaccatcggtgttgtgtcctgcaacactacccagatcttggttgcctccgcatgcgacatattctacatagttattgaagatggaagcctccgcgagcagtcccgccgaacattggcatatgaggtagcctgtttggacatcactcccttggatgagactcaaaaaaagtcggatttggtggcggtgggcctatggaccgatatatctgctgttatcctgtcgctgcctgatcttgagaccatctacaccgaaaaactaagcggagaaataattccccgctccattctgatgaccacatttgagggaatccattatctgctttgcgctttgggcgacggttccatgtattactttatcatggaccaaaccactgggcaactgacggacaagaagaaagtcactctcggtacacaaccaaccacgctccgcaccttccgatccttatctaccactaatgtgtttgcctgctctgatcgtcccacggtgatttactcgtcgaaccacaagttggtgttctctaacgtaaatctgaaggaggtcaaccacatgtgctccttaaatgctcaggcgtatccagatagtttggcgctggcgaacaagaacgctgttattttgggcactattgatgagattcagaagctgcatattcgaacagtgcctcttggggaaggaccacgcagaattgcttaccaagagtcgtcgcagacttttgctgtgtccaccctgcgtattgatgtccatggaagaggcggagctaaaccacttcgcaatagtgcctctacacaggcccaaaacataacgtgtagctcgaatttcctacccaaaccgggtggtggtaattccacggctgcaaatgcggaagttggtcaagagatcgatgtacacaatctactggtcatcgatcaaaacacgttcgaggttctgcacgcccaccaattcgttgcacccgaaactatatcctctctaatgtccgccaaactgggcgatgatcccaacacttactatgtggtggccacatcacttgtaattccagaagaaccggagccgaaggttggaaggattatcatcttccattatcacgagaacaagcttacacaagtggccgagaccaaggtggatggaacttgctatgccctggttgagttcaatggcaaggtcctggcaggaatcggtagttttgtccgtctatacgagtggaccaatgagaaggagttgcgcatggagtgcaacattcaaaatatgattgctgctttgtttctgaaggccaagggcgattttatattggttggagatctgatgcgctccatcacgctgctgcagcacaagcagatggagggaatctttgtcgagatcgcgcgcgactgcgaacccaagtggatgcgagcggtcgagattcttgacgacgatacgttcctaggatccgagacaaatggaaatctgttcgtgtgccagaaggacagtgctgctaccaccgatgaggagcgtcagttgctaccggaattggcgcgttttcatttgggcgatacggtgaacgttttccgtcacggatctctggtgatgcagaacgttggtgagcgaactacgccgatcaatggatgtgttctgtacggaacatgcaacggagccattggcattgtaacccagataccgcaggacttctacgacttcctgcacggcctggaggagcggctgaagaaaataatcaagtcggtgggcaagattgagcacacgtactaccgcaatttccaaatcaacagcaaagttgaacccagcgagggattcatcgatggagatctaattgagagctttttggacttgagtcgcgacaagatgcgcgatgccgttcagggattggagttgacactgaatggcgaacgaaagagtgcggatgtggaggatgtcataaagatcgtcgaggacctcacgcgcatgcattgaggtccttcggtagtttgtatataagtattggagaaggaactgtctcaccgcggactatctgattgtacatgaaacttcgataccatgtatcccgcttaaccacgtaaatatccactcaaatcaatccccgtgctagatgctgctacgactgtcggataacaagacgtttctcgagttcctcgtaaaaaaaaattgacaatgtagcaaaaaaaaaaactgttttaggtgcgcctcatgcgctctttcaaagttgcgccagtcacgcattgatttaataaaaaaaaaa

SEQ ID NO: 41646 - protein, 1140 aa, DROSOPHILA
MSHHYVVTAQKPTAVVACLTGNFTSPTDLNLIIARNNQVEIDLVTPEGLRPLKEININGTIAVMRHFRPPDSNKDLLFILTRRYNVMILEARMVNDVITVVTKANGNVSDSVGIPSEGGVIAAIDPKARVIGMCLYQGLFTIIPMDKDASELKATNLRMDELNVYDVEFLHGCLNPTVIVIHKDSDGRHVKSHEINLRDKEFMKIAWKQDNVETEATMLIPVPSPIGGVIVIGRESIVYHDGSNYHAVAPLTFRQSTINCYARVSSNGLRYLLGNMDGQLYMLFLGTAETSKGVTVKDIKVEQLGEISIPECITYLDNGFLYIGARHGDSQLVRLNSEAIDGSYVVPVENFTNLAPILDIAVVDLDRQGQGQIITCSGSFKDGSLRIIRIGIGIQEHACIDLPGIKGMWSLKVGVDESPYENTLVLAFVGHTRILTLSGEEVEETEIPGFASDLQTFLCSNVDYDQLIQVTSDSVRLVSSATKALVAEWRPTGDRTIGVVSCNTTQILVASACDIFYIVIEDGSLREQSRRTLAYEVACLDITPLDETQKKSDLVAVGLWTDISAVILSLPDLETIYTEKLSGEIIPRSILMTTFEGIHYLLCALGDGSMYYFIMDQTTGQLTDKKKVTLGTQPTTLRTFRSLSTTNVFACSDRPTVIYSSNHKLVFSNVNLKEVNHMCSLNAQAYPDSLALANKNAVILGTIDEIQKLHIRTVPLGEGPRRIAYQESSQTFAVSTLRIDVHGRGGAKPLRNSASTQAQNITCSSNFLPKPGGGNSTAANAEVGQEIDVHNLLVIDQNTFEVLHAHQFVAPETISSLMSAKLGDDPNTYYVVATSLVIPEEPEPKVGRIIIFHYHENKLTQVAETKVDGTCYALVEFNGKVLAGIGSFVRLYEWTNEKELRMECNIQNMIAALFLKAKGDFILVGDLMRSITLLQHKQMEGIFVEIARDCEPKWMRAVEILDDDTFLGSETNGNLFVCQKDSAATTDEERQLLPELARFHLGDTVNVFRHGSLVMQNVGERTTPINGCVLYGTCNGAIGIVTQIPQDFYDFLHGLEERLKKIIKSVGKIEHTYYRNFQINSKVEPSEGFIDGDLIESFLDLSRDKMRDAVQGLELTLNGERKSADVEDVIKIVEDLTRMH

SEQ ID NO: 41647 - DNA, 10942 bp, DROSOPHILA
ttggcgccgtccaggctcgcgccattcacctgacaagccttctagccaaaggtaaggcaattgtttatgcaatagccactgaatctcaaactgtaatccccgccagaacgccgatacacaaacaaacacgagtgggtggaggtggtatccggcagcaatgccatagtaggcatctccagctacgcccaggaggctctcggggatgtggtgttcgcccaactcccagaacccggcacggaactcaagcaggatgacgaatgtggggccctggagagcgttaaagcggctagcgaggtgtattcacccgttagtggcaaggtaattgaaaagaatgccgaggtggaggacacaccggccctagtcaacagcagttgctatgagaagggtaagatttgcgtgaagacccctttttaacttcacttgaaacacgtacttttcttttacaggctggcttttcaaggtggacctgaagaatcccaaggaactcgaagcccttatgaccgaggatcagtacaaagccttcctgagcagcagtggggatcactagaaccagcagctaatcctaaccctaaagcatcttgactgtagcctttaaaacgagtaattgttagcatttgttatcagctgaataacgctacactcatacccaaatatcaccaaccaaactcatcgccatacacacgttgttgtagctcttgaaatttgttacgaataagaatcaacaataaatccaaatgttatatttaaattgggcatcttgacctgcgggtggcagacgtcgtctgctcccccatggaaaccttctaggtgataagaccaaaagaccgaagagaaaacgtgttgagagttgctcaaagataagaagtcactcaacagaagattaagagagcggacaaggcactcagtttcataataatacagatcagcttaatacggcgtgcttggctggaattaagaaaaaacatttaacactgttgcttggacacgcgatggcgcacgccacggcactcagccatcacctgatggattcgatgatggaccgatgacacacctacctctctggaaagttacgccgtgctctggcgataaggatgtccaagtcgcgccttgaaaatacatatgcccgatcaagttgataagccttacaaaaagcgccgcccatgtctcattgaacttgaagagcgtgttcgcggaagcttttccattcggaaagctatggcaacggaggcgaaaagcttggcagtagctcattcgaatggtcagtgctcaaaaagaactcattccgtgcggtgcgagaagcgcatgctgctcgagaaccaacccctgaaaataataaaaacaatcacacaaagctaaggataattgcaaaacaggataattgaaaacctaaagcaaggaaaaacagttgaaggacatacacaaataactaaaaccacaactcaataacaaaatgccagcggaaaaatcaatatacgatcccaacccggccatcagccaaaatgcctacatatccagcttcgaggagtaccagaagttctaccaggagtcactggacaatccggccgagttctggtcccgcgtggccaagcagttccactgggaaacgccagccgatcaggataagttcctcaagtacaacttcaacatctcgaagggacccatttcgatcaaatggatggagggtgcctccaccaatctgtgctacaatctcctagatcgcaacgttaggaacggcctgggcgaccagatagcctactactggtgagttcccttgcaaatcctcgctcactttcgctctgggtggcgtaggtcgcacgaaaacaaaagtatttggttggcagcgcaggattattgatttttcgcctggttacgaaactctcgccttgtgacgtagaacggtggtctcctcttgcacaggatttactgcgcaggcaccataccgaaacagatgatagcactcctttgtataatttaaatacatatgtgcacaaggatgcagctcaatggcacatcccacctgccatcgattttggttgaagaatcttcccttattacctttgtgcctggtaatctgagcgattattttcgttttgattgtcgcaaataattggtttaatcgtctgcatgccaaatgtgacagtgggactaatgaccgatcagttcaactttgggcggtttttggttttccaaatgcgctttgctagacactccgactctgggtcaatgtcagggctactcttcgttcctcgatacgacacgaccctcataagggggtgacccggccatgcttatttattcagtttaaatcgatttacaattaaaccggttggggaagccctgaaacatagaagctttggtcttatttgatttcacacactgtttactgtgagtaagaatgtttttctttattcataaaattaaatttaaatgtcggttttttaccaatacttccaattattttaagtacatttcctgtgtttttgaatgtaaagcaaagcttaagggtcattgtcagttgtgttgttaagctcactaaaacattaataactaaggcagcgtgtggttttttttattagcagaccgtaatacttgccccaaaagtacaatatccgtactttctgatgtcttatctaattgtcagtctataactcatctttgcgtttttgtttgtttctccacacgaggaggcattcattcgtaacaaattaagctaaattaaacaatcgaatgcgatactaactagggactgctcccactgtatatgttctttcctcttcaaatcaacatacttcggtgactgcgattaagcaacagacactccctttcgctgattagctaccgaggaggagtccagtgccgtatattaccttatgaggttctcaagtgcccactcaaatcgcaattaaattgaaaagctcggactggatggacggaataagtattttgttttggttgcgcgagaagattttttgttgttttcagacccaaagttcaccgagcaatgcgtcagggcgcaaaaaaacacaaagttaaacaaatgttaatgctaatgagcttatctccgggttatcatttgagaggcgggttagggggcggggcacgtgtgccggaggaaatgcaaatgaaagtcaggtaactgaaaggcaattacaaggtcattgcaagtattggttcgcattcagcctcgaacttacgacggcccatcactactactattctcggccatttcgcacttttgttgggaattatttaatcccagcccacaatctgtcctcactttcctcagataagataaaatggggaacacaggcccaaaaaggctgaaaaaaaaacggtgtgcacgtaatgagtaataattaacgctttccgaaccgccgtctcagataattttactgcaaaccaaagcaagctaaaatcttaaaagttatatgtcccagttttattgcatagatagacgcagcgaatcggaaaagctggagaatcggttattgggaattggctttggcctgattaatattgctaaaattgcgttttggtgcaatttatgtaatttttcaacttgaaaaacaatattttgggatgtcttaaatatttgtgtgcaccttccgtcgaactaaacaaggttgttgtacctttgtcccaaaataaccgtttcgaacccaaccgatttacgcaaactgttttcaatttcgagagtcgttagcaacaaaattaagtcgaattaaacacacgaaagcctgaagcgaaagccgagcaatattatgtaaacgatttgacaaagcgcgcaaattgtttattcaaattaatggaagcgcgtctttgcgttaaacagtttgctatttttccttgcctttaatttgtgtgtcagtcggcgtctgggcaaaaggtggattataatcgatatattcactgggaaattgaataaaaagatccaaaacagttgaaagcgtgtaaaaatgaaaagtttacccaaaattatcgaaataaggtatttctaatattccagtgagcgccaacagttttacagccactgcgcgtctagaaaatcacgcgatcacatcgtctgattcactcacaaccaattagagagccactgtgctccctccctccacgcacgttgaaagactaagagagaggtagtggttgttgtggaagggggggggggcagtgctgctgcgctaaagtagaattgactgtctgtcttacctgctaagaaataagagagcctcaaaaaacaacatgtagccagctacctaggctacttttcttgacttacctcgctttgttatcagtgtttccacctggaaaaggttgacaggcccatttccgtaaattatgtaagcgactctattcacacaaatcaaagatgcgccaatccgtaaaaacaaataaccgatctttagataaacatagtagatgagcatcgtacgataatgtctctcaaactgtagggcccgggcagacacggagacgcgatagagagagatagaagaagtcaccgcaagaaatcagatggttttgtggctaaacaatttttgatcttagaaagtctcaatattactgcttgagtttgtttggagagtatctacaagcattttgtaacaactaaaaaaattccgtcagaacgtatggtaaacaattccgtgggattttaaaaaatcactcagtttaaggccatgtaggttacacaaagtaattttttccgctcataaatacgagtgcttgagaaattaatagtaataggaaatctaacaacaaccgatgcaataaaaatcacacatcttaagtaaatataaattggtttctatcagcatttcctaagcaaattattttcaggcgtttactaatattcaaaatatagtaagcacaaggatatttgtacagtgtaggaaagaaacccaaaacattccatgcgatcaatacgacacgcgaatcaacagctgatgttattgttattaagataagtcgccggcacttattgttttttccatggattttaggccattcctcatcattttttcatttttggctcgcacgtgtggtgagagtggctgtttctagtatattttcggatttttgatttctgataagcgggagacggccacgcgtcttcccttggtcaagaggtgaacggtagatggcggaccgggacggtgcatgaggtgtttctaaggcggcatggaaaatttcttgtctggcgatccggcggcgagattaggaggcgagtggcccgattacgcctctaaattggaaattaatacactcgtcgcgacacatttctcccactggtttgattactcatgcggagaaggaggaggcgcctctggtgctccaaactctgataagtggagaagacgtccgcaaacacacaacatagttttccgtgactgatgggaatttcggcccagtttggcaatcaccatatacatatatattataagtttgattatatttatttgatcttatccataacagtgatgttgacgttagatggctgtcaaggtggagaccaaggttaaggacaaacagtctgttaagggtagacgttatcaaaatttgtaagcctggaaaattcggcacatttcaatataggcgatattaatctgtacgaagggaaaaatgatctgtacctgtcttcgattagttatgtctattgcttataacattctttttatgaaattgctggtttgtggggattacaaatgacattagtttctgatcgtgatccctttttcggcctgcgggcttcactttggggatccaaatctccattggggatccctccttgttggcagctgcgaggagtaccgactccagtgcatcggcatagcaatcgatgtcctccctgaagttgagctcctgggttagttcaacgcgggaactttcatactcattggttttaagtcaggtggtttccgggcttcggagaagagttatcagcattggtaagtgttctccgatgataagtccaattgcgtgtttgcagttattagattgtgagacatgtttcttgccacaaaaacccaatcaatcaaaatttctaacatctgtaggccagtatttaggactgcctggtaaacgcagtccagtttttatgatttcaatatggtttcctttctttaggggtcgtcgggcaaaatcccccaatgaatacgggtgtcagccctaatctccgtcgcatactgtcatatttggccaagagcaagactctaaagtatagatagggtccaggaagaaaatgactaagctcgaaaataacagctcgagtcacaatcgaggggtgttttcattgcgtattttatttatttttaccaacttactaattgacaagtacaagtacaaacaggtatttcgttcaagtggaatatcatttcaccggggcggttttggcccagttgaatcagtccaaaccccaaaccccttcgctgggcgaactttgaacacagcggtactttgacagtcagcggtactaaaataacccccaaaaaacgtcacaaggggagcttttgccgttgttccgactgcttcctgcttttctctttggccatacacattttgggccaaaataatagacgctttattgccggctaattctaatgcttatcgcaggcgacggacaacaggtgatgatttacactccgctgattgcattgtctgcctttctagtccacctgtcgtgtagtttattactgttttctgcgttgctaatctgccttgacctccacaactgccatggaaatggctttccccattactttcatagtttcatgactgaccgtcggcgatcgcgagtgtttatatccgttttgaacgccgaaaccgttcacgatttaccccagtcacgaaatttgtttacccattcaaagctttcaaagctctgacacattccatttagtgtttaattttatattcattcatttaatagcaacaattagggaagcatttacattgcctcatatatgtatgtgaattttggattattaggattggaaatgcgattcggttttattcttttatttatttttagatacataccttagttgtacatagttttggtaacttgtgtactcgttcaaagactttttgcagctgctgtaaataaagtaaagtaggttattggcactggcttctgttgccaagttcagaacaaaaagggaaaggcatacaaagtatatacaattacacaatgctaagtcatattacatatgtacacggtaggaacacaagcggcacacaaaaggggattggatttaaatgcatttttaaatattttgttggaaatcttaccgtagctctaaaatatctctttgaaattaggtgacaatttgagttcagaaaatcgaattaagtcgggtgggcaattaggaagcctcgcataaaagtaagtgatccaattatggtcggggtaattagcccaattgtggggcacccggtatgcggccacccatttgagaacgccatcggcgcgtgctcaatgtaatactatagaaggaatactaagtatgtgtttcctcacggtcgtgtttcttttttgacattgtttcagggagggcaaccaccccgacgattattcccggggtctcacctatcgcaagttgctggaggaggtgtgccgcttcgccaacgtgctgaaggatcatggcattcgaaagggcgatcgtgtatccatttacatgcccatgattctggagctgcctatcgcgatgctggcctgcgctcgcattggagccgtgcactcgatcgtattcgccggattctcaccggactcactggcggagcggatgttcgattgcaaggccaagctgctgattacggcggatggagcctggcgtggagagaaacccctgtacctgaaggctctgtgcgacacggccttggagaaagtcgaggagatggggcactccgtggagaagtgcatcgtggtgtcgcatttgaagcgagtgactccgtgccagccggatcatgtcgaggaggaaatcccatggaccgatgaccgcgattactggtggcacgaggagatggaggacaaggagccggcctgctatccggagtggatggacgccgaggatccattgttcatgctctacaccagtggctccactggcaagcccaagggagtgctccacacgactgccggatatctgctgtatgcggccacgacctttaagatcgtatttgactataagccaggggatatctactggtgcaccgccgatgttggctggatcacgggacacacctacgtggtgtacggaccattggccaatggagccacttcagtgattgtaagtgcctgattagatctaacaaataatggattttttctgactaactgtccctattacttcgtaattgcagttcgaaggcacaccattcttccctggaaacgatcggtactggagtgtcattgacaaatataaggtaactcagttctacacagctccaacggcgattcgtgccctcatgaagttcggcgagggtcccgttctaaagcacaacctgagcggactcaagtacgtttatttatacttctataacaattttcgtaatgactttattcatttgcagagttttgggcagcgtgggtgagcccatcaacccggaggcctggctctggtattacaaatacattggaaaggagcagtgctccattgtggacaccttttggcaaacggaaaccggtggtcatgtcattacacctctgcctggagcgactcccatgaagccgggatctgctgtaagataaatcctttggctagttgatgtcagtactaaaatttattgtcttctactcttagtcattccccttctttggagtgaagcccactttgctggatgagtgcggcattgaaattaagggggagggagagggctacttggtcttctcgcaaccttggccgggaatgatgcgcactttgtacaacaaccatgaacgcttcgaggacacttatttctccaagttcccaggctactactgcactggcgatggtgagtcttgaagttttagactgtttttcattgtgattttaaagtggattaggattgttaattatttatgtttgctttgatttttttcgcacaggagcccgacgcgatgctgacggctatttgtggatcactggtcgtgtggacgacatgttaaacgtgtccgggcacctgatgtccactgccgaggtagagtcggttctcacagagcatcctcgcgtggctgagtccgccgtggtttcccgtccgcatcccgtcaagggcgagtgtctctactgcttcataacgccgaacgagaacgaggtattcgaccagaagctaatttcggacctgaagaagatggtgcgagaacgtatcggaccttttgccatgccggatgtcattcaaaacgctcccggactgcccaaaactcgttccggcaagattatgcgtcgtgtgctgcgcaagatcgcggttaacgatcgcaacgtgggcgacacatctaccttggccgatgagcaaattgtggagcaactgttcgccaaccggccagtggaggccaagtagatggtagctgttggaccaactggcagcagccaggatcccttaacccaaggctttctccggttgcactgaccactccactttgccatcgcatttccaccacttacgtatcgcgattacgtatcctgtaaatctccctctacttatatgaattacccactgcttaatgtttgttccgttccgggctacggcgtggttagcacctttcaaattctacttagctcgtaagcctaagcgtgtgcgtaagtaagtgactggatggtttccgatcccagttatatatcgtctatatgattttgtgtacttgcctgttcatcgtagttgacatgctcaccacgcacacattttccagttcttttgtttcttcgttgtagtcgtagtttaagttctcgctaattcgttgtgatacaaatttaattatatcttacttatgtatgtatttttagtagaattgatatgagacaaaatatatacacgattccaattgtcgccacaatttacacagatcacctttttttagttgtatcttttttttgtagtgtttctttcacaccttttcagatctgaggagatgcgcacgtaagttcggaaaccataggggatatcggtttcttccccgtcccattagcccataagtttgagaacgatacatatctgtgtggcattatgcttgccacattcctacatacgatctacatgttaaagagaaccacgcggatatactatatacactatatatatatatatgttataaggtcagaagacttactgcaacgaaacatatcattgaagttactgctgcaagcctatggatattatagaagcttttattgttagagatcgttatcttgaggggagatcggctagaaagtaatggatatcttggattggctgattaggggcagcggtgcccagtctgaatgtaaaaagattgttagttatacagcgatggcgaacgaaagattgcaatttacatatctataaatatatatatatatatttctgtatatgaacatatgtgtataataaagtttattgttttaatgtgtttgaacctgcaagtgcaacgactatattttatagttagaaattcgtatgaagtgtcagtcctgagaattaagatcgcactagccgagcatgatacttccttgtgaatcagtcaactctcggcctttgtcacacttgttttgctgaatttaggctcggtctttcaacaccttggtggcagtaacagatctttgtccgggttgttgtttggggctgtggacgagcaccaccagaatggtcgacgaaaagctaccaccaagcaaggaaccggctgaacggcctccagaccagaccacccccggaaacgcggctacccgattcggcttggaggatcacgaggccactcagcaggatgcccgggtgaaca

SEQ ID NO: 41648 - DNA, 2874 bp, DROSOPHILA
cacggcactcagccatcacctgatggattcgatgatggaccgatgacacacctacctctctggaaagttacgccgtgctctggcgataaggatgtccaagtcgcgccttgaaaatacatatgcccgatcaagttgataagccttacaaaaagcgccgcccatgtctcattgaacttgaagagcgtgttcgcggaagcttttccattcggaaagctatggcaacggaggcgaaaagcttggcagtagctcattcgaatggtcagtgctcaaaaagaactcattccgtgcggtgcgagaagcgcatgctgctcgagaaccaacccctgaaaataataaaaacaatcacacaaagctaaggataattgcaaaacaggataattgaaaacctaaagcaaggaaaaacagttgaaggacatacacaaataactaaaaccacaactcaataacaaaatgccagcggaaaaatcaatatacgatcccaacccggccatcagccaaaatgcctacatatccagcttcgaggagtaccagaagttctaccaggagtcactggacaatccggccgagttctggtcccgcgtggccaagcagttccactgggaaacgccagccgatcaggataagttcctcaagtacaacttcaacatctcgaagggacccatttcgatcaaatggatggagggtgcctccaccaatctgtgctacaatctcctagatcgcaacgttaggaacggcctgggcgaccagatagcctactactgggagggcaaccaccccgacgattattcccggggtctcacctatcgcaagttgctggaggaggtgtgccgcttcgccaacgtgctgaaggatcatggcattcgaaagggcgatcgtgtatccatttacatgcccatgattctggagctgcctatcgcgatgctggcctgcgctcgcattggagccgtgcactcgatcgtattcgccggattctcaccggactcactggcggagcggatgttcgattgcaaggccaagctgctgattacggcggatggagcctggcgtggagagaaacccctgtacctgaaggctctgtgcgacacggccttggagaaagtcgaggagatggggcactccgtggagaagtgcatcgtggtgtcgcatttgaagcgagtgactccgtgccagccggatcatgtcgaggaggaaatcccatggaccgatgaccgcgattactggtggcacgaggagatggaggacaaggagccggcctgctatccggagtggatggacgccgaggatccattgttcatgctctacaccagtggctccactggcaagcccaagggagtgctccacacgactgccggatatctgctgtatgcggccacgacctttaagatcgtatttgactataagccaggggatatctactggtgcaccgccgatgttggctggatcacgggacacacctacgtggtgtacggaccattggccaatggagccacttcagtgattttcgaaggcacaccattcttccctggaaacgatcggtactggagtgtcattgacaaatataaggtaactcagttctacacagctccaacggcgattcgtgccctcatgaagttcggcgagggtcccgttctaaagcacaacctgagcggactcaaagttttgggcagcgtgggtgagcccatcaacccggaggcctggctctggtattacaaatacattggaaaggagcagtgctccattgtggacaccttttggcaaacggaaaccggtggtcatgtcattacacctctgcctggagcgactcccatgaagccgggatctgcttcattccccttctttggagtgaagcccactttgctggatgagtgcggcattgaaattaagggggagggagagggctacttggtcttctcgcaaccttggccgggaatgatgcgcactttgtacaacaaccatgaacgcttcgaggacacttatttctccaagttcccaggctactactgcactggcgatggagcccgacgcgatgctgacggctatttgtggatcactggtcgtgtggacgacatgttaaacgtgtccgggcacctgatgtccactgccgaggtagagtcggttctcacagagcatcctcgcgtggctgagtccgccgtggtttcccgtccgcatcccgtcaagggcgagtgtctctactgcttcataacgccgaacgagaacgaggtattcgaccagaagctaatttcggacctgaagaagatggtgcgagaacgtatcggaccttttgccatgccggatgtcattcaaaacgctcccggactgcccaaaactcgttccggcaagattatgcgtcgtgtgctgcgcaagatcgcggttaacgatcgcaacgtgggcgacacatctaccttggccgatgagcaaattgtggagcaactgttcgccaaccggccagtggaggccaagtagatggtagctgttggaccaactggcagcagccaggatcccttaacccaaggctttctccggttgcactgaccactccactttgccatcgcatttccaccacttacgtatcgcgattacgtatcctgtaaatctccctctacttatatgaattacccactgcttaatgtttgttccgttccgggctacggcgtggttagcacctttcaaattctacttagctcgtaagcctaagcgtgtgcgtaagtaagtgactggatggtttccgatcccagttatatatcgtctatatgattttgtgtacttgcctgttcatcgtagttgacatgctcaccacgcacacattttccagttcttttgtttcttcgttgtagtcgtagtttaagttctcgctaattcgttgtgatacaaatt

SEQ ID NO: 41649 - protein, 670 aa, DROSOPHILA [sequence omitted]

SEQ ID NO: 41650 - DNA, 2964 bp, DROSOPHILA
ccttggcaattgcattgcccaacaacaaaacacccgcgcgagagagcgcgagagagtgagagacagggcgaccgttcgatgcgctgctccgcttttctagtgttgtgaacgcggcaagcgttaaatgcaatctgagagaggaaagcgctgaaaagccagcgccaagtcgcggcccctcctctgccgctgcctcggtcgacgtcggcagaagccgcgacttgttttgggtgcccgaaaaaataacgaaaagaaatacaaaaaaacagagccccaaagcaaaacgaacgcaatagaaaaattccactaatgtgacttagcagtgttggaaattcgtattacatgcacttgagaaaagaaaattttgtttgctgagtggcttatatgcacatacacatatacacattgtataacatagttagccaggtgtttttaggtttgaaaagaaatactaacttccaaatataatatttgtttaaacaaaacttatattgcagaatatatttaaaaaataatggattcaatttgagtttttgaatgtatttagtaaagtgcactttaccaaacatatacatatgtattactggtggttaattcttttttttcatcagtgtatgtgacttaatagacatttgcaaagtgcattcgggtaaagtggatagaatggcttgagggaaaggtgatgggagacagaatgagaatcgagtggaaagaatcaaaagcgacatatgtgagcaactcttgaactaaattgagtcaattaaaagtaatggaaagaaaaatcaaaggaaaatgagtcagggaactgggctgttcagggtgcaccggattattcaacgaattggtctgaaatgcgtaacatatgagagcgatgtaaatagttgaaccgacaaaatacatttttttgcacccccttttattttgcaaagttttcttgaaaagtataatttcagtgtaatagtgtaaatgtgtgattgacagcactattatgtattgacacccttcagagggctccgcagtcttcgataattactttcttgctggtcttcccatcttgtgaaccgtaagattctaccttctggacgatatccattccctcaacgaccttgccgaacacgacatgcttattatccagccatgtggttttcccggtgcaaatgaaaaactgagatccattggtattggccccagcattggccatcgaaagtacaccagctccggtatgctttagctcgaaattctcatcgggaaacttgtttccataaatggagcgtcctccagttccgttttgattagtgaaatcaccgccctgacacatgaaattcgggatgacgcggtggaatggtgatcccttgtagccgtaccccttctctccggtgcagagggcccggaaattctccgccgtcttgggcaccacatccgaacgtagttccatcacaattctacctaacttctcacctcctgcggctatatcgaagtaaacgcgtggcaacgacatcttcgcagatgccgaaaattttcggagaaaagccagatctattaggtttaaaatcgaacgatgccttgttcaaaaacaagaaatatatttaccggataacttggtggtgtcagctttatgataaaaaaaagtaacgactttcaagagaaccgtacagtagaacagctggaactgaactgacgaatattctgggctagtcagggatctgaagtaagggctcgttgaaattcatttcacagccttctttataaaatccagtagcaaaaaaaaatgcctgctttggcttccacaatttttaatacattgcaaatgatcggtatatttggatattttaaggtaatattgtccttaaaatacctttatccgtgtctaatcttacagaccttatttactcttctaatttgtttaaccgccgccttaatcaacgcaaaactcacagatacttttaaagccggctatatttacctttcatttgcagttgtgtacaaactttatatatccatccacgcgatgagtgtatgtttgtataattaggcaaaaaaaatagtcaatatttatttgccaaagcaaatacaaactgtgagaattatccacgttttaaagaagctgctattgcatttatatttattcatttgtttgttgtctatatgaacgcatagcactcctttaaaactcttctatccccgacttctttgggtttagcacattttgtgtatatattaaagtccagggcctagtgagtttccaagacaacaattgctatttgggtatacatatacataagaattgttataaggggaaaataaaggaaggttgaagtacgataagattggctagtaaccgagaacgttgtaaacacaatgttcgataaagtaggtttggcatatttaataagttgcacggactttccctttataagctttataatcattttttatgtatttttcgctcataaataaaaataaaaattaaaaacaagctacttcaagacccttagataatctcccctcaaaatgccaaaagttcaagatgatttaacgaaagaaggttattcgcacgtaggtcgtaattgttaactcgactctccactgtctcattacttataataaattgtagtgcgaccgaatagcgaagacaagaaagatacaatccatagttggccaagacaagtgtagccccaactgaactcgaactcgaaaccgattcgattcgttttgactagttacccattaatgtaacgccccgttcgccttggacaaccttgtgcaaaaagtaatatacggaaagccaacatgacgtaatggaaagcgtaggatttctacttgccaactgctcccactgccacgcccccagaaataggcgcctcttttatggacttgcgagtgtatgagtgtgtgtgggaacataaattcacattatggccaattcttcgggcgatttttcagcttagataaaaggtagacaagaaa

SEQ ID NO: 41651 - DNA, 964 bp, DROSOPHILA
aaaggtaaatatagccggctttaaaagtatctgtgagttttgcgttgattaaggcggcggttaaacaaattagaagagtaaataaggtctgtaagattagacacggataaaggtattttaaggacaatattaccttaaaatatccaaatataccgatcatttgcaatgtattaaaaattgtggaagccaaagcaggcatttttttttgctactggattttataaagaaggctgtgaaatgaatttcaacgagcccttacttcagatccctgactagcccagaatattcgtcagttcagttccagctgttctactgtacggttctcttgaaagtcgttacttttttttatcataaagctgacaccaccaagttatccggtaaatatatttcttgtttttgaacaaggcatcgttcgattttaaacctaatagatctggcttttctccgaaaattttcggcatctgcgaagatgtcgttgccacgcgtttacttcgatatagccgcaggaggtgagaagttaggtagaattgtgatggaactacgttcggatgtggtgcccaagacggcggagaatttccgggccctctgcaccggagagaaggggtacggctacaagggatcaccattccaccgcgtcatcccgaatttcatgtgtcagggcggtgatttcactaatcaaaacggaactggaggacgctccatttatggaaacaagtttcccgatgagaatttcgagctaaagcataccggagctggtgtactttcgatggccaatgctggggccaataccaatggatctcagtttttcatttgcaccgggaaaaccacatggctggataataagcatgtcgtgttcggcaaggtcgttgagggaatggatatcgtccagaaggtagaatcttacggttcacaagatgggaagaccagcaagaaagtaattatcgaagactgcggagccctctga

SEQ ID NO: 41652 - protein, 164 aa, DROSOPHILA; identical to SEQ ID NO: 26016

SEQ ID NO: 41653 - DNA, 2803 bp, DROSOPHILA
caatttctaactaagaccgaagaataagcttttaggatgtgagctactacaggcaagtttgttttatctagataaaacagtacagtcgtgattagaggaaggaaatacccaccatataaactatatattatatgataagaatgtagatcgtgggtaacatataaagtagggtatttacattaggtatgactatgatgtcaggactttattaagcgatatgtttattaatttggtttgattttaggctttggggatttttaaaagatgggcaggctagactagggtcacctttattcaggcaagactgtagcgctcttttttctgattggatcagcggcaggtttgcgtttacgtggtccgtggcgaacaagttgtttgcccacacttaccttcggtgccgccgccgggaacatggatgctgtggctcgagcccatcgtttgattgcgttcaggtcaagctcgaatccggaacagggatctgacttaagcgacgctttggaaaccccgatttatattctgccaacaaataggttctgttcttcgtggcaactttcgcagtttttagtgtggcagcaggtcgccgacgctggtatgccacaaaatgtccagtgggtgttctaaaggctacagctgatcccaacgttttagtaggggagttccatcaacaaagataaaaataccaaataccaaaatgtattacacatttaaaataaaaataaagaaaatctacattaatttatatttatttttaacatataacttcttgctaaataaagaataactggtaaaatgtttcatttaataaatgcgccacaaaaaatttgaataactagccatttaaaatgcagtaaatcttcaaaacaaaacccaatgtttctatataaaaattaggcaattatttttaagctttctttatccgggagatgggaactattttctttatgaaataatatagttaatgaacttttaatgcatctaatgaatccacattatcatgcaattttaagggtttaatgggttttattcattttaaggtaaagcggtcgtgccagttgagtttcgaaagccaccaagctgtccgaaaataagttataaattagatgtatgcgggggtaaatgctttatttactgcatggccgccgccacctgacactgctgttggtacttggccacggattcccgatgcttcagcatgtccttctccctggattaaatgaaacgaaattgaaagaggaaaagggtaatatgtaagtaagagactatagacaactaggcgatggcaacccacatgttctccagtgcgtcggtggagctcttcagctccttggagatgtactcgatgcgctttccgacattctggcgcgactcctccagctcctgtttgaccagaacgggcccgaagagcttgtagaccttgttgtcggggcccagaagattcagctcgtccaggacgcacttgttctcgttcagctggctttcgagcactgctcgctgcttcaccatcttcaagcaggctgtgcatgaagttaaaagtacatacattccatgcacataagacaaaatcatggtacttatccaccagatggctggcatttactcacatttttgcaggttctggtacgactcaatctcggcctgcatctttttgtacaacgctgcgctcttcttgtccattttggtttagatacagcaggtgtttgttcggaatagggtgtttaatgaaacagttgcttcaccggttgctaataattttaactaaatttcgtcttttgcatgtgaataaaccgtgcagtgtgcccaaatatggttttcactaaatataccagcaaattgtgtcgttgccacatggctgtaactggcgtgctttacagcactgaccaaaacagctgtctgaaaggtgcactaattactgtctttcattcaatttactaattaaaatgggaaaaatatagaaagtataacctttaaaaaatgttttgtattaaacggagaagtaaatgcatatgaaatcaaattgtttgaaggactatcaaaacagtgttggcaaacgcgcaatgtattaggactggcgttttacatgcttggcatgaccgcaaaaaaataatgctttcatttgcaatgtttgtaagcgaataaagtgcttgaactcatcaacttaaacaagtacaatgggcatatgaacaaattatttagtcagtgtgcaactggtgaacagtaaaacaaaaacattcgtcatgcagtcgtagcgttgctagtgcgcccataataacgctgagacaaaagcaaaagatttcgcgccgaaaaggaggacggcagaaaacacgcattgcacggtggaaaagtaacaaaaaccgattataaatggactctgatgtggcgaaaatgtttgccaactaaaagcgattgcgtgcggttgtaattgtgatccgtggaaagcgtaccgccgtcagtaccgccctcgcccttcgccccccgcccccgttccccttgccaacaacacaaaaacaatggccccagcgaaaaaacgcgaaaaagacagtaatccggatggttctgccgcaaatggcattattggcctcacccatggagcaccggacgcgagcaatgctggctctactgtaccgccgacggccgagggtcaggtcaaactcaatggccaccagcaggagcaggaactctttttgcaggcctttgagagtaagtagaacatgggattgttttaccatcgggtcatcgagtaatttgccgaatactaacatttcagagcccacgcagatctatcgctacctgcgcaatcgacacg

SEQ ID NO: 41654 - DNA, 632 bp, DROSOPHILA
atttgggcacactgcacggtttattcacatgcaaaagacgaaatttagttaaaattattagcaaccggtgaagcaactgtttcattaaacaccctattccgaacaaacacctgctgtatctaaaccaaaatggacaagaagagcgcagcgttgtacaaaaagatgcaggccgagattgagtcgtaccagaacctgcaaaaatcctgcttgaagatggtgaagcagcgagcagtgctcgaaagccagctgaacgagaacaagtgcgtcctggacgagctgaatcttctgggccccgacaacaaggtctacaagctcttcgggcccgttctggtcaaacaggagctggaggagtcgcgccagaatgtcggaaagcgcatcgagtacatctccaaggagctgaagagctccaccgacgcactggagaacatggagaaggacatgctgaagcatcgggaatccgtggccaagtaccaacagcagtgtcaggtggcggcggccatgcagtaaataaagcatttacccccgcatacatctaatttataacttattttcggacagcttggtggctttcgaaactcaactggcacgaccgctttaccttaaaatgaataaaacccattaaacccttaaaa

SEQ ID NO: 41655 - protein, 125 aa, DROSOPHILA
MDKKSAALYKKMQAEIESYQNLQKSCLKMVKQRAVLESQLNENKCVLDELNLLGPDNKVYKLFGPVLVKQELEESRQNVGKRIEYISKELKSSTDALENMEKDMLKHRESVAKYQQQCQVAAAMQ

SEQ ID NO: 41656 - DNA, 3819 bp, DROSOPHILA
gaactatggaaagcggcggaacgcgctgcgtctgttgaaggtctatcagtgggacgacctggacatcgatagcgtcattgacaaggtggccaagtgctgtgagacgctcgaatacaagctgaaagagtcgccggaaacgccattcttctacggcgatcagccctgcgaactggacgccatcgccttcggccacctcttcagcattctgaccaccacgctgccgaacatggcgctggcccaaacggtgcagaagttccagcacttggtcgagttctgtcgcttcgtcgatgagaagtactttcagacgaggtgcctaccaaattagttatacgtagtcgttgccttaaatgcttatcaattaagttgctcttgtcctttctttttaaccgcttatatatgcaattctaaatgcccttaaaacaaatcgtcgccgtaagtcacaattattttgctactagcatttaaaaaaaaaagttgttctagtgattttgctgccattaatgtccaaaaatccatgtgaatatcatttgcacaagtgactcaatctgcaagtttgtttaaatggaattctaaaatacttctaacgatctttacttcatttattttgcagcaaataacttttctgctaataaaattgtgtaagtatttgctataatacatcaaataaattgttttcttagcaaaccaaaaaaaaaaatagtcttgatttttgaacattgctgccttttccttttcatacttttgaagaaattgaactctcgtttatgtaaagaccttaaatacacatatagttttattgatttattgttataattaatttagattattattatgaatgcaatgtacacatctttgcatgcagatggccgaaccaatcgcgccacttgtgatatttgctaacgcaatcatacaaaacaatcagatgattctcgaaaataaaagcttaacaatttgtccaggtttagcagttggtccattagcagttggcccagtagaagtcttagtttccagcctgattcactgccggtccggatagttcgtcgttgcctgccgccggagcagcgccagcttgcggtggtactggtggtgcaaacacatgggccatctgcggcggcaacggcgttggctgcgtgggaaacagtccgcccatggagggttgcacctgcggatacgacggcactgtctgtgcaccggctggataggagagcgcagccggggccgacatgtaggcctgctgtggtgcagagaacatgggcacagccgctggcgctgccgtggcctgtggaaatggtagctgggcagcgggtatgccacctagagcgttagcgttttgctgcgtactgggatcgaaaacgccgggtataaagatgttggctggtggcggcaatggttgcgctggtgcgggcacctgaacctgaggttgcgctacggacacgtcagccaccgccggcggagcgggaacggaaacgggctcggcaatagtggcctgcgattcgagcgcagcggttagggcatcggtagcctcatccggattgaagtaggtcttgaacaagctctgtgccggtggctcaatagtcggtggtctgacctcggcgtttgtggatccaaaggtgttggccagcggcggtatgtaaggcaacgttggtgagactacttgtgctacttgtgcacccgccggagcagctcctccggcagttaacagcggagcagtggactccgcggcggcagcagcaggaacagcagcggaactgctggtcactggctctgcctgcacgggaatgcgatgcaaatagccgaagccaatgccgcagcccagagctccctcgccgccccaggcggtattcggcttgatggtcacctcgcggcaggcgtcatcgtccaggttgtaaacgtacatcttcagcggctgctgctcgtgcgtttcgatcagcgtgaacaggtcgtcgttctcgtgccttatggcatctgccccaatcacgtagtcgctgtaggctcgcagtcctgcgagttcagctggcgaattgggatgcacttcgagtatgtgccagacgctctcgttggcgccctcgaaggagcagaaacgtatgctgacgcccagcagtccttggccgccccagttgttgctcggtgtaagggtcagttcgcggaccgtctgcgtcttgctggagtacacggtgagccgcacgggcttgtcaacgttctggcggagcagctctttcagcatatcattgtcctgatcgaggcgtgtgccggctattgcgacgatgaagtcgaagaaggcctccagtccggccttttggccaggcgagttgtcctgtaccttgagtacgtggtagcctgcggaatatggattgtaaatttcgtgggcatacttctatatatttcaatttctaactaagaccgaagaataagcttttaggatgtgagctactacaggcaagtttgttttatctagataaaacagtacagtcgtgattagaggaaggaaatacccaccatataaactatatattatatgataagaatgtagatcgtgggtaacatataaagtagggtatttacattaggtatgactatgatgtcaggactttattaagcgatatgtttattaatttggtttgattttaggctttggggatttttaaaagatgggcaggctagactagggtcacctttattcaggcaagactgtagcgctcttttttctgattggatcagcggcaggtttgcgtttacgtggtccgtggcgaacaagttgtttgcccacacttaccttcggtgccgccgccgggaacatggatgctgtggctcgagcccatcgtttgattgcgttcaggtcaagctcgaatccggaacagggatctgacttaagcgacgctttggaaaccccgatttatattctgccaacaaataggttctgttcttcgtggcaactttcgcagtttttagtgtggcagcaggtcgccgacgctggtatgccacaaaatgtccagtgggtgttctaaaggctacagctgatcccaacgttttagtaggggagttccatcaacaaagataaaaataccaaataccaaaatgtattacacatttaaaataaaaataaagaaaatctacattaatttatatttatttttaacatataacttcttgctaaataaagaataactggtaaaatgtttcatttaataaatgcgccacaaaaaatttgaataactagccatttaaaatgcagtaaatcttcaaaacaaaacccaatgtttctatataaaaattaggcaattatttttaagctttctttatccgggagatgggaactattttctttatgaaataatatagttaatgaacttttaatgcatctaatgaatccacattatcatgcaattttaagggtttaatgggttttattcattttaaggtaaagcggtcgtgccagttgagtttcgaaagccaccaagctgtccgaaaataagttataaattagatgtatgcgggggtaaatgctttatttactgcatggccgccgccacctgacactgctgttggtacttggccacggattcccgatgcttcagcatgtccttctccctggattaaatgaaacgaaattgaaagaggaaaagggtaatatgtaagtaagagactatagacaactaggcgatggcaacccacatgttctccagtgcgtcggtggagctcttcagctccttggagatgtactcgatgcgctttccgacattctggcgcgactcctccagctcctgtttgaccagaacgggcccgaagagcttgtagaccttgttgtcggggcccagaaga

SEQ ID NO: 41657 - DNA, 1383 bp, DROSOPHILA
atgggctcgagccacagcatccatgttcccggcggcggcaccgaaggctaccacgtactcaaggtacaggacaactcgcctggccaaaaggccggactggaggccttcttcgacttcatcgtcgcaatagccggcacacgcctcgatcaggacaatgatatgctgaaagagctgctccgccagaacgttgacaagcccgtgcggctcaccgtgtactccagcaagacgcagacggtccgcgaactgacccttacaccgagcaacaactggggcggccaaggactgctgggcgtcagcatacgtttctgctccttcgagggcgccaacgagagcgtctggcacatactcgaagtgcatcccaattcgccagctgaactcgcaggactgcgagcctacagcgactacgtgattggggcagatgccataaggcacgagaacgacgacctgttcacgctgatcgaaacgcacgagcagcagccgctgaagatgtacgtttacaacctggacgatgacgcctgccgcgaggtgaccatcaagccgaataccgcctggggcggcgagggagctctgggctgcggcattggcttcggctatttgcatcgcattcccgtgcaggcagagccagtgaccagcagttccgctgctgttcctgctgctgccgccgcggagtccactgctccgctgttaactgccggaggagctgctccggcgggtgcacaagtagcacaagtagtctcaccaacgttgccttacataccgccgctggccaacacctttggatccacaaacgccgaggtcagaccaccgactattgagccaccggcacagagcttgttcaagacctacttcaatccggatgaggctaccgatgccctaaccgctgcgctcgaatcgcaggccactattgccgagcccgtttccgttcccgctccgccggcggtggctgacgtgtccgtagcgcaacctcaggttcaggtgcccgcaccagcgcaaccattgccgccaccagccaacatctttatacccggcgttttcgatcccagtacgcagcaaaacgctaacgctctaggtggcatacccgctgcccagctaccatttccacaggccacggcagcgccagcggctgtgcccatgttctctgcaccacagcaggcctacatgtcggccccggctgcgctctcctatccagccggtgcacagacagtgccgtcgtatccgcaggtgcaaccctccatgggcggactgtttcccacgcagccaacgccgttgccgccgcagatggcccatgtgtttgcaccaccagtaccaccgcaagctggcgctgctccggcggcaggcaacgacgaactatccggaccggcagtgaatcaggctggaaactaa

SEQ ID NO: 41658 - protein, 460 aa, DROSOPHILA
MGSSHSIHVPGGGTEGYHVLKVQDNSPGQKAGLEAFFDFIVAIAGTRLDQDNDMLKELLRQNVDKPVRLTVYSSKTQTVRELTLTPSNNWGGQGLLGVSIRFCSFEGANESVWHILEVHPNSPAELAGLRAYSDYVIGADAIRHENDDLFTLIETHEQQPLKMYVYNLDDDACREVTIKPNTAWGGEGALGCGIGFGYLHRIPVQAEPVTSSSAAVPAAAAAESTAPLLTAGGAAPAGAQVAQVVSPTLPYIPPLANTFGSTNAEVRPPTIEPPAQSLFKTYFNPDEATDALTAALESQATIAEPVSVPAPPAVADVSVAQPQVQVPAPAQPLPPPANIFIPGVFDPSTQQNANALGGIPAAQLPFPQATAAPAAVPMFSAPQQAYMSAPAALSYPAGAQTVPSYPQVQPSMGGLFPTQPTPLPPQMAHVFAPPVPPQAGAAPAAGNDELSGPAVNQAGN

SEQ ID NO: 41659 - DNA, 5602 bp, DROSOPHILA
tccccaaattgcgctcttcgctgcccactgcccactgcgctgcggctgcgacgcctgcatcgctggtggctgctctcgaaatctaaatttcaagttcgtctcccgggcaatccatcctggcaggaggtttttgccttgcctagctactaccactcccactcccactgccactcccgctcccttgcattttctgcatctgcggaaagcaaaacgaagcaataaatacatacatagtaaaggctacacaacaaagggacgtccccggacccgaacccgatcccgacctctcaccacccattccctcttccgaaccgctccgttctgcgctggttgaaaacgaaaccggatttcgttttggtcgattttcgctcactttgctactcaacttggttgagctgcccttttttagaagttctgagttgtctcgtgctgcgcgccgcctcactggcgtttttgcatttgactgagttttcggaatgcagttttgttttatttggcctcacagttcgtgccattcctgctttatttgctcgtttgcgtttattttcgctctcgtacttctcagcctgattcagtttccgtgcaatgttttgcatatttgcgtagtggacaggttttacttttatttattatttgtgttttatttttaactttccgcgactggcaaaaagagaacgagaaactcctttgttttggttttgaaacggaactggttttctgagtcagttggctgcttgggcacacagtggggcgtggagaaatctctagagttgcaggagattcccttcgaaaccttattccgtaagttcgcggttaatacaagatgagcagggcttaattaaatcgattgaaataaaactaacaacctaagaaattgtttaaggggtacctcttatttgtcgcacagaattcgtatactgcttcctggcgaactttcgatcaaattatattgtcagcatggctataataaaatcaaaatgggtcagataactaaggcttatcatttttcgccttcagattcgcaactgcattttcgggcatcaccgggcaatcgggccacgtccacgttataaagccggaactcgacatttcggcgccgcacattgagcgtgaccaccacgcagtagagtagcatctgcaaatgcttggccagcatcacgtagaaggcgcccatgtcgtccgggaatagggcttcggcccacgcggaacagtcgaacaggaagtagccaccatcgcggctggagctgtgcccgaaggagaagcgacgctcctggcactccagcaggccaaactgaaagcgcgtgaagaagtagttgaggccctctagcgaactcatttctctactggctggggagcccgaaggccaccagctcaagttgcacctggcatcgtccacacccgaatgaaggtcccaacgctcgctctgctccacgctggcgcggaagtagcggtttccattaaccacgatggcgtccagcagctttccgctccactcgccaaggtggcggaatgtactggccacacaacaggccaccacgcagcatccgagcgtttgatgcccacgcaccttccggtcgaaccaaggagccctcggatgcagtccgcccgacagcgaccagagtcgtcccgtcagctccacgtcgaagttctggctccgagcagcgacgcagttgcggcccagccgctggctccagatcggcagacagttggacggcgtcagccaggtcattgactcgctccgcgctgacagcaaagcagtctgccccagccgccttaatatgccgccggtactggcacactcctcgctgcaaattttccacagtttccacattttccaggtgccacctgtttccatcgggcaagatgtaaaacctcggcgttagcgtcggaggaccctccgaaactaggatgtctcgcacaaagttgtgggtgcgcatgcgccgcattatggacgataaatgcaaggcgactgtgaactataagggcataaagggcagcgaaataagcaggacatttcggaaggactccccagtaccctccttatgtcacgaaaaaatgtaaggtgttggaagtgcttaacggacgaaaattttgaactgaacttaaagacagagcctaccgtagcaactaacgattaaagaaattgacttctaaggaacatttgttagaaatacctacaaaaagtagatttgagttatgcggctatcatatactggttaatcagcttaatggagtggagtgttagggaaatggagacatgcgagtaggaacgcggctcttccctggattttatacgaacgccaccttgccgcagtttcacacaactttttgggtttcttaagatgactaaataaatttgtactgtcaagaatatctcaagaatgcctcttcagatttagagtgggcgtgcattcgcagtatactgctgtgactatcagataccaatcaaatagtgcgatagagaaataatatgcaagcagcaaatccattgtctagcaatcagaatggcgacatttctagctcattactaatcatattacaaatagtccgaattgattagacgcttattagaaggattttcaaatattcctttttttggtactcaaaacaaaatgtattcatagcaatggtaatgttatgtacattacttattgagcgttgttcggtcactttgcgaacaatatttttacaaaactctcttttaatactaaatttaatataaatatgcctatctactaattttaataattaattaattttaaaattaaattttcattttcaaaagctggtcaacaaacaaaacaagaaagaaagccatagtcgagttccccgactatcagatacctgttactcaactagtgtgaatgcgaacgcgaaatttcatcagaaaaaggtttaaaaaatttccaaagtgtgggcgtgaccgattcggcggcattagggcgttagagtaggcgtagcaaaaagtttttttttggcaaatcaatagaaatttacaatactaataaaattatggccggttttagagtgtcttattattcaaacaaatgttgaaattgtactccctctagctaaataacaagttaaaaaaattgaattgaaaagttgcttgttttttaataaacttaataaaagtcaaaacttaaattgaatgaatttattaatattaaaaaaaagttgtcggcatatacaatttgctgctattttatattttcttatacaaggaatgcttataatttgtatgatatcggcctattaaaaactaattaatttcacataccaaatgcttattgggtcggaaaagttatgtatttaaataacaattattattattactataattattattattacaataattatcattattactccgaaaagttgttagccctatctaataatctatagctaactctcataaaaaccatattaatcaagctccacaatcaggattattctttgaataagcgatatagctttggttttttgggttcctgccccgatcaaataaatcctccttggccctgcgaaattccacttccatctgatttaggcgtcgtccgattttatcgcgcaccagtgcaatcgacaccatttcccgctccacatgctctttagtgaccagactacgatggaacttgtcgctaaagatatcaacggagtggtccagggtaagcattttgcattcgagaccccggagatttttacggaggtactgggcccgactgctgaggtcttccttcggtccgctgatgtctgatggttctaaaacgctgacagcgccgatttggctgtttggtcgttcttggccttttccttccggctcattgacgctcacatagtacttatgtattttcagcaggttggcccggaaccgagcccagtccgcagtgtccggatcttgctccatgccagaagtaaactgattgatttcattgatgagcagggcgagttcaccatttcgtctgacgtcgccttctcctagaggttttcccgctttgttcttacgatctggaatctgagaatcgtctttggtctttgctttattctcagagtcattcttctgcatagcaggattttcgtcctttggctccattaagcctttctgaaagcgtagcattgaggaatatgaaatggtgctagaaactcttaccttaatcaggatttctttgaagctcttagccttagaggtcagcttgtccatgaattcgtttcgcatttctttgactatctcagcaattccactacgatccgccgacctggacaaaagacccggatagtccggatagtctgtaaggtcctcgttcgagggcttgtccaatgagttaatgtcaattaaacccttctgcggggtcagacttttgttaactaccgagcgtccgtggtggccatactaacctctactagaagacccaggtgaatgtcgtaggagctaagctcggatggatcagctaactcatacccaaatggtcttatcgtctcctggctctcactctgcttcagggtaagctggctatctgacgatctcacatcaccccatggttcggacacatccaactccacggaggcgtcgtcggtgggcagttcgcgttccagttccatttaaccgaaaatttccaaattaccaatgcttggataagtagaaacctatcacggcaaattttaaatatgttaattcctgctaaattacttgactcgaaatcttttgctctgacagtcgacacagagtctccttcctttaattcatttcattgaagtagaaaggggtgcaaccgcggctgcgatcgtgataaccagtcctggagaacagagagcggaaattaactttgcgtttctgtaacgcattagtgcaaccaataatttgaggcatcgtaaacacgtcgtaaattttgcacacgcaaatttaggtcttaatattctacagcgctcagcagacaagcaaccacagctccctgttcaactgccagtcgtaattacagtccattaagttcgctgcgtttgcgctgccctaccgtttcttctttataaatgataagtgccgcttgccggcaacctcccatgtgatggtttgctttgacgaaaacgtctcttatgtggcatgcaacagtctttgctgaggtgcaacagtctttgctgaggtgtaacctatattctacaaatgaacaagaagaaaaactattctggatcgcttcgacttttagttacgttactcgtggactgagaggaaactatctagcaggtcaaaaccacatctaaatctctcgaccaatacttccatttattggccgaatcttacaaaaagggtatttacacagcgaggtttgttttcggaagcataaaacattgttattagttacaaatctcccgagttctgcgagccatcatatatccaattacacggattgaagagtccaactcaacccaactctgttccagaatctatctcccgctctttcgggaaaggatacacgtaatcgtcggctttagagataagttccctttacaagagttggcattccttcctgttggaatacaaatttaaactcaaatcataaatatttgagtaaataaatatgtattctgcagagtgcaaacgttaagt

SEQ ID NO: 41660 - DNA, 1872 bp, DROSOPHILA
atggaactggaacgcgaactgcccaccgacgacgcctccgtggagttggatgtgtccgaaccatggggtgatgtgagatcgtcagatagccagcttaccctgaagcagagtgagagccaggagacgataagaccatttgggtatgagttagctgatccatccgagcttagctcctacgacattcacctgggtcttctagtagagaagggtttaattgacattaactcattggacaagccctcgaacgaggaccttacagactatccggactatccgggtcttttgtccaggtcggcggatcgtagtggaattgctgagatagtcaaagaaatgcgaaacgaattcatggacaagctgacctctaaggctaagagcttcaaagaaatcctgattaagaaaggcttaatggagccaaaggacgaaaatcctgctatgcagaagaatgactctgagaataaagcaaagaccaaagacgattctcagattccagatcgtaagaacaaagcgggaaaacctctaggagaaggcgacgtcagacgaaatggtgaactcgccctgctcatcaatgaaatcaatcagtttacttctggcatggagcaagatccggacactgcggactgggctcggttccgggccaacctgctgaaaatacataagtactatgtgagcgtcaatgagccggaaggaaaaggccaagaacgaccaaacagccaaatcggcgctgtcagcgttttagaaccatcagacatcagcggaccgaaggaagacctcagcagtcgggcccagtacctccgtaaaaatctccggggtctcgaatgcaaaatgcttaccctggaccactccgttgatatctttagcgacaagttccatcgtagtctggtcactaaagagcatgtggagcgggaaatggtgtcgattgcactggtgcgcgataaaatcggacgacgcctaaatcagatggaattcacagtcgccttgcatttatcgtccataatgcggcgcatgcgcacccacaactttgtgcgagacatcctagtttcggagggtcctccgacgctaacgccgagcgaggagtgtgccagtaccggcggcatattaaggcggctggggcagactgctttgctgtcagcgcggagcgagtcaatgacctggctgacgccgtccaactgtctgccgatctggagccagcggctgggccgcaactgcgtcgctgctcggagccagaacttcgacgtggagctgacgggacgactctggtcgctgtcgggcggactgcatccgagggctccttggttcgaccggaaggtgcgtgggcatcaaacgctcggatgctgcgtggtggcctgttgtgtggccagtacattccgccaccttggcgagtggagcggaaagctgctggacgccatcgtggttaatggaaaccgctacttccgcgccagcgtggagcagagcgagcgttgggaccttcattcgggtgtggacgatgccaggtgcaacttgagctggtggccttcgggctccccagccagtagagaaatgagttcgctagagggcctcaactacttcttcacgcgctttcagtttggcctgctggagtgccaggagcgtcgcttctccttcgggcacagctccagccgcgatggtggctacttcctgttcgactgttccgcgtgggccgaagccctattcccggacgacatgggcgccttctacgtgatgctggccaagcatttgcagatgctactctactgcgtggtggtcacgctcaatgtgcggcgccgaaatgtcgagttccggctttataacgtggacgtggcccgattgcccggtgatgcccgaaaatgcagttgcgaatctgaaggcgaaaaatga

SEQ ID NO: 41661 - protein, 623 aa, DROSOPHILA
MELERELPTDDASVELDVSEPWGDVRSSDSQLTLKQSESQETIRPFGYELADPSELSSYDIHLGLLVEKGLIDINSLDKPSNEDLTDYPDYPGLLSRSADRSGIAEIVKEMRNEFMDKLTSKAKSFKEILIKKGLMEPKDENPAMQKNDSENKAKTKDDSQIPDRKNKAGKPLGEGDVRRNGELALLINEINQFTSGMEQDPDTADWARFRANLLKIHKYYVSVNEPEGKGQERPNSQIGAVSVLEPSDISGPKEDLSSRAQYLRKNLRGLECKMLTLDHSVDIFSDKFHRSLVTKEHVEREMVSIALVRDKIGRRLNQMEFTVALHLSSIMRRMRTHNFVRDILVSEGPPTLTPSEECASTGGILRRLGQTALLSARSESMTWLTPSNCLPIWSQRLGRNCVAARSQNFDVELTGRLWSLSGGLHPRAPWFDRKVRGHQTLGCCVVACCVASTFRHLGEWSGKLLDAIVVNGNRYFRASVEQSERWDLHSGVDDARCNLSWWPSGSPASREMSSLEGLNYFFTRFQFGLLECQERRFSFGHSSSRDGGYFLFDCSAWAEALFPDDMGAFYVMLAKHLQMLLYCVVVTLNVRRRNVEFRLYNVDVARLPGDARKCSCESEGEK

SEQ ID NO: 41662 - DNA, 6785 bp, DROSOPHILA
gcattatatggccataaaagacgtcggattaacttgcatatctaacatttttgtgggcaaattagcggcaaaactaaaaacatttaagatacgtgacctaagtcaataaacttgtatttacgtgcgaattccagccattcggtacatttaggtaaatggccaatttctttgagagtgacagaaaaagtgactcgatggaaaataaagcagcaggagttccaatggcttagattttgccaaaactgcgccaaaatcacgttcgaaaactatcaatggcaggattccggctgtgggtcatcctcatcctggctgtggatgtgtgtgagtgtggtgcatataaatttcgccacctcctaaactctcgttttgtttggcagtgtgcgtgggacatcatttgggtattatgtgctcgcacagacaccagaatatttgtgtgtgtgtctgtgtgcatatagatataagtgaaactcctgcggtcggcaaaagtcaacctgttgaatgcaggagtcacttggagtgagatggcagctattttcgtctcgccattcggcaaaaatgatctgagcaaattagtaacattgcgaaaagtcaattgccccgggtaaacaggtaaaaatccagtgcagccaatggcaggttgttttctcaggatcaggtaacagatccttttcgggatcagttgggaaactgttaaaagtgcttgtgccgctggaaagcggctcagttgcaaacaggtgattgcagggatatgagcaagtgctgagaaggtgctcgcaacagtctcaaagcaggatctataaaaaaggatatctttaaaatgactaaccatcggcgagtgcgcaaggattgctatgagagcagattgcatggtcggttgtggtttttggcaacgaaatatatcaacgttcattttttttagtttgttaccaactttctcctctgttactaaaaatgctttttggttatttcgatttttgcagatatagccaaaacgtgtgccatgaaggagaaaagcaaaaatgcggcacgcacgcgacgtgaaaaggaaaacacggaattctgtgaattggccaaattactgccgctgccggcggcgattacttcgcaactggacaaggcctccgtcatccggctgaccacgtcgtatttgaaaatgcgccaagtctttcccgatggtaagttcaatcggaaaatcgtcctgcggaaaaactcacttgattggcgctcaatttgtcgccgctcttggcttttcatctcgtgtgaaatgcgccttgtggctacacggcaaatgatgcggaatctttgacagccacgcgaccgacacgctcattataatccaagctcgtcatatcctcgcagcaggacatgctcctttgttttcactttaactccaatgtacttgcaatgatttcatttcattccattttacgctgccagttttcaagtttaagcggctatgtttgtttaaagcatatgttggcgagaatcggccagggaaataacagggaaatagcactcaacaaatgggcagacaataaacagcaggatgaagtgggcggctggttggggttggcgaaaacacaatggcggctgcttggttgtttcactcaaagagcagcgagagccgcactggaaaaccgaactcgaacatctcccccccccccccccccacacacacacacacacacacacatttcccgaacttttccccaccgaccatgtgagcgtgcgccactgagattttctgctgacaaagagggttgctcgagaagtgagtgggtgggtggttcgttggtcggtcggttggttgggcgtttgacgctcccattgttgccgcaccgttttgtgcttttcttttcagcctttattgaaataattattttaataataggcaacaaacaacgagatccggacgggccaaggaagtgccagtggtattatgtacaacacaatatatgttgtatatatggtgcgaagtcgatgaaagtcggggggggtgggccagtgggtggaatggtgggctgtgaatgggccacctacggcgctcgatgactttaattgggaataatatttagacgtcagcagtggcaagtagggcgtgtgctgccactgccactgctgctggtgggaattttgcgaattaagatacttcgagcggatgacaaacaattaattcaggacattggggcggataagacaatagaaacgggagcttgacataatactaaatccaagtccaatcaaacggagacaatagaaaggacagcttaaatataaaactatataaaaatcatttaaaacggaatacaatttgattgtattaagtagcaagaactttttagatttcatttttaaagacaataaaacatgtttcataaatctaaatcttattttgtaggtcttggcgaagcctggggctcatcgcctgccatgcaacgcggcgccaccatcaaggagctgggctcccatctgctgcagacgctggacggattcatcttcgtggtggctccggatggcaaaatcatgtacatctcggaaacggcctccgtgcatttgggcctcagtcaggtgagtgtcggtgaatggatctcttgtcctgatttatgcgcataatttgccgggccacctgaatttgcctttttgtatcctggccaccacttgcatttgcaagtcaatgggcttgaatggtgcaggtcacccaagtgctgtggcttcagtaaagacgattcatttgcatttgcccactaattggcactcagtgctggtggagcaaattaacatagctccacttatatgatcagcataaagaaattaactttacatcagtataggatatattttatataaatttaatatttaatggtttatttatctcttttttttaaccaggttgagctgacgggcaactcgatattcgagtacatacacaactacgatcaggacgagatgaatgccattttgtcgctgcatccgcacatcaaccagcatccagtgagtagagcatccgtgtttccacagagtcctttgaaacatttgaaaatgtttgcgctctctttctttctctctccatctctctctctctctctcactgccatgcatccatcctactctgacttgtactcacgccacaggccgcctttctcaactccctacagctcgcccagacgcacacgcccatcggcagtcccaatggcgtccagcatccatccgcctacgaccacgatcgcggatcgcacaccatcgagatcgagaagaccttcttcctgcgcatgaagtgcgtcctggccaaaaggaacgcgggcctcaccacctccggatttaaggtaaagaattttatacataccattcctttaaatggattgattgcttatccttgtattacttgatgattttaggtgatacactgctccggctatctgaaggctcgcatctatcccgatcgcggggatggacagggcagcctcatccagaatctcggcctggtggccgtcggtcactcgctgccttcatccgccatcacggaaatcaagctgcaccagaatatgttcatgttccgggccaagctggacatgaagctcatcttcttcgatgcacggtaagtgtaattcaaatttccatttaattagggcacaaatagatgaatagttcgttgtctgcatattttctatcactttgtattgaaatccactcgagaaattcctataaatcttacaacatcgatttattggatgtttaaatatccttaatgtttaatatccttaaatatcataatgtaattctaagaccaatttttatccgtgtagcctggtgctttcacagcataatttttctcactgcacttaaaaaattctcgaaagtatcctttgcctgtttgccgtatattcgacactaggcaaatatttaaacgggccgcagaattcgttttttacaccacgataaaaagtaccagcagacgcccccaaaaagataatgttttcaaagtggcggaaaacaaaaaaaataatcgagtagggaaaaggaaatgtaagcaagacggtggcgacatgacaaaaggaaaaacaaatcatttccctcttgagcttgattttcctttgtccctgtgcgtgtgtgtgagtgtgtgagtgagtgctgagggggaaaggggacgctgtgtaagtgcctgccgggccaaaaaaccagcccactttgtctgacattattgtcactcaattaccctcatgatgccacacagcatattgccatcctattctggcgccctcgcactttcgcagcaaacaaccccaaagtgctgagcgggaaatcagcccctttttcgccgcttcttttttttttgttttcctgcataattgaattggagtcggcaaaagtaaaccaaccgaataaaacacgccagcgacaaaggcaacaccaatgaccattcattcactgtttaaataagccagcgaaacttttgccctcgacctcgaaacttatccccattctcatgctcatccttttgcctgtttatttgcttacagcgtatcgcagctaacaggatacgagccgcaggacctcatcgagaagaccctgtatcagtatatccacgccgcggacatcatggccatgcgctgctctcatcaaatccgtaagtacactcatcccaatacactgccataataatttccataaaacatcattctcatcgagtttgtttcttctctccctatcaatagtgctgtacaaaggacaagtgaccaccaagtactaccgcttcctcaccaaaggcggcggctgggtgtgggtgcagtcgtacgcgacactggtgcacaattcgcgatcctcgcgagaagtgttcatcgtgagcgtgaactatgtgctgagcgaacgagaggtgaaagacttggtgctgaacgagattcagacgggcgttgtgaagcgggagcccatatcgccggcggctcaagcggcacaggcagctcaagcggcccaagcggcccaagcggcacaggcggcacaggcggcacatgtggctcaagcggtgcaggcccaggtggtggtggtgccccagcagtcggtggtggtgcagccgcagtgcgccggagcaacgggtcagccggtgggtccgggtacgccagttagtctggccctcagtgcaagtcccaagctggatccgtatttcgagccagagctgccgctgcagccggccgtaacgcccgtgcccccaacgaataatagtagtagtagtagcaacaataacaacggcgtgtggcaccaccatcatgtgcaacagcagcagcagtccggcagcatggatcacgatagcctgagttacacgcagctttatccgcccttgaacgacctggtggtgagctcgagcagcagtgtgggcggtggcaccgcctcaagtgcgggcggtggatccagtgcgtcggcctcgtcctccggcgtttactccacggagatgcagtatccggacacgaccaccggcaacctgtactacaataacaacaatcactattactatgactacgatgcgacggtggatgtggccacctcgatgatacgcccattctcggccaattcgaatagctgctcgagcagttcggagagcgaaaggcagctgtccaccggaaatgcctcgattgtgaacgaaacatcgccctcacagacgacctacagcgatctgagtcacaacttcgagctgagctacttctccgacaacagttcgcaacagcatcagcatcagcagcagcagcagcatctgatggagcagcagcatctgcaataccaatacgccacctggtgatcctaaaaatgtaaataaccaaatgttggacgatgagccttgactgctactgtactgttgtttataaaacgtcgactgcccccaccccaccatccgttgcaatgttatatacacctctgagttctcagttcgaaattgtaatatgtggctgagccacacaccatctgaatttcaggacctcctctatgcctctattttatttatttaacacccccaccatgcattacccaatgcaatgcgttcgcgttaattgtgcagtgtaaagttacaaagaaattgatacaaaatgctaagaaattaagaatgcggaatgatcgttgttaacaaatgcaaaagcaaatacaaattctaataataaatagttgtaaggcctaactgtaaactgttcatacaaactaacttaaattaattgcacatacttatacttataactatatagtaaagcgcatacacttggcccccataatcatgcatacacatcggatctacgaatatacatatgtatatgcaataatgtgtaaatagtgcagggtccgctccactatgcagttaacgaatatgatcttcataagtcaagtaaataattgtaaatgtaaaatctattattatcgagaatttttctaatttgaataaacaaattattacgtgggtgaacaataaaaaaagagcgagagttcgattttttcaaataagcgccgctggaagcctctagagttattatttaatttagtaatcttggtttacaaataaaatgttattttcaaaaactagcacctttatctatttccattatctttgttttaaaattatctatttatatgcttttatatatttcacaatttagcgttttaatcaaattttgtatggattgaaaaatgcagctttgacgcaatagccgattttaaaatatttcgttgcatatttttaggtaacatactaaactacacatatatttagttccttaatctgccaccagcttacattctacgtatacgtattg

SEQ ID NO: 41663 - DNA, 1905 bp, DROSOPHILA
atgaaggagaaaagcaaaaatgcggcacgcacgcgacgtgaaaaggaaaacacggaattctgtgaattggccaaattactgccgctgccggcggcgattacttcgcaactggacaaggcctccgtcatccggctgaccacgtcgtatttgaaaatgcgccaagtctttcccgatggtcttggcgaagcctggggctcatcgcctgccatgcaacgcggcgccaccatcaaggagctgggctcccatctgctgcagacgctggacggattcatcttcgtggtggctccggatggcaaaatcatgtacatctcggaaacggcctccgtgcatttgggcctcagtcaggttgagctgacgggcaactcgatattcgagtacatacacaactacgatcaggacgagatgaatgccattttgtcgctgcatccgcacatcaaccagcatccaatcgagaagaccttcttcctgcgcatgaagtgcgtcctggccaaaaggaacgcgggcctcaccacctccggatttaaggtgatacactgctccggctatctgaaggctcgcatctatcccgatcgcggggatggacagggcagcctcatccagaatctcggcctggtggccgtcggtcactcgctgccttcatccgccatcacggaaatcaagctgcaccagaatatgttcatgttccgggccaagctggacatgaagctcatcttcttcgatgcacgcgtatcgcagctaacaggatacgagccgcaggacctcatcgagaagaccctgtatcagtatatccacgccgcggacatcatggccatgcgctgctctcatcaaatcctgctgtacaaaggacaagtgaccaccaagtactaccgcttcctcaccaaaggcggcggctgggtgtgggtgcagtcgtacgcgacactggtgcacaattcgcgatcctcgcgagaagtgttcatcgtgagcgtgaactatgtgctgagcgaacgagaggtgaaagacttggtgctgaacgagattcagacgggcgttgtgaagcgggagcccatatcgccggcggctcaagcggcacaggcagctcaagcggcccaagcggcccaagcggcacaggcggcacaggcggcacatgtggctcaagcggtgcaggcccaggtggtggtggtgccccagcagtcggtggtggtgcagccgcagtgcgccggagcaacgggtcagccggtgggtccgggtacgccagttagtctggccctcagtgcaagtcccaagctggatccgtatttcgagccagagctgccgctgcagccggccgtaacgcccgtgcccccaacgaataatagtagtagtagtagcaacaataacaacggcgtgtggcaccaccatcatgtgcaacagcagcagcagtccggcagcatggatcacgatagcctgagttacacgcagctttatccgcccttgaacgacctggtggtgagctcgagcagcagtgtgggcggtggcaccgcctcaagtgcgggcggtggatccagtgcgtcggcctcgtcctccggcgtttactccacggagatgcagtatccggacacgaccaccggcaacctgtactacaataacaacaatcactattactatgactacgatgcgacggtggatgtggccacctcgatgatacgcccattctcggccaattcgaatagctgctcgagcagttcggagagcgaaaggcagctgtccaccggaaatgcctcgattgtgaacgaaacatcgccctcacagacgacctacagcgatctgagtcacaacttcgagctgagctacttctccgacaacagttcgcaacagcatcagcatcagcagcagcagcagcatctgatggagcagcagcatctgcaataccaatacgccacctggtga

SEQ ID NO: 41664 - protein, 634 aa, DROSOPHILA
MKEKSKNAARTRREKENTEFCELAKLLPLPAAITSQLDKASVIRLTTSYLKMRQVFPDGLGEAWGSSPAMQRGATIKELGSHLLQTLDGFIFVVAPDGKIMYISETASVHLGLSQVELTGNSIFEYIHNYDQDEMNAILSLHPHINQHPIEKTFFLRMKCVLAKRNAGLTTSGFKVIHCSGYLKARIYPDRGDGQGSLIQNLGLVAVGHSLPSSAITEIKLHQNMFMFRAKLDMKLIFFDARVSQLTGYEPQDLIEKTLYQYIHAADIMAMRCSHQILLYKGQVTTKYYRFLTKGGGWVWVQSYATLVHNSRSSREVFIVSVNYVLSEREVKDLVLNEIQTGVVKREPISPAAQAAQAAQAAQAAQAAQAAQAAHVAQAVQAQVVVVPQQSVVVQPQCAGATGQPVGPGTPVSLALSASPKLDPYFEPELPLQPAVTPVPPTNNSSSSSNNNNGVWHHHHVQQQQQSGSMDHDSLSYTQLYPPLNDLVVSSSSSVGGGTASSAGGGSSASASSSGVYSTEMQYPDTTTGNLYYNNNNHYYYDYDATVDVATSMIRPFSANSNSCSSSSESERQLSTGNASIVNETSPSQTTYSDLSHNFELSYFSDNSSQQHQHQQQQQHLMEQQHLQYQYATW

SEQ ID NO: 41665 - DNA, 5300 bp, DROSOPHILA
gcggcagaagcccaagcagtgactgcgtggcatagacccgacccctgggagtattgcgaactgctcaaacattttcgaaatcgcattcagaggtgaaggtgcaacagttgctggcgtatcttgtttcgacggcctcgggtgcagttaaagggcttaaaggggcggcaggccagttaaagaaaaatatgggttagattcttccgcagcgccatgccagcggtcaatacaaagcaaaattgaaacgcggttctctccgcctccgtttagtaccgcctgaggaagaacagaagctgtgcagcattgacaaaaaccaacccaaaaccaatagctataataatgtataaatatcatttttgaataatagaaaactttcaattactagtaaaaggtactctttcgaattttcgatgcttggtataaaaaaatacctctgaagcagatagaaaaacattcaaatattttgactacgatttacttttaatctgactaaattcgagtgagattttattcgttgcaagaattttgtaatatttattgtaatgtatcgttgtttcgttatctttggacaacgtctatactcacatatatgcatatacgtttttgactttcgcctgcagtcaaaaatttattcagtcggctttattttcttttaaactatatttattttatattttgtttgggtaaataaagtattcactattgactggcaagtgaattttgtacaacttgctacgacatttttatgttcagatggaggcaaatacagccccaggttaattgatggctttctaacttatgaaatgcgttatttaattataaagacttttttaaacgcgcgcttccgtcccagagacattgttcaacactagtcggccggacgtgtcatcagagtaacccgaccagaaactgcatgaaataagcagcactgtcgacagtcaaaagctgcctgcttttagccagcccagtcgaacgtttcttcttcttctttggcccagaaacaacttgttgaacgaaagaaggccagctctctgttttgttgctccacgcacacacattccgacgagtgttacacgtcaccagattaaaggaactatcgcaaaaactatcagtgataaagatgcgccagctgaagggaaaggtgaaggagacgcgcaaacagaagaaggagcgcaagctggacaacctggagacccaggcgaagatccgcaccgtggtgctgccggcgctcggcgttttggcggtctttctggtgctgttcgtctacttgaagacccgccccgcggtcttggcctaatgtagtcataaaatgtagtttatagtcgtggtcagtgcaattgaatcgttgtaaagacatatagccttaatagtacaattaaatcacagttcgtccatccaaaaagcatgttttacataaagtggattttccatgacacgaacaacaccctgctgttcaagtgcagttcctgggaatttgagatttggggacaaaatgtatccgaattacggtcgttggtggtagtgttgaaaaccgtctagcgctttggcggttgattaaaaaagggcactaggaaacggtaaaaaccgtagcagaggcacttcaatatgtaaatatgtgcatatgtatattagagaaggcggcatccaccaacatgttttatttttggccgttttgcgttcagtttttaattgcgattgcccttgtttcagtttcacttacgcccgtccaccgaggagctcgtcgtcggtgaccgcaaactaataattgttaatacatatgcatatgcatgtacataaattgaagtaaaagttcagtgctcgaaaggcagtaacttaactccatagttatcagagtcagccaaatacgattacctaaccatacaaacacaaatcgcagtgggccagtcagctgttttcagattccgagcagctgcagacgaagcgccgaagcagcgtcgtttgacgtttctttttcacattctctcacttttgctaagactctcacgctggcggctgcgggtgacaaaggctcctttaactattccactatgctcaagtttctggtaagttttccggtttcctgatgtttttaagtttatgattcacacctgaaatcatatcagatacgagatacaacttttctgtggtttttgtggttgtgttgcttttcgcggcgatgacgcgcccctgcacagtggtgaaatgtgttgtctaggggttcaaaatcaaaaccaattatttgattaaatattaatgattaatataaatgacaaaatgtaatacatttgaaaataccttcccaatatctaacttcaacaaataaaaaaatagtattaaaagtttaagcaaaattcaaaatattcttgctcggataaaacaagagtggattggtaaaacggtagaaagtgcgccaaaacaccagttaaatagattccaaaattggttcaatttgagtttacttcccagtgtgcgctgtttgaatacatacataagtgacttttggttcaacgttatataaggcctcacaaattcaaatatccacaaaaataaaataatcacctagtcgttggaaattatgtcgaccatgaccgctcaagccatgagtaaacagattcggactctttgaaaaacaacacaggcctcaccaaattgatcgtttatatagactggaagttaaaatgaaactgcttggacttggggcgcaggttttgaggctcaaaactggcgggcagagtcgctctgcgaaaacttgcccaccggaagttcgccagccattgccgtgctgtcccaaaaaacgcttttggactttcaagcgagtaatatgtttctcgacggtcagcatgcgaaatagacatcttcaggaagattttcacaacccactctaataatcctcctttctccattccagttaacttttggcgccggggtgtatacgggaatctatgtctcacagaactatgaggtaagccacctaacccacatttgttcttgctcctaatacagtggcttttttaggtcccccgagtggatgatccccagaagttgatgcagcgtttcaacgagaaactcaaagaactaatggatcaaaccaagaacaagtaacagccttggtagtttcgtacaaggataacgttaccttcactaaattcaaaaaagtcatagagcgacctttgtaattttttttttttttttttttataattttttttattatttattgaatcttccctttgtgttaagagactaacaataagtgttcaaatcttaatctaacttaattaactttcacttagtgatagtttttttttttttcattaatgccctaataagtttattgctgggctgggaggtcgttgcggtgcagccggctttgactgcatactcggattagttttcttgcgaggggatttgtatgggtggtcagcttttcggttatacttcgtttttttatcagctattacttcgattactaatttgatttttaggtctctgtgtatgttttcgttccgaaggtaccacgggcgctccagtgataattctcagaattcttgactgtgctcgctgaataatgtctatgttacttctggatgcgttgccccacagctcggagccataagtccagataggttttaagacgaagttgtatagaagagctttgaactcccagactaagtggagagcgagcatttatgagccagtggaggttccttgctttaagtttaagatgtttcgatttggcttctatatgtttgcgccaagtgagccgcctgtccagatgaactcccaagatatgttacctcgtcggcttgtggaatgcatatgttattcaagaccagtggtgggcatgtttgtttgtttaaggtaaaggtaacctgcttgcatttttgaacatttattgaaattctccagtcggcaagccatcgttctacagatgttaagtgtcgggataggagtgccgtggcttttattgggcatttcgagcgactgagtatcgcggtatcatcagcgaacgtggaggttgttagattgtagtctatggggaaatccgccgtatacagggtgtataagattggacccagtacactgccttgcggcactccagcttcgattgcgcaatcgcgtgaagtgcttgtatcgcatcttattgcaaacactctgttatataggtatgacttcagtagcttatgtgtgttttggggcaacagcttgattattttaaacaaaagtccatcgagccacactctgtcaaatgcctttgtaattaaaattgtaaaaattttataagtcgaacttgtcaactaaacctggattttttttcgatatcttatattaagctttccacgcgcttgttttacaaattctgaaaataggacaaagtgctgaaaaaatgcgtgcgaagtcgtgatgatatctttctactgtggtgaatgatggcttttccgaataaaaatttgttgccaggtgcaaccatgacgaaatcaatgctaaataagatcatattatcattctgtatcttaattattttactattttctttaacagatcgcccggcgagaaactagtggatgacatcaaaaaggaggccaagaagatactagacgactgactggcggaataagaccacaattttagtttaaaccaatttatctatgatcaaataaagagaatctatatgtgtaaaactagacaaacgaaattcctccgccgtaatattccaggcgtgtctgaggctggacaaatgccaaccaatcggaggcgtgggtggggaggagccccatgctctggcacttgtagagggccaaagccacgtttgctaggttgcccaggaagtagacgatgcgctggccagttccctgggccccctccgccattttggaagtcacctgggtggtgaagatggccttgataggccggatcagcatcatgccgaccatcatgatgggaaaaatggaaatcgagtttcctgacatgtacatgatgaatagattcatgggaatctgagggaatccaaaggttaagcacgggtctttccaaagggctgctactcacgttcttaagaggtcccagggcaaggtcccacgacttcttgatgaccaggcgctggtcgcgcaccacttcactctggttcaccaaagcagatggattgtagcccagcggcgaaggaatatcagcatttttgctgcaggaaaaagcaaaagtggtaagaacttgagtcaccgcgcaggctagcaatccttacctcccgttaaagtccagcgcccactttaacttttttgggttttgcttggcggacatgctgtgctt

SEQ ID NO: 41666 - DNA, 1146 bp, DROSOPHILA
acttgttgaacgaaagaaggccagctctctgttttgttgctccacgcacacacattccgacgagtgttacacgtcaccagattaaaggaactatcgcaaaaactatcagtgataaagatgcgccagctgaagggaaaggtgaaggagacgcgcaaacagaagaaggagcgcaagctggacaacctggagacccaggcgaagatccgcaccgtggtgctgccggcgctcggcgttttggcggtctttctgttcgtccatccaaaaagcatgttttacataaagtggattttccatgacacgaacaacaccctgctgttcaagtgcagttcctgggaatttgagatttggggacaaaatgtatccgaattacggtcgttggaaacggtaaaaaccgtagcagaggcacttcaatatgtaaatatgtgcatatgtatattagagaaggcggcatccaccaacatgttttatttttggccgttttgcgttcagtttttaattgcgattgcccttgtttcagtttcacttacgcccgtccaccgaggagctcgtcgtcgagtcagccaaatacgattacctaaccatacaaacacaaatcgcagtgggccagtcagctgttttcagattccgagcagctgcagacgaagcgccgaagcagcgtcgtttgacgtttctttttcacattctctcacttttgctaagactctcacgctggcggctgcgggtgacaaaggctcctttaactattccactatgctcaagtttctggttttgaggctcaaaactggcgggcagagtcgctctgcgaaaacttgcccaccggaagttcgccagccattgccgtgctgtcccaaaaaacgcttttggactttcaagcgagtaatatgtttctcgacgttaacttttggcgccggggtgtatacgggaatctatgtctcacagaactatgaggtcccccgagtggatgatccccagaagttgatgcagcgtttcaacgagaaactcaaagaactaatggatcaaaccaagaacaagtaacagccttggtagtttcgtacaaggataacgttaccttcactaaattcaaaaaagtcatagagcgacctttgtaattgtaaaaattttataagtcgaacttgtcaactaaac

SEQ ID NO: 41667 - protein, 305 aa, DROSOPHILA
MRQLKGKVKETRKQKKERKLDNLETQAKIRTVVLPALGVLAVFLFVHPKSMFYIKWIFHDTNNTLLFKCSSWEFEIWGQNVSELRSLETVKTVAEALQYVNMCICILEKAASTNMFYFWPFCVQFLIAIALVSVSLTPVHRGARRRVSQIRLPNHTNTNRSGPVSCFQIPSSCRRSAEAASFDVSFSHSLTFAKTLTLAAAGDKGSFNYSTMLKFLVLRLKTGGQSRSAKTCPPEVRQPLPCCPKKRFWTFKRVICFSTLTFGAGVYTGIYVSQNYEVPRVDDPQKLMQRFNEKLKELMDQTKNK

SEQ ID NO: 41668 - DNA, 8664 bp, DROSOPHILA
gaaatgacagcggcggggagggcgggcaagtgaagagctgcagggcgaggaggagcaggtggtggccccaagtttgccatccttcgtgggaaaagtttgcccgtcgtatttgttcatatcataggtaaatatatcctggacagcctcgatgtttgcttttaatttcgccatttccccatagcctttgctttttaatgtgtccgaatgattagagcgcctgcatcctgaccaattccatcccatcctgaccaatcctgactagctcccaccacagctacttgcatgactcagatggtgtggccccggcaatttcctgctccaatgactaatgaaaatggtgaaaagatttgaatttaccgcactgggagaccgggacacacaaaaggcgctttccttttgctctcgtcaaggatcttatagccagcaacccaaataaatggctctgcagggtggggaagtgggtcttatgcaagcaaataatttggatttaaatcgatttaagatggaaacgaatgaatgtacacacgcattggaaaagtgttttatgcaaatgcacatatggattatttgcgcagataaaacatttcggaggaatatatacgcattggaattaaattttcttattcaaatgcaaaacttcagctgctgaattaaatttttccactatactcttttgtgacttgtaccaaatacaaatcttaattattatagttaaacaaatatttgtgttcaaatttgaatttaatcatatacggaaacatctaaaacaatcgataactggaaatggatcatcgatgttagtttccaattaaaaggtgtgcgccactgctacttcccagtggagttctaaaccacaaagcgatcgatcagctgctctgcacagctgatttatttcgcgcgcttttcatgcgaaaatcattgtgatattttgttttgtttatgtcgcaaagtttattagactttcaatcaatataaattaaagtgataagtgtatttcaagatgtctattctgctggcggacattgatgccacgtgtgcggccttgggatacagtgatggacagaaatatcaagcggagcctgatgccgccgagggtctcaaggtatcttactttttcattcatttaaatttccgcaaatctaaagttttactatccattaagcatctgatatggattctgcgtcgggacctggacaaccacgagtatcgccgtcatttgggccgctccaaggtgctccaaacggacttggtttacatgctgccggactatgtgcatcacgaggagctatccgatctactgatccgcctgctggtcatcctgaccaatccgacactgctgctctaccgggagggtgctcccaaggacaaccatggccggaaagtgttcatggagctaatcgacatcctgcagggctacaaagcagcctttgccaaggacaaagtctggagcgcccttttcgagaagctcaagcaggctttggaaatagtgagtttcatttgcttgacattagtttttaggtctctcattattttgtttgcgaaatcgcataaaaaacaaagtgacaccccatgccacaaataatgaattctaaggacaaacgaaacccaaattattccggcgggaacagcggcgaggaagaggattcctggatgaacagctattacacctgcctggtgtgcatgcagactgctgaatcgccgagggtcagtttttgcggccaccacttctgctcccagtgcatatacaactggattaggagtcagaaatatcaggccaaatgcccctactgccagtccctgatcggtgagaacaccctcatcactatcaccatgcgaagacgaagaacgtactttcgtgcaaatcctttgtggagcaccgccgccagatgcgcatgagcaaagactgtttaaccgaaaacatctttttgccggaggccggcatgttcacacgtggctatatcaaatatccgccggaccctatgccaaggatcaagcctttgccgccccagatgcttcaacagtggtcacgttatcccatagtgcgcattttccttacaccctcgctgcaccagcgcttcattaacttcgttatctttctgttcatgctggccatgtacctacacgcggcagtgacaccgtctttactattgtgagccagtgagacgtagcacccaacaaatctccactaacaaattgtcttttgaatttcgacttgttattgtctgaaatggcatccaagaacatctagtttctgtggccccagcagtgcagttctgtgagatttaccctcttacgtaaataaaattttcttttgtgggcataattattttgaactttcatgggcctgatttccatccctaagcaattttttatccccacaaattgatccaccgcttggattgggctcctgttctaaagcccaagcaattatcgttcgggcatttgcgcaactattcctgtaatctctttaatctatgtattaatgggcaagcgggtacgcaaaacttttaatggcccttgcagctgccagcagtcaagttttcgtggggagagcgaatgtttttcacattgcccaacccacttgaagtttgttttgaccagctctggctttatgactgaactcgtccgctttgtgggttcataactaatttgaacttcatatctgcccgcttttatcttctttatttgttccgtgcatccgtttgcctttattctctcaacttgagctgctgcccaacgaggtccaaggaaggaatttaatttaaaatatatctcacaatatgaattcacatctccaaagggtttcactcacttgctgctttgctttcagcgaaggaggaaaaaccgcaacaagtcgatttaatcaacacccacgacaagttggcggctgtgctggtttcacttcactttgggtgccaatgcctacaaggcaccttcgaatcaaacgcgtcacagttggggaaaaggaattcgattccggcctagacgaatccacaaaaaatctgtcggcagcgtgttgctgttgcaaaaaaagctaagcgaaactgtttggaattgaaccaacatcggtgggtcgagacattgttcaaaccacaaaggcaaaggcccagcaacaatgattgccaatcgatggcagtcggcgttttccaaatgctttcaattgctagttgtgggaaataaaaattgtagaatggccaatctttggatactctcgaaaatataacaattataaatgtttaatcgtgctcattttaagatttcagtgactgctttttatttttatttttaatattgtatattattgctcccaacttattctcaataatcttttaagggtataaccaaaacttgtttgctccagcttgaaataatctgcgagtatccagcaaataaaaaaaggatttcctgatttctgtgtgtgcaatttatggatgagctccgtctggattgccataaattcgtaattgaaaatttacattgaatggaaatgtttgctgtttgtttgtggctcaaactatttttttcaacgcgcggaacccaaactgaaacaccaggttgatgatcccaacaattatcataagttaagtcctggcaaccagaaagtaagaacgtaaatctcaaagatgagagagcgaagccatccacaccaaagttcctagtctccaccacccaccagataccacccatcgcccatcacaacgaaataaattcatttaaagccgattgaatcgacattcataacactccggggagcaattccaaaggattttcatggcgctgcgttgccaaagagtcgcccgaggatttctttacatttccattttttagggagcgcttttccttttatttgtgccgttttcctcggtttttccggctgcttctttttttttttcctccttggttaggttaaatgcacgcgaatttctatatggacgctgtctatttgttcttgttgctgtgtggctgttgtcgttgataatgaatgtgtacgaggatttttccgcttctgcctccggcggatccgcccttcctgctgggtgcgcggtgcactcaaaaaaacaaaaatagttgttaattagtaggaatatatgatacgtcgtttttattaccccaaaatgtgtattaggttgatattttggcttaatatcttttgttttggtattgcaattgttttcagtgcactggtgctgctgactttttatgctttacttctttatttgcgtcgcaccgacttacacgctttgatgtatgcgcggcgagcagccaagtggacaggcgcaggagcaggaggagctactgcccctcctccaatttcgctgcgaaggaaagctttcagttttgaatgagccgccgccccctggaacgtggtgttgttgtttttgttgcgtagggaaaccaaaaacggaagtcattattaactttgcctttgagatgggctcttggggtcctgaggtctggaggcccgagttcctggcacatgcctggatgtgggtgtggatgtggccatgggtgtgcgtgtgagagtggaagtgggtgtccatgtcgggctggaggagtcacagctggcttgtaggcacaaaagccgcattagttgtatttatttttaagctcacagcagcaactgtaatgtcctgctgcgcccaaccctaaccatggagcccatccgcccttccgaccatccaaccatccaaccatccacccatccagtcaggcacccaggcatttcctcttatcgcccacaccctgcccaaattgatttcaacttgactttgttgtggtcccatcgcttgtcttggcccgagtcggggcttccgttttacagtcgagctacataaatttgcaatttaatttaatttaatttcatttgattattttaaattgactcgcgggatttggcgcttagatttttacactgggatttgctgcagcattttatggcgctgatttctaatgccatgctctggctttatttccaggcatttgcgattcgcagcgaagagcagaatcttctgattgagcgcatcctggtcctggtgcggaacgttctgcaagtgccagcgaatccggaggccgagtgccgggcggacaatgatgccagtctgcacgaccaggtcatttgggcgttgcatcaaactggaatgctggacttggtgctgtttgtcatctcctcgccggatgaggagcagttccatttgcacggactggagattgtttgcctgcttttcagggaacaggtatggaagtaaactaatatgtataaaagtaatattaaataccttttttgtgcgatttcagagtgccgaatccctggcggacgcctccctgcagcgcagtctgagcgaaaagcagcgggaccagcaggagctcctggccgcacgacgacgggagcgtgcccgccgtcaggctcgtcctccaccagggcggcattcccgtttcggcggaacctatgtcattcggaacatgaagtccgtttcggatcgggatgtgatatgccaccaggctctggagcgcgtgtcatcgatcgattttgaccgcgagaagcagcagcagaagcgctcccaccgacacatccaggaggaggcgcaggtgacccgtcgcagtgcgttcaccgttaggtgagtcccggtctgctcgtaacccacagccatatccatttgtctgtggccacttcctgcactttggctccgggccttgttcgcattgtgctgttgctgctggagctggtgtggccattagcatcggaattgttatggccaccaacggagtggtggagccacatcccggccattgattttcgattttacgctgccacgaggacagccgtatccgagagatccaagcggagcgagcgagcagtcgagcagagagcgtataaaataatattcaataataaatgaagccatttccttttggccctttcggttcgccctcccatcccggtctttttccacccagcagcctgtaattcctgctgttttatagaatcacacaaacgatattggctgctaggggcttccagactctcgggttccgcctgacttggccgggctaaacaatatcttggcgccgggcgtctctgttcccgtttcccctaatggccaccaggtgcagctattttatgcttctccgctaaccaacaaactacttaaaggatctgccaccacgcccgcaggccaagattcccgggctgccgctatcctggccttcttcaacagttacagtaaatgcattcggttccggtcttctttttggtcacaaaaatatataccctagttggcgggagaatgtccaaaaaaaaactacaactatattggtaaaaagtaagacatttaatgcataaatgttgtgtgagccacgttatgctcaagtctgcaccacttataacaatgattgatagccacgaattgaactttgtatccgacatctcctcttcatctcttccccaagcctagagcatttgtaattcgcctgggaagttctggtttcttcctcaatttgtggcatgaagcataaaaagcggagccgagataaaactgcagcagcaacttggcggcgccatcggcattttctgcatcgccattgccatcggcatcgactttgggatctctggccgacgaggcatgcaattttcaagtaaaatcctcaaaaggtttttatccgctgctgcgatttggaactggctggcaaacatttttgcttgttagtcgtccattgcttggcctggtttatgggacaagatgcttagccacatagtcggttggttggccaaatctttaggcgcccataaattgatggagcagaacaaatgcgaccggggcgccgccggtggccgtgattagacaactcggaatgtcccattccgaccgcaaacgaatggccaaagtcagaggagcaaggcacgtaggcggaataggcgaaagttcatcaatgtcacgtgctgaagctggagcaccgtgctccccaacaatttgttagccaaccacaagtgcatgttgcaataagccgactaaggggcctggccattttttgttcagttttgcctccattttggcataaattaatccgcgtcggcatcgatgcgttggatttgtgtttcgcctggtggcagagattgctccacgctcgacaggattgggtatgggtgggtcgcttgctggcctgcctgggtggctggttgcctggttggttggctggttggctggttggctggttgggtgcatcttttagccagctttgcacaaataaattggccaggcgaaatttattgcatcagcgctgccaaatgccgttgcagagtccgcatttgttatataaactgatagagggcgttcgctttcaatcaatattattgtggtataaccatttttcatgtcttttgcccatcctttcacccacccacccaatctgcgccttgaacgttttagcttttggatccccctctcacagtttttcgtacttttcctggcttttgcagattgtgcctgcgcgaatactgcatcgaggtactgcgctccgcttacaacactctggtgaggcaggtgcgtcgggtgctggaacgcaacgccggatcgtcgagtcacgatgactcctatctattgtgggccatacgatttttcatggagttcaatcgtttgagtggtctacaattgcagttagtcaggtgagtggcattcaagtgctggcacttgcaatcgaactgggtacatttataaactatttaagtcacacaattttgaaatggcattttaatgaacttctttcagtataaaagattcctaagattctaaacttatattttaatatattatattaagtagacataagcatcgtcatccttggcatcactgacatatgatttccgtttggcaatgtcattgcgtaagagatttctggaaattgtgcgacttgccccagatattcaactggatgccgcctaacgtgttcaaattaattgcctccaaatttcaaaggatacacagacgagttttcacaagtgatatgatgatgatgctgatgaatgagctctgctttcagtggcttcatgaagcgctgacctcgtcctccggccaagtcagcagatatgcaaatctccggcgcacgagctacacttccaaaccgccttcatcaaggcttttaatcaaattacattgcaacactcttcagatgaaggaaatttccctaaacttttatttcgttggccactcccaatttgaacatttttcctcaaagaggacaacacactgctgctgaaatttataacgcagcaactgtgcagtaaaaactgggaagttcaacaagtgccttgccatttaaattaattgtaagctagtgtaaactattcattcacatgtaagaaagttaaaactgcatcgaactgcaattggcagtaggatcgagttcgagtttaactagactctactagattctctaaagtaaccacaactttaaattcaattttcttttatttgtttatagctcgcaagcgcttgcaataaacttaaaattgatttcgttgaaatgttttcgacagcaaataagctgcgaatacttgtttatctgtcgaaaggacaatccatcatctgagctgttgaagtgtgaaaagtagagaccgcttataaggggtattttcaatagtttccatttgttgttattctttctttttta

SEQ ID NO: 41669 - DNA, 1365 bp, DROSOPHILA
atgtctattctgctggcggacattgatgccacgtgtgcggccttgggatacagtgatggacagaaatatcaagcggagcctgatgccgccgagggtctcaaggtatcttactttttcattcatttaaatttccgcaaatctaaagttttactatccattaagcatctgatatggattctgcgtcgggacctggacaaccacgagtatcgccgtcatttgggccgctccaaggtgctccaaacggacttggtttacatgctgccggactatgtgcatcacgaggagctatccgatctactgatccgcctgctggtcatcctgaccaatccgacactgctgctctaccgggagggtgctcccaaggacaaccatggccggaaagtgttcatggagctaatcgacatcctgcagggctacaaagcagcctttgccaaggacaaagtctggagcgcccttttcgagaagctcaagcaggctttggaaatagacaaacgaaacccaaattattccggcgggaacagcggcgaggaagaggattcctggatgaacagctattacacctgcctggtgtgcatgcagactgctgaatcgccgagggcatttgcgattcgcagcgaagagcagaatcttctgattgagcgcatcctggtcctggtgcggaacgttctgcaagtgccagcgaatccggaggccgagtgccgggcggacaatgatgccagtctgcacgaccaggtcatttgggcgttgcatcaaactggaatgctggacttggtgctgtttgtcatctcctcgccggatgaggagcagttccatttgcacggactggagattgtttgcctgcttttcagggaacagagtgccgaatccctggcggacgcctccctgcagcgcagtctgagcgaaaagcagcgggaccagcaggagctcctggccgcacgacgacgggagcgtgcccgccgtcaggctcgtcctccaccagggcggcattcccgtttcggcggaacctatgtcattcggaacatgaagtccgtttcggatcgggatgtgatatgccaccaggctctggagcgcgtgtcatcgatcgattttgaccgcgagaagcagcagcagaagcgctcccaccgacacatccaggaggaggcgcaggtgacccgtcgcagtgcgttcaccgttagattgtgcctgcgcgaatactgcatcgaggtactgcgctccgcttacaacactctggtgaggcaggtgcgtcgggtgctggaacgcaacgccggatcgtcgagtcacgatgactcctatctattgtgggccatacgatttttcatggagttcaatcgtttgagtggtctacaattgcagttagtcaggtga

SEQ ID NO: 41670 - protein, 454 aa, DROSOPHILA
MSILLADIDATCAALGYSDGQKYQAEPDAAEGLKVSYFFIHLNFRKSKVLLSIKHLIWILRRDLDNHEYRRHLGRSKVLQTDLVYMLPDYVHHEELSDLLIRLLVILTNPTLLLYREGAPKDNHGRKVFMELIDILQGYKAAFAKDKVWSALFEKLKQALEIDKRNPNYSGGNSGEEEDSWMNSYYTCLVCMQTAESPRAFAIRSEEQNLLIERILVLVRNVLQVPANPEAECRADNDASLHDQVIWALHQTGMLDLVLFVISSPDEEQFHLHGLEIVCLLFREQSAESLADASLQRSLSEKQRDQQELLAARRRERARRQARPPPGRHSRFGGTYVIRNMKSVSDRDVICHQALERVSSIDFDREKQQQKRSHRHIQEEAQVTRRSAFTVRLCLREYCIEVLRSAYNTLVRQVRRVLERNAGSSSHDDSYLLWAIRFFMEFNRLSGLQLQLVR

SEQ ID NO: 41671 - DNA, 5936 bp, DROSOPHILA
ggtatttcaaaggtaatgttaagagtagtcgagctgaacggccataccaaaagacatatatctgctaaaccatttgagtgaattaaaagatatagtatatataattttttgctatgaggaaatatatgaaaatggcgaaacaagcaagacttctcttatgtatacatgtaagtttttgttagttgcttacctgtaattacttctcacgtaatgaaaacagtgtgtacttatttttctgattgttttgttccacatcctggaaaatcgcacccttaaaggaccccaaaaaacatacgaatgccccaggccatttaccgaaaacacaaatgatttgtttttcttaaattacaccatttttctgctggcaactatagcaatttccgaaaaagtaacttgcttattcatgcaggttttcgcgactctgaagacaaatgtgcgttggaatataaaatgcggttattattattttctgttctgaagcggcgattgttgggcaacatgctgctaatgtctggcgcaacaagaggctggccacttgttgctggttgcgaatgtaaacagagaagtgtgtttcacaaattctctcttttgtacaccttgaaaaatatttggtgaccgttcacagggcggatgagtaatactcgctctgctggccacaatttatgacgtttgccccttggcaatgtaagctgataagcattataaagtgtgaagtcaacttatctttggctacggagaaatctgtgcacacactgccactataatttatgggatacccatatcatggaaaaagaattcgctcacttaggcatttattttaaaatatgtatcctttattctttattgctcttcggttgcattcaatcagctttcgcatatatggtatgttgtacacaaaaaatacacagagatatatagttagaataatgtggatttaagtaactccatgttgcacaaacttcaaatgcataataaagcatcagctttagttgcatttaacagttcgtgttgcacgattttaatcggtttctttttagttttgaggcgacttgttcttacaataaactattccattcttcaatttgaaatacacagcgaaatgcaaacaactttcttaaagttaattactcaattgttaatctgtttgaaaatgtatgttaaacataggcaatggcattaagaaccaaacgactgactgtctgactgactggttggctgactgactgactgactggcctagtgacttgacttggttttgacttgactctcattgaggaggacttaggcgaaaaatgctcttcatctgcacacattccaattgcaaatagggtatcaaaaatacttatcatggctttacattacactttagttacaaaaatatttaaaatttaataccgttaacaaaaatacttgacgatcaattacacttttggaaaaattcgcttacacttttggaacaaaactaaactcatttacaaggcatgtttgagggaaaacaaaaagcgtatgatgtatgttgtaagttgtgtgtcgtgtgtgtttgttgtgtgctgttcggtgtgccaattaggcccagtcctttttgatctcaaaggtccagtcccactccaggtgtatgtgcttgtcgtcatccgtgaagaccgaactgaccgagtaggtgccgcgggagaatgtgcctgaaggtgcctcctcggcgggcgtcaaatagaactgaatctccttcttcggcggataggagccaaccatatgcttcatcttgtcaactatggagtaatgcgaaaacagtcagtttagtaaggatacacatttgcggatgggctgcaccagcttacccacaacttaaaaaattatacattccgaaattagggtttggcattggagataatggaatacaagttattctcaacacatgactaaagttagtatggcaattgtgaaaaaaaggatataggcagcactgcaaaatcccaccagtatggttgtgccattgaaccagcttttacccattgctagaaacaaaactcgactagcccgcacaaaagtcaatcaaaaactgaggtgtaatactaacgatttcgcgtcagcacggaaaattgaagacctagaagtgctcgcatagtgtaacgtatggaaaataactaaaaacaagtatcttttgacccggttttaatttaattttattcttacaatactagggcactaggtcagtaaataaataaatcaattaatagaaaattagggtaggacaaaaaagaaatataattgctttgccctaagtaaagacatataatgttgatagaattgagagtgtaaatctattctatattctgccaattaaaaatacaaatgtcatgtttaaatactcaccattaacacccaagcgagaagtcttttgaacatacttaaggccatggactatttcacgctgcacaataaaatcaatgcgcaccttgtactgaacaccttctttgatcacaaaaagctgtcgcaatagggttttgattaacaaaagtagtcgaatggatgatgatggttaatgatatttacctgctttttcagctgactaaggtcaccggtaagatccaattccatgtcgtcgcgtccttcgacaacgagggccagtttctttacaataacttttcggggatcattgggttctgggtaaaaatgttattgctttagtatattctgcaccctccactttcagaggccaagttaaccgccccttaccaacaataattttctcggtctgggcggcacccaggagcgcctccttgtagcgccgcaagctctcatcctcctgatcggcggccattatttcctcgatggtcttctccggcggcgcctggtagttggcatcgtggacatcgtcgtcgtggtgctcgggatggtgcttcgtctctgtttcggccatgattgctaacctagaactgtccaaaggcaattgtttgtttatcaatcaattacatttaaatattgcttcggattttgcttagtatgcgtcggtttctctgggtgaagcttgtgggtcataggcatatttttagtagtgtgagtaacattttgacgataatgatgttgttttatacacatatgtatatgcctccattttaatggcatgtgcgccaccatatctgctacatcgtatcggagtgtatgaaagtattcctcattcaaaaaatgtaggaagagtgttttttcttctgaaaattgtcgccctaaggagagttgagctcataacttaacaatgcagggaagaaattcgaaaaaaaaacctgccatctaaatatatagttgagtagttagtacatttgtttctacaaattacaatgttaaatattgaaattcaaataacaacgatcgcaaacatattccatatacttcgctactgattacgttatcattcgctggccataaagcgggtttatttacttttttggcaacacgagtgcctccgttgcgaacaaatgtagccacttcataagcccgttcaataatattgattaaatttcaattattaacgcattgatgaactgacgtgttctctgtctagggggcggggcagagaggggcgctcgacctgcagctggtccgctcgcaaagtaaaaaaaaaggttcaaccaaatacggagcggcagttagataaggcaggcgaactcgacggagggagagagagcggatatcggcattgaataatattgaccagaactgggaactggcgacaaaaagccaaacccaccgccccccggaaaatggctttattgttatcttgctttgttttccactatctaaatacacgtcgccagctctctgtccattttcaacgaatgttgttgggccaataataattctcgattctccagatttggctttatatatatgtacatacatatgcagtgtacccgggcaaaaaaaatacatgaaattgaattgttattacttgacatcgagttgttgttgaggtaataaaattgtgtctatacaaaacgattttgcaggcccatgtgtacatacagtagtaataatgatgtatttctcaattttatacaaaacatattttgaaattctcaaagctaataaatatttatctatctatctatctgttttttacttgtaaatgtaaatattattggtgcttaaaaatcaatagtttgaatcttagtatcggtttttagatctcatcgtaatatttccaaattaggcatatgaaaagcactcacaatttctctccgtgcttgtgtgggaatggcaaaaaataataaacaaaaaattttcggactaacaacgcaagtttgggccaataaatacaatcgcaacaattaaggatgggtgagaaaaggtaatttcaagaacaatctgaccgaactgaaaatttgaattccaaacaaatgtgccagcgtcgaaggaagtgcaagcgagagggcttgccagagagagagagagagagagagagagagaggaccccccgccaaagacaaagtgtggggataattcagggaaaagtacgaaccatgccacttttttttcttctctttttttgataaagaaatgtgcacgaagaatgttaaaaccccagacgaatgaatcacacacaccagctcacacacacacacactcacactgaggccggcacatgaatcgtcactgattttcaagtagaatttttgggagtggttcttggcctgcagtcacccaactacatacatttgctatcaatgccagcttgtattaaattaatataataatattataaatattttttttatgtaaaatgcattggaaggcaccgcactcacacacacacacagttgcaagttggcaacgacgcgcactcaccttttaatatgcgaaattaatcaaatagtacgatctctgaaaattaatcactgaaaagtaactgtatgttatatttttaacaacttttgataactaacttttaaacaaagcaaataatataaaataagaattacaagtgtgaacgtatgctttggtggacagaataccaaaacgcgagatggacttgaagaagtcatccgttcacactgctgtccaaaaatacttgcttttcgaaaaagtttttagttttgaaacagcttcccctaaatctattttatactttgtaagtatgggtttaaaaagaaattattaattagtttaacgaatcttgctgaaatgcaatttctaataagaatcgctgtttggtcattgtctgcaacagtctggcaacgccgacaaacagctgcttgttacttcatcggcgatttcggtgtgcaagttgaaaaacacaatttactccgttaatttacaatgacatcccagtacctgagccagctaataacggccgacaaattgtccgccgagccctggcccgaagacgccaccctctaccaggtaaggtcctggtttataggtccagaatcttcactaacattaacctttcattaatgtgcattaaaaaaaacagccgtatgaagcggaacagatcctactgccggaaaacgccagttgccttgctgtgaaggcttacctgaagatgtgcaacctcccctttttgattcggtcctgtgccaacgcggagcacatgtcgccgggcggcaggatgaccaagttgcccttcatccgcgcaggagcattcatctttgccgaattcgagccgatcgtgaactttgtggagcagaaggaactggccattggcagctggcaggacgaggacgagaaggccgacatgcgcacctatgtgtcgctggtggagaacatcttcaccatggctgagctgtacattagcttcaagaacgaacgcgtctacaaagaggtcacagcgcccaggaacggagtcgtttttccctggcccctcaatcacatgcagaactatggaaagcggcggaacgcgctgcgtctgttgaaggtctatcagtgggacgacctggacatcgata

SEQ ID NO: 41672 - DNA, 988 bp, DROSOPHILA
aagttagttatcaaaagttgttaaaaatataacatacagttacttttcagtgattaattttcagagatcgtactatttgattaatttcgcatattaaaagatggccgaaacagagacgaagcaccatcccgagcaccacgacgacgatgtccacgatgccaactaccaggcgccgccggagaagaccatcgaggaaataatggccgccgatcaggaggatgagagcttgcggcgctacaaggaggcgctcctgggtgccgcccagaccgagaaaattattgttgaacccaatgatccccgaaaagttattgtaaagaaactggccctcgttgtcgaaggacgcgacgacatggaattggatcttaccggtgaccttagtcagctgaaaaagcagctttttgtgatcaaagaaggtgttcagtacaaggtgcgcattgattttattgtgcagcgtgaaatagtccatggccttaagtatgttcaaaagacttctcgcttgggtgttaatgttgacaagatgaagcatatggttggctcctatccgccgaagaaggagattcagttctatttgacgcccgccgaggaggcaccttcaggcacattctcccgcggcacctactcggtcagttcggtcttcacggatgacgacaagcacatacacctggagtgggactggacctttgagatcaaaaaggactgggcctaaagtcctcctcaatgagagtcaagtcaaaaccaagtcaagtcactaggccagtcagtcagtcagtcagccaaccagtcagtcagacagtcagtcgtttggttcttaatgccattgcctatgtttaacatacattttcaaacagattaacaattgagtaattaactttaagaaagttgtttgcatttcgctgtgtatttcaaattgaagaatggaatagtttattgtaagaacaagtcgcctcaaaactaaaaagaaaccgattaaaatcgtgcaacacgaact

SEQ ID NO: 41673 - protein, 201 aa, DROSOPHILA
MAETETKHHPEHHDDDVHDANYQAPPEKTIEEIMAADQEDESLRRYKEALLGAAQTEKIIVEPNDPRKVIVKKLALVVEGRDDMELDLTGDLSQLKKQLFVIKEGVQYKVRIDFIVQREIVHGLKYVQKTSRLGVNVDKMKHMVGSYPPKKEIQFYLTPAEEAPSGTFSRGTYSVSSVFTDDDKHIHLEWDWTFEIKKDWA

SEQ ID NO: 41674 - DNA, 3549 bp, DROSOPHILA
acagagcaaagaaggccagacacgcagcaggcggccagatggaacgaaactaagtcaaacatttgtagaacacggcggagaatccagcgaaaaggggtctctggacatctaagatctcccgggggaaatgcggatggaaaagtggaaaatttatgggccccaaaaggcgaatagatgtcgtagatttcgcatgctacaacgaatagttaacagttgagaatggggatttggccaaaaacctaccatgtagatgcctggatatacgtaaaatatgggttggaggaattgatagttgcccacaacaagatagcaatttttttcttagataacaaacaaaaaaaaataccaaagccatttgtgaacttcccttgaactccgttattcgaccagaagtgccttttaattggttcaaatcgcaatttgcatagaccatttgccgaagttatcgcccggggaggtccgacattcgaaacgggtccaggtttccattcggggatcctggttaccaacggctggctacatgtggcaacattttagtgataagccgcagcaaaaatgctggccaagtcggtacacagctgtcgattctgcatttggccaagctccaatctcgaaaaccaagccccatcccctcgacgctgtcgcttttgtggcatttgtattggcaaatcaatgataatggcatttatttgagccaactccgctacgctcgtcgtgcggctcttacccaaatccgttaataagccattttgacaaattggatgattgccgcgcaatcattcgcctgccaggagcagatgggacatcccagccagctcccggcaattctgaaagtgtggcgaaagtgaagataaaatgtcaagcaaacaacttcgctgcaaatacggaaaatggcgtccaaatgggatctgactgcgaatggttcgcggaaatctggtggcaatggtaatgatgccatactactatggtaaatggtaccttaactattcaaaatcggtttataggaaatagtttaactgatttaatatctatttcatattttgcagctattattaatttggaattatttaaaaaaggtttacatattttcgatggaatatagtgtaaattcgttttgtataattgaatcacatcccagaggaacagcttacatcatatcccttttatagcaagtaatggtattttggcattcggcatcgtgcacttggtggaaaactgcaaaacagtaaatatattttatattaatataatcgaaaatattggaagcagaccattaccattcttggtgttgaagcagttccactgactcagctcacattggcctggaaaattgaccacacatttgccgttgctggcacaaatggacagtgatgctttgggacactgaaaattgcattttcccaatttcatttcctcacgatgctgggcaatcagttggggaatgtgggcgtgaacttggttgactatattggacactttatcgggaataaccagcgagcgaccagccttcgatgaacttggttggggtgttgtttcggatggttcaggatcctcctgatcttcttttacttccttttctttgtcatcaaccttgttgatttctttatccttctggagctgctccttttctctttgagcttcctgttctttcttttgtttaatggcctggttcactgctaatggaatgtgtttctcggcctgctgcatcaccttggtcacatgctgttgaagtttttgcagcttttcggccacattaatgggttcttgaccaggaagcgagagcaccacatgctccacgggcggcatcaccaccttattctgcaccaccggccttccgtggtggatcagagtaccggtggcctggtgatgggtcaccttcaccggtggattgccagcttgcaccgactgtatgccagattgcaacgcaggtgcagccgctgggacgtcggcaaggggaggggcaaggacatcaccagagtgtgccaatggtggaaggagatctggatggggcttgaccactggcgcaccgccctcactcccactcccactcccatgccaatccacaggtccactcaatgtgttcgaaacctgaggtttgttctttatgtgctggagtacatgattgatgtggctggttatcaggttctggatgtgaatggggagctccgtttgctgtggtttccccgttgtggctgtagttgcggcttccgtagtctgagtcaactcggcggcttgcgccagcgacaggatggctaggaaatatcaagggattatattataattttcttgctttgagacccatataagattcgaatatataaaaaacatatcgagagaagctttatagctaaatttctttatgttatgggtaaactagatacctctaatacatgcataagtttcttgttaactcaattgttattataaaaattttaatttttccctgtgttctatataaaaactgctcgttaatttcaacttacctaaaaccaaaatagtcttcatgttactccgttaatccgtacttgtgtttcttttcgacacccaaaggcgttctgtgactcttcctccaaatgtttccactttataaaggcttttggggctcccttaaacgtcaccagccttgcaaacgatttgtttaataatatttgttcatgttattatttggtttttatgtaaattctgagcacacgagatgctaacaggtttttggttgcgcttgaacggaccagtgagctgagactcgcacttcggaggagggtgtcgatgaggtggggaatgggggagacttgtcttccacctgggcacatctttcacatacggatttaaacgcttccttaataaaatcaaatatgaaattttgtttcagagggtccacaaattataattgtaattattaaaggtgtcagaatatgtaaaattaaaaaaaaataattgcatattgaatgttattttatcaatatcaattaaaaaaacatatctatacatatatatgtacatatgtatgtgtacgtctatatatttctatggtttcctgcgtttaatgaataatctattaattactgcactgattaaataaagaggtgcaaatataataaatttttgttttttacaaaaaaaaggatactgcattttattagttaatgcttgttgaagaaattagcgccatcacaaaagaaacgcggagttttccacaactaaagcgaaatggttgcaattcatagcatactttcaggcggcagataccacgaaatcaacattgaaatgccaacaataaatatgcaaatttggcatttcagagttttatttttagtcacgctgggcagtataattacaaagcagataagaataaaaatgacagacaaagctgctgatggcaccgatgatgatgcaatttaatatccctggcaggtgttaaaataagggattatgcagggaatcaggaaggacagaccgcaacatcggcagcagaaaccaaaagctgtcatcagcagaaatcggatgagtatataaaaacgtgtccagttggtgccaaaatcaacagtttta

SEQ ID NO: 41675 - DNA, 1256 bp, DROSOPHILA
tttgggtgtcgaaaagaaacacaagtacggattaacggagtaacatgaagactattttggttttagccatcctgtcgctggcgcaagccgccgagttgactcagactacggaagccgcaactacagccacaacggggaaaccacagcaaacggagctccccattcacatccagaacctgataaccagccacatcaatcatgtactccagcacataaagaacaaacctcaggtttcgaacacattgagtggacctgtggattggcatgggagtgggagtgggagtgagggcggtgcgccagtggtcaagccccatccagatctccttccaccattggcacactctggtgatgtccttgcccctccccttgccgacgtcccagcggctgcacctgcgttgcaatctggcatacagtcggtgcaagctggcaatccaccggtgaaggtgacccatcaccaggccaccggtactctgatccaccacggaaggccggtggtgcagaataaggtggtgatgccgcccgtggagcatgtggtgctctcgcttcctggtcaagaacccattaatgtggccgaaaagctgcaaaaacttcaacagcatgtgaccaaggtgatgcagcaggccgagaaacacattccattagcagtgaaccaggccattaaacaaaagaaagaacaggaagctcaaagagaaaaggagcagctccagaaggataaagaaatcaacaaggttgatgacaaagaaaaggaagtaaaagaagatcaggaggatcctgaaccatccgaaacaacaccccaaccaagttcatcgaaggctggtcgctcgctggttattcccgataaagtgtccaatatagtcaaccaagttcacgcccacattccccaactgattgcccagcatcgtgaggaaatgaaattgggaaaatgcaattttcagtgtcccaaagcatcactgtccatttgtgccagcaacggcaaatgtgtggtcaattttccaggccaatgtgagctgagtcagtggaactgcttcaacaccaagaatgttttccaccaagtgcacgatgccgaatgccaaaataccattacttgctataaaagggatatgatgtaagctgttcctctgggatgtgattcaattatacaaaacgaatttacactatattccatcgaaaatatgtaaaccttttttaaataattccaaattaataatagctgcaaaatatgaaatagatattaaatcagttaaactatttcctat

SEQ ID NO: 41676 - protein, 354 aa, DROSOPHILA
MKTILVLAILSLAQAAELTQTTEAATTATTGKPQQTELPIHIQNLITSHINHVLQHIKNKPQVSNTLSGPVDWHGSGSGSEGGAPVVKPHPDLLPPLAHSGDVLAPPLADVPAAAPALQSGIQSVQAGNPPVKVTHHQATGTLIHHGRPVVQNKVVMPPVEHVVLSLPGQEPINVAEKLQKLQQHVTKVMQQAEKHIPLAVNQAIKQKKEQEAQREKEQLQKDKEINKVDDKEKEVKEDQEDPEPSETTPQPSSSKAGRSLVIPDKVSNIVNQVHAHIPQLIAQHREEMKLGKCNFQCPKASLSICASNGKCVVNFPGQCELSQWNCFNTKNVFHQVHDAECQNTITCYKRDMM

SEQ ID NO: 41677 - DNA, 3046 bp, DROSOPHILA
ttcaaacagcaatagcctgagcattgaccagcacggcaaaagggtttatgcggatgtgaccgaggataattgcgactattcttgtcccgaaaaggatccttcggtctgtgccaccaatggacaatgcattctgaagtttgagagccgctgtgccatgtcagcctacaactgccgtaatccccagaaaatgtttaaacccgtggaagaccatcgttgcacgcaggactggcagcctctttgcatggagtcagatctcagggagttcggcttgtgagaaatgttcatcagttgaaaggttgagcagaaaaataaaatgaaaattacgaaaatttatatacaatatatgtagcaatatatattttttttcaatagcaattgctttatcctggcaacccattcatttcgaaggcaaatagtcagtttaagacgccactttatatcaacagaacatagagcagaaccaaggacgatttgaattacatagatagtacatagtacactaaaggaccgtcagtcagttttcccaaatataggcatctggcagtttgagagtttgtttaactcatacgccccaaattacaaaaaggaaataattaaaattaattaaaattaaaaaacaacttaaaattttcattaatcatatacacttgaacctttcgtaaacacgttttataaaaaagtaattaaatgatattagaaaaattacgttcttatacaggtgttaaaaaaatcagcgcttattaattacttcaagattcctttcttgttgaaacattattaatttttaatttgttaggctttattaaaaattgcaagaatacttctaccaaagtttaaaatcagtttctagatcaagcaaagtttacttgacttacaaattttagaagaaaaaattactcttttctatgttatgtatgcatttaattaaatgtttttttttatgtttttacacaaattatattgtattgatataacactatgactaagagtaatcgccattttatagcgccagttcctcctccttgcatcgcctcatgcaaactcccagtcggcacacatcctcatccactgcacggaacgacaaatcgcggtgtttgcagttgaaggtgttcattacgcactgatttgcaaactcatggatgcagattccattgtgggcacaaatgggcgagtactcgaacttggtgcatagctcatcgcagttttccatagatggtggtgtcatcatatccactggcgacgtagtggtcgtgccacccatcagaagatggaaacaatttctggtgggtactcgcttgggcattgatgtagatgcgggtgcgctggtggtacgactgctgggcattacaacaactggtttaagttcggaagcatcgggattgggtatgccaggattggggattccatggttggggatgccagggttagggattccatcattaggaatgccgcggtttggaattccatgattagggattccagggttgggaataccgtgattgggaatgccaggattcgggattccatcattaggaatgccacggtttggaattccatgattagggattccaggatttggaattccatgattaggaatgccaggatttgggattccatcattaggaattccacgattcggtattccatggttagggatgccaggatttgggattccatggttagggataccagaatccgaaactgatcttgtcacccgcaccttattatcagacttcacagtaggtggcaccactacctcctggacaacatggacctttcccggcttgatctcctgcacggtggcgatctcttcccgttcctggttggtcaggatcacgggctttccattggacagcaacggcacttggatagtaatccgaccgatttctgcatttggcacaacctgcgctgtggtgaagacgaaacacagcagcactggaaagtacaaaagtcaaactcaattctgtttcaatcgaaaatgatattcaattgcccacctgcggccaagtgatattgtggcttaaacatcctgtaactttaactccaatgtcttctctgtccttcactgctgcagaacccggcttatataacgcgttcaaatcgaaaagatcttatgcaatctttcctggaaagcaaacctgttcttcgcgtcacgcttccttaataaattaaacatttatgtgcattgtcttcaaacgagtttcgccaattagtatcgcttttattttagggccagtccaaaaaaaaaaggcgggcctgtgtttataaaatattcttctttttattttgatataagttcagcgacttgcatctagtaaattacatttaaaattccatatttcgcagcatgtcattaaaccttatggacttttttgttagagttatctaagccttagtacattttttaaaacatccgtttaaggcaataaaattttgattaacgattacacatcgattatcgagttttcttggatattattatagctaaattagggttgaccgcttgagttattcagttgctaagactattagggatcgctttcgttggagctatcatgtgtcatccctaaacgtttgcacattatgtccatttaatgttgttttatatgcagagtaagattagttttatctgtgctatacattgacatatgtgtgtggattaagatataacttctgaattgataaactcctcgtgataattgctctcatttagactcacatcaaactaaaactccgtctttgtatcctgggattgtccataccataaacgcaaattttttgatagatttttgtaactacattacaggcaaactagggaagatcttttcggagagtgcaaaatatggatagaaagatttaagaagtatgcatgtgatggaaagatttgaaaaatggagcacttgtcctagcaaaaaccttcttagctgccatgacgaaattggaaatatttcctgtcaagcatcaacagttcataaaatctctttatgctatacacattcacaattagattttctggcaattatcaataaattattgggttccattt

SEQ ID NO: 41678 - DNA, 984 bp, DROSOPHILA
tggagttaaagttacaggatgtttaagccacaatatcacttggccgcagtgctgctgtgtttcgtcttcaccacagcgcaggttgtgccaaatgcagaaatcggtcggattactatccaagtgccgttgctgtccaatggaaagcccgtgatcctgaccaaccaggaacgggaagagatcgccaccgtgcaggagatcaagccgggaaaggtccatgttgtccaggaggtagtggtgccacctactgtgaagtctgataataaggtgcgggtgacaagatcagtttcggattctggtatccctaaccatggaatcccaaatcctggcatccctaaccatggaataccgaatcgtggaattcctaatgatggaatcccaaatcctggcattcctaatcatggaattccaaatcctggaatccctaatcatggaattccaaaccgtggcattcctaatgatggaatcccgaatcctggcattcccaatcacggtattcccaaccctggaatccctaatcatggaattccaaaccgcggcattcctaatgatggaatccctaaccctggcatccccaaccatggaatccccaatcctggcatacccaatcccgatgcttccgaacttaaaccagttgttgtaatgcccagcagtcgtaccaccagcgcacccgcatctacatcaatgcccaagcgagtacccaccagaaattgtttccatcttctgatgggtggcacgaccactacgtcgccagtggatatgatgacaccaccatctatggaaaactgcgatgagctatgcaccaagttcgagtactcgcccatttgtgcccacaatggaatctgcatccatgagtttgcaaatcagtgcgtaatgaacaccttcaactgcaaacaccgcgatttgtcgttccgtgcagtggatgaggatgtgtgccgactgggagtttgcatgaggcgatgcaaggaggaggaactggcgctataa

SEQ ID NO: 41679 - protein, 321 aa, DROSOPHILA
MFKPQYHLAAVLLCFVFTTAQVVPNAEIGRITIQVPLLSNGKPVILTNQEREEIATVQEIKPGKVHVVQEVVVPPTVKSDNKVRVTRSVSDSGIPNHGIPNPGIPNHGIPNRGIPNDGIPNPGIPNHGIPNPGIPNHGIPNRGIPNDGIPNPGIPNHGIPNPGIPNHGIPNRGIPNDGIPNPGIPNHGIPNPGIPNPDASELKPVVVMPSSRTTSAPASTSMPKRVPTRNCFHLLMGGTTTTSPVDMMTPPSMENCDELCTKFEYSPICAHNGICIHEFANQCVMNTFNCKHRDLSFRAVDEDVCRLGVCMRRCKEEELAL

SEQ ID NO: 41680 - DNA, 1421 bp, DROSOPHILA
aaccacttgccaaatagcttcaaaaacgttttacaaaaagtttaacattgtgtaaacttacgtgacattgtgatagtttttagtgagctcaccaaatgtagccaatattttacgacaacatttcggtccaccatgatcccattaataatgaaaaatctaccccaaatcgctggcattattacacctcaaaagcagtacagtttttacagttcagctagtcgctttggggattgggtggccagccagacaagctcattaaaagtcacccattcgcattaaaaatgccatcaaagtgactttgccacaagccgcactcgatgtccttggcaaattaaaactcataaaccagcacaggacctcatggttctccatggtgcctcacgtgcagctcgttcctgccccagccgccatttcataggtactatataccaccaaaaaggagaaaaatcagcccagctggtccgtcaaagaagcttaattgccctgctccatggttcgcggtccatggtccattctacatgttccatggccatcatggataaagttttcacaaaggccaatccgcaaacaaatgcagcctgtgataaatttatgatgcaaaagttgccctgccagcgataaaattatgcataacctgagctcatttgtgaaagtgattttcaactgttgcgttttatattgccagcgaactgggtgaactgagcagtgggtggtgggtggtgggctacttacccgcatgactgcggaaactttctccgctgtggatggacagctttcgtccttcgatgaaggctccggaggagcgtcgtctgtcggcgaaggacatcagacaattcgattacaatcagctggacgacggctagcgagaggaagaggacgaaggcgcatatcaggtcgaaccggaagtgcgtatccggctgggcgcggtacatggcctcccggggcgtattgcggtaccacatggtgaacggcttcagctccgtgggcggcccgaagaaattaaaattgaaacatttacgctccggcggcagtaaatttgattcaatcatggcgatgctctgcgtacagaaaaggggcaaaaacgagaaggacacacaacataatagagttggcttacattagggtacagtaaatattgcctataaagtattaggtttatgtttatattgaaaattaattggaaacaaatattatacatataaaagaaacctttttataattacttaacctttcaatgcttatgaataatttatattgtaatatattaagtaattctatttaatcatgtatccactgttttcagtttataaaccatgcaatcagctttggccccatccaatttgctgatatttcctggccatttgaatttgatttcccatactccacccatccagaggccattttattagattttggcctca

SEQ ID NO: 41681 - DNA, 5201 bp, DROSOPHILA
tcgaaagcggttgagaagcgattttcaggcggtcgcgtttttcgcgcgtttccttgcatcggaaatagcaagtgtgcgcctgtgtgtgtgtgtgtgcgagtgtgtaaatgtgttaatgtgtattttttaaacaaaatgtgccattgggaaatgtctccgcatctatgcaatgcacaaatatatatagataaatagatttattggttcaaatgattaggaaacaaacaacaacagaggattatacgagcagcaattagagttggatttctccatttccgggaggaaggaaggaagtcggcaacaagtgttggatccccaggagcagaagtcgcaaggacttgcgtccagggtgaggcaatcaggacgcgcagctggcggctgtgaggagtgccactagctacacgccaccgcttttcgccatggtaaatcacaatgcggaaactgcgaaaacgggcaatggcacaaatgcaacagcgaatctgattgttaaggccgacggaaatgcaacgcagccgaaggcgatgacgtcatcggcggccaggatgaatgacgccctttcggcatctttggccgatttgagcgagcaggaaaatggaaccacgggtgaggctgaggacatccacctaaacgatttgtatacccgctaccgccagaggctccgcaagtcgcttttcagatcgggattgttaacttcgctgctggcatgtgttgtgtccataataattggcatcgtttacggccagcacctggtgcagaccatgctcttagtcctggctgccctaatctcgggatccattctcacggccctgcagttcccggcggtgctgagctccccggcagccgccttggccttcgccatcgtcaccaccttctcactgggcaccattgcggccatcaccggggacgaactggctcccctgcccatgtacgccctcttcctgtgcatccactccatgctgcccatttcgtggcccgtctccgtggtcctggctctattcatgaccgccattcacatcgtttaccgcatcggcacaagtcccgactacgcgcccaatttgccaatgctcttcggggagattgtgatgttggccagcgcctccgtttccggtctctactaccgcatcatgtcggacgcagcccacaaccggacggtggacggaaccaggacgggaatcgaacagcgcgtgaagctcgagtgcgagcgggagcagcaggagcaattgctcctcagcgttattcccgcctacatcgccgccgaggtgaaacgcagcatcatgctgaaaatggcagatgcctgtcagagagccggaggacaggcgtccacttcggccacccggttccatgagctccacgtccagcggcacacgaatgtcaccattctgttcgcggatattgtcaacttcacgcccctttcaagttccctgacggccagcgatttggtgaagaccctgaacgatctgtttggacgattcgatcaaatagctcaggagaaccaatgcctacggatcaagatcctgggggattgttattactgtgtgtccggcctgcccatttcccggccccaacatgcaaccaactgtgtcaacatgggcctgcagatgatcgatgccatcagacacgtgcgtgaggcgaccggcataaatgtcgacatgcgaattggcatccacactggcaacgtactctgcggcgtccttggcctacgcaagtggcaatttgatgtttggagcgacgacgttacattggccaaccacatggagagcggcggtgtcgctgggcgagtccacatcacgaagcaaactttggacttcctgggcgacaagttcgaggtggagcagggcgagggtggcaatcgagatgcgtatctggcggatcacaaggttgaatcgtatctcattgtgccaccgaaaccagcatacacctacagcgttccacgcgtggtggaatgcattgagcagaacgatcccagtcccaccaccgaggagaccaaggagatcaaggagacggatcaatcccatgaagccaccgatgtcgccgatgtccttcttccggtaactgtggctccaccgcctgcaatcgttgacgagaagatgtcacccacctcgatcaatagccaggaggcacctttgcatgcccctctcgcctcagccgcctccatgtccattaaggagctgtccgaggaggaggacgaggctgatgaggccactgccgtcaccgagccgctgatgcacagggatcaggatggcaagaatgacaaggagccgaaggcaaatggtggccatcgcggcagtggtgattccgccgcctccgagtcggtggccaagtccgctgccctttccctgcccgccgatgatctgctcagtatgagtgggtcagagagcggcatctccaacagcggagcccaggcgcaatcctcgaatccggcgagtgtcacacccaccgcagccgctccagccggaggagccgcctccaacagcttgacggtggccgaggccccggagagatctcgtcggaagttgtccgttcaaggtctgatgtccttcgccgacagacgacgctcctccggagccttcatcgaaggacgaaagctgtccatccacagcggagaaagtttccgcagtcatgcgggtaagtagcatcgccatgattgaatcaaatttactgccgccggagcgtaaatgtttcaattttaatttcttcgggccgcccacggagctgaagccgttcaccatgtggtaccgcaatacgccccgggaggccatgtaccgcgcccagccggatacgcacttccggttcgacctgatatgcgccttcgtcctcttcctctcgctagccgtcgtccagctgattgtaatcgaattgaacctggccctccttggatccctcctggccagcttcgtctcgctggccctcttcctctacctgagcaacatgtccgtgccggacgtgcacgcctccactacggagcgaaatggtcccggccaggtggtggccagcagtcgctacttacggctggccatgttcgttgtggtcaacattctcatttcatcttgcgcggtgtttagtgtgataaactacactgtgcctgacggggtaagcaaggagccatcatccaatcagaccatcctggagagcaatttttcgagtgtgttcgtaaactccaccctggaggatgtgcagctgtgggaaatcgattatgccatacccattgcgcccgtatttctgtattgctgtgccattagtttggctgcaatttccgccttcctgcgatccggatttattctcaagctgattgccatgctggtggctgtgatcgcacaggtgacagttcttgggtacagtgatctctttgagatgtacaacgatgccaacatcacacacggcttgccacttgagatcaagggcttccttttgcttctggtgatcatcttggtgcttcacactctggatcgccagggtgaatatgtggctcgcacagatttcctctggaaggccaagttgaaggtggagcaggaggaggtggaaaccatgcgtggcattaacaagattctgctggagaacatcctgccggcccacgtggccacccatttcctgcacctggaacgctccacggagctctaccacgagagctactcctgcgtggccgtcatgttcgcctccattcccaactacaaggagttctacgatgagacggatgtgaacaaacagggcttggagtgcctgcgtctgttgaacgaaatcatttgtgattttgataagcttctcttgaaaccaaagttcagtggaatcgaaaagataaagactatagctagcacatatatgtgtgcctcgggcttgagacccggcaaggaggacggcgctacggacgagaagcgcacggaggagcacaacgtggtcattttggtggagtttgcgattgctttgatgtccatactggactcgattaatcgcgagtccttccaacgattccgtctccgcatcggactcaatcacggtccggtgattgccggcgtgattggtgcccagaaacctcagtacgacatctggagcaacacggtcaacgtggcctcccgcatggactcatgtggcgtaatgggacgacttcagacgacggaaaacacggccaagatattgatgaccgccggctatgagtgcgagtgccgaggcctgacttatgtaaagggcaagggcaatctagtcacctactttgtaaagacacctttcgatgggaaattgtagatcaccgatcgtcacccagttgctgttgatactatttaatctatttaatggatatttatgaacatgtacacgtagcctaggccaaaagtcacttagaagcatcttcttatttattctttgcgattatcatttagttgtaatggattgcaatcgcaggcatttaaagtacgttgctcatcacgcgcacagttgagtattgttagcaacaatttgtttttagttagttggtagtgttaaattgttattgactatttcgtacgatttgttagctaatcttatgcgaagccatcacttaaacagcgaatatttatatttatatacgattcgaattaaattatgatagacaatgaaatgcaatttgaacagccccgccccaatccagaaacatatctattgtctactatatagtatctgctcgttttcattcttatctgagactcttaagatctatttccctctccactgcgaacagcaaacactaaaaaaaaatcagtatgtttaaactattcgatttgattaaacgacactagttaaattctgtagggagaatcaattaaagctctatatatttttttactcggatgttttttactactactaaactattcactacttcatcttttgatatatttatgtatataactatgtaagagaaagccaccaaagcgaactactctataagatacatctatgagtacctatcgcatcccaacaaaccactcgatacaatacctccgatgaaaactcacctgcttagatgcgatattatcaaccaaactctcaagattcaaaactgatttcgaagtatctgcgctggaggaatacaataaatgaacgggatgtttgttaacacactaaacacgctgcagtagattcattgaacaatatttgatattatcagaaaatttaattgattttgattaaatgataaataaaggaaatcaataaaatattattatgtattc

SEQ ID NO: 41682 - protein, 737 aa, DROSOPHILA
MVNHNAETAKTGNGTNATANLIVKADGNATQPKAMTSSAARMNDALSASLADLSEQENGTTGEAEDIHLNDLYTRYRQRLRKSLFRSGLLTSLLACVVSIIIGIVYGQHLVQTMLLVLAALISGSILTALQFPAVLSSPAAALAFAIVTTFSLGTIAAITGDELAPLPMYALFLCIHSMLPISWPVSVVLALFMTAIHIVYRIGTSPDYAPNLPMLFGEIVMLASASVSGLYYRIMSDAAHNRTVDGTRTGIEQRVKLECEREQQEQLLLSVIPAYIAAEVKRSIMLKMADACQRAGGQASTSATRFHELHVQRHTNVTILFADIVNFTPLSSSLTASDLVKTLNDLFGRFDQIAQENQCLRIKILGDCYYCVSGLPISRPQHATNCVNMGLQMIDAIRHVREATGINVDMRIGIHTGNVLCGVLGLRKWQFDVWSDDVTLANHMESGGVAGRVHITKQTLDFLGDKFEVEQGEGGNRDAYLADHKVESYLIVPPKPAYTYSVPRVVECIEQNDPSPTTEETKEIKETDQSHEATDVADVLLPVTVAPPPAIVDEKMSPTSINSQEAPLHAPLASAASMSIKELSEEEDEADEATAVTEPLMHRDQDGKNDKEPKANGGHRGSGDSAASESVAKSAALSLPADDLLSMSGSESGISNSGAQAQSSNPASVTPTAAAPAGGAASNSLTVAEAPERSRRKLSVQGLMSFADRRRSSGAFIEGRKLSIHSGESFRSHAGK

SEQ ID NO: 41683 - DNA, 3837 bp, DROSOPHILA
cattcgaccagcttctctgcccgaggataccgaagattggacgattttgaagcaagtgcagcagggtatcagggagttgagatcatacttgggcattggactggcaatggatctgctcaatcccttgatgaagcgaaacatgaaactctggcgacccaagatgacaagtttcttggcgggctacataggattgtttaaggttagttgttgcaaaagtacaaagtgtaactttctagctaaatatacaatattttttaggtggttcaattacttttattgaaaagattgaatgtaaatcaagccaatgctctggcttcctttataagcggttcgtcgtttgctcttctatcaaatcgtctcacattcatgtgttttgcaattgtaactgccatccaggtgatttggagccaggtgtgcaatactaaagatgaaaaggattcggttctatctgcagtgcgaaagattccctgggctagactgctgataccctgtagtctggcatacctggtgcacattttcttctaccaccaaaggcatctcaatgagatggcccggagtttcatagactgcacgtgtgataacaagttagtaagccttatgttaatatatataattattaattatttaattgcagtggccaacgattgttgaatctgataggtcttcccagtgtcaatgcgatactacaagctgtggataggacacctaaaacttcctttttgttttaattatattgatatataaaaatcataaacattttcagaatgaaattatatgtgaccgttaatcatgaaatcatttgccaaccatataacgttttaaacaatgcgcataaattatttttagccaatcagaaacgtgttttgaatatggcaaacttatcagctaatggcgatatccgtgactagtgatggagtagagaatggagatgtctccaaaataataatgtatacctttaaaagaatgagtttattaaatctttacaaaattggaatcaagattacgcatcattagccagccaaatgtccgatgtgcaatcaccgccaggataacgcatttcgtggggcaaactaggaccatagggttcattggcgaagtccaccaaaaagtcctcattgagggaaattcctccattcacagtgtccacatcaatcaggacaatatgaccgccctgcgaaaccatttttggatagaactaaagagattgggagttaattatatttaaaaaaatatatatatagagtgatcctggttaagatcttacctgcttatcccatggcgaatacagagatgaggagacatacaagcgcttgccatcgagggatagctgcagcatttggggacctccttccaagcgacgtcccttcacgtaacgagctggaggtctctcctgaaaatgaagaaaaggcctggttatagtacgagttatatagcaatatcgcatctgtgtaccttcagttctttatcctccttaacaatcacatttggcaaatcactgcatatcgcaccgccaaggaaaagctgaccagtcagcttcggattctcgggatcggtgatatcatattgtctcacatcgccatgtcgccaacagttgacatatagaaatcggtcgtccaaagagatgataatgtccgaaatcatgccacccatatcttcagctactccactgccggtatcgaccagtttgccgggtatgtctattaccttcttggcttcaaattcatcggaatctgatttcttcttaaagtggaacaccttggcattgagggcacatcccacgaatccctctgccttcttaggattgtgcagaaatcgaatctccaggggcgttatgccatccgatcccaggtcgatggtctggtagagagtctgcgtggaccatttgtagaagttgagacgacagccgtactgagacatatcctccaggtcaacattcttccagcctctgaaaaaaaggttgacaaatattatgataaactatgtatttagtggttatatcgagactaaccgtcgccatttattgggagctccccattccgaagaaaccatgacatcgaaatatggctgataccagaaatcgtatccgcacaatgccttcttatcgcccttggtccaagtaccgatgcaattgaagtccgaatcgaagaggataaagtcacccttggcatatccctctgcatcgcccatcacggatatcatgatgttcccattggccaaacagtgtgtggtatgcggagccgtcacattgtggctcttcaagacatcaccatcaatggtcttgacaatctcgggctttcgcggatccgtaaccacatcgagtatgtatataaagtcggaatttagggacggtaataccagcctatctctttttggcaccgtcttagagctctcgtcgacatagtaacaactggagcaggcgttccagccagaatgatgcagttcatcacccttgcgatttgtaaacgtacggtgcactatctgcaaaatgatgttaataatgatgtaaatatggaatctgtaatacaaatatccgaattggaaatatacatatattcgaaagtgattgctataaatccattgatataaaatccaattgagctaattattaagtacatagtattgtttgtcccgcaagataaatgatcgaatagtgtagatacctgatttatttacctgacagtaggtggggctctcgggatccacgtcgactgtggacagataatcgccgtgcggctcatccaagttgggctgaacggtgaccgtgtagaggagcttctcccggggaccactcctcatggcgtccaggggggttgcgtaacccggtcctcggcaacaggcttgggaataacaattcaattatcaaaattgctcgggattgtctttatcaaagattcagggcatgtgtttgcagtacaatgtgtacatatacgtctcttgtttttcttacttttattggacattgcttggcggttgttgtgggtcgaagaacagcggcaaactgaatatcaaacgatgttgagcgggagctttatatattggggctctctcggagatacttatctttatactctcttaaagcatttactaaagagaaccggttcggccggctttcttatcactaatacaggtaaggtcaggtcagtaatgtgtatagattaggtttagctcgttttcgtggacttattgaacatgaggaacatatgtataataataaaaaaccaaaacaaacaacgcccctagagataaggctatataatttatttacttaaattaagctcatttctattttagacattttctcttgtcttcgttatttatttttaattagtatattatatttaattatacgtattcaatacaagaaaataagtaaacaagtaaataacttgtaggggaatatctgaacaatctgtcatgtaataacaatgattgctttagaaatttaagtaaagtgtgggtaatagtggtattaaaggcacttattacaaaagctattttcaaacagtttcagtttaaccgcaatttgaaggcgtcccagagctgcaaagaaacgaaatcgatttttcttgccaaaagagagagttggggcaacacaacacatatcgatattcgtttttttctggcttatgcgatgactgtaaatgatcttctagacttttatggaaatcttaaatgtgtcatttgcttgtacaagaatcaaaacaagcttataaaatccacgcgctctctgcaacataatttatattgaacataaatggaataccttccaaaataaaaagtatattttcctgagccggacagtattagttcttaacagttgaacggtcacactacgtg

SEQ ID NO: 41684 - DNA, 1448 bp, DROSOPHILA
cctgttgccgaggaccgggttacgcaacccccctggacgccatgaggagtggtccccgggagaagctcctctacacggtcaccgttcagcccaacttggatgagccgcacggcgattatctgtccacagtcgacgtggatcccgagagccccacctactgtcagatagtgcaccgtacgtttacaaatcgcaagggtgatgaactgcatcattctggctggaacgcctgctccagttgttactatgtcgacgagagctctaagacggtgccaaaaagagataggctggtattaccgtccctaaattccgactttatatacatactcgatgtggttacggatccgcgaaagcccgagattgtcaagaccattgatggtgatgtcttgaagagccacaatgtgacggctccgcataccacacactgtttggccaatgggaacatcatgatatccgtgatgggcgatgcagagggatatgccaagggtgactttatcctcttcgattcggacttcaattgcatcggtacttggaccaagggcgataagaaggcattgtgcggatacgatttctggtatcagccatatttcgatgtcatggtttcttcggaatggggagctcccaataaatggcgacgaggctggaagaatgttgacctggaggatatgtctcagtacggctgtcgtctcaacttctacaaatggtccacgcagactctctaccagaccatcgacctgggatcggatggcataacgcccctggagattcgatttctgcacaatcctaagaaggcagagggattcgtgggatgtgccctcaatgccaaggtgttccactttaagaagaaatcagattccgatgaatttgaagccaagaaggtaatagacatacccggcaaactggtcgataccggcagtggagtagctgaagatatgggtggcatgatttcggacattatcatctctttggacgaccgatttctatatgtcaactgttggcgacatggcgatgtgagacaatatgatatcaccgatcccgagaatccgaagctgactggtcagcttttccttggcggtgcgatatgcagtgatttgccaaatgtgattgttaaggaggataaagaactgaaggagagacctccagctcgttacgtgaagggacgtcgcttggaaggaggtccccaaatgctgcagctatccctcgatggcaagcgcttgtatgtctcctcatctctgtattcgccatgggataagcagttctatccaaaaatggtttcgcagggcggtcatattgtcctgattgatgtggacactgtgaatggaggaatttccctcaatgaggactttttggtggacttcgccaatgaaccctatggtcctagtttgccccacgaaatgcgttatcctggcggtgattgcacatcggacatttggctggctaatgatgcgtaa

SEQ ID NO: 41685 - protein, 468 aa, DROSOPHILA
MRSGPREKLLYTVTVQPNLDEPHGDYLSTVDVDPESPTYCQIVHRTFTNRKGDELHHSGWNACSSCYYVDESSKTVPKRDRLVLPSLNSDFIYILDVVTDPRKPEIVKTIDGDVLKSHNVTAPHTTHCLANGNIMISVMGDAEGYAKGDFILFDSDFNCIGTWTKGDKKALCGYDFWYQPYFDVMVSSEWGAPNKWRRGWKNVDLEDMSQYGCRLNFYKWSTQTLYQTIDLGSDGITPLEIRFLHNPKKAEGFVGCALNAKVFHFKKKSDSDEFEAKKVIDIPGKLVDTGSGVAEDMGGMISDIIISLDDRFLYVNCWRHGDVRQYDITDPENPKLTGQLFLGGAICSDLPNVIVKEDKELKERPPARYVKGRRLEGGPQMLQLSLDGKRLYVSSSLYSPWDKQFYPKMVSQGGHIVLIDVDTVNGGISLNEDFLVDFANEPYGPSLPHEMRYPGGDCTSDIWLANDA

SEQ ID NO: 41686 - DNA, 3584 bp, DROSOPHILA
tcccgcacaaacagatggattcatgagcacggttccagcaagcgcagatacacgttcaactgtggctgcgccatgattgcgcctcggttcgccataacggcagcacactgtgccagcgtcggtgggtaagcaaaaaaaaataaataaaaatgaaaaacaaaaccaaagaaaacactcgaaatgctaatgggttaaaaatatcttgaattcgagcagggaatccccgtcagtggcgttgattggtggcgttgagctgaacagcggtcgcgggcaattgattgagatcaagcgaattagccagcatccgcacttcgatgcggagacccttaccaatgacctggcggtggtcaagttggccagaagatcacacatgccagtggcctgcctgtggaaccaggaatccctgcccgagagaccgctcactgccctgggctatggacaaaccaagttcggttagtgtccattttatccggatttagattttcattataacttaaatcattgattgataaaacagctggaccacactccagtaatctcctgcaaatcatgctttaccacctgaatttccaacaatgccagaggtacttgcacaactatgacaaactggccaatggcctgggatcgggtcaaatgtgcgcgggagactactccggcaatatggacacatgccaggtgagtcaaaagtttttgaaatattaaatgttttatttgactggtgatcttcgatttcatcagggcgattctggaggacccttgttgctccaccaacacatgcgccatcatcgccatacgataccctatgtggtgggtataacgtcctttggaggagcctgtgcatccggtcaacctggagtttatgtgcgaatagcgcactacattcaatggatagaacaacaagtatggccttgattcttttgagaaattaaatgtgttctatgcaatttcaactttttaaagataaattattacatttaaaacaattgttgaaaaaattaaaaattttaaaaagcatatttaataaataaaataaaatgaaactagtgctgcttgaaggcaatcttctcaatccaatccaggtagctatatagcctggtgtaaactcctggggcattgggagccgcacagaattttccaaacgaggtgatgcccaccacgaaggccacgcagttgtattccggcagcagggcatgaatgggaccgccggagtcaccctggcaggtgtccctgccgcctggcaaatatcccgcacagaactgcccctcgatgattcccctgggcagacgtcgctccttgcgatagatctgcttgcaggtcatttgtgggactacgtccaggtccacctggcgcagggcattcgatttggcgcccaggaactcggtgcgtccccaaccggcggccaccacagtgggtatctggagctccggcagttgccacaggcaagcaggacgcacctgctccgagaacttgacccttctggtcagcttgagcagggcaatatcgtggtaatatgccgaggatctgtacttcggatgcagcacgatgatgaggatcttgatgtcctgctgggtcgcgctggtctcgttcaactggcgggcgcccaagcgaaccatgtccggtggtttgctgatggagcaagaaatacagttatagttgtgtcttcgaggattctgtcactcacctaccagaggtggcacagtgggcagcggtcaggacatacagttcgctaaccagggcgcctccacagccccattttatatcttgatccttggagccactaccctgcgtccatcctaaggcagccatgtgagggaagagtccgtgtcgagtgggggttccaccgactatcaggggaacactgggcacacactgcttcccggagaatgtgcgtccggtgtccgtcaagtgaagccttctggcggcagcattgtactcctgacattctggaaaggattatctttaggatgtaaactattccgatccttcgaagtctacctactggtggcacttatgcgctgagccagcacatgcttgtccgccaatggacaacagatgacagggacattgttgcgatgggtgcagatgtcgatgcgggtgccatgcacccgatactctcgaatgacgtggaggcactgataggccaggatgcagtatccactccggccatcgaagctccgccggcagaaggcaccttcgtgaagtccttccgaaaccgaagtcctaacctccgcatcgtcgccgaacttcagatagctttcctcatcttcggtgtcctgatcatccacgtcctcgccaatggtcgccactggctgctctttccaaacttcggggattgtgtacttggtggtctggtagttgattatttcaagggcatcgagagctgtgggtttaattaatataatattagaggcaccattaatatatacgattgatttactacttaccctcaagatttggagtctgcaggattaaatgcaagcatgtcaattgaagatgcacgattagagaccaaagtattatcattctatttgtgagttctgtgatttcattatttactttctttcaaacatttcatataagaagctggcataaataatgaaaatagatactttagggctttgtatatattttccagattaaactataaattaaccaatataccccagaggaattcagtttttcagaagacaatggccaaagaatttcgattagcttcaatatttgagccaccactgtgcccaaaacaaacccttgcctggcttggttgattttttgtttaatgtatttttattaattaatgcgggcgctcaattataaattcggatgaatttcaataaaaccgtttgccagcgacgctgcgtttcaattccgcgtagtgtggattggaagatcccagtcggattaaatcggtcaatcgagcaagacctctacagatggcggattggaagagacctttggagacctgcatcgcactctgtgtgctcctgtgcgtatttcacgtgaacggacagtgggagtttcccgcccagtatccggaaccgtatcgaaatccgaatccgaatccagtgccggatccaaccaggtgggacttcaacaactacaatagctacggttacaacggtcaatgggcgccgggctactttaataactacggctattatagaccgccgccgccaccaccttctccgccatgtggaagaccaccgcctggatctccgccaccgggcccgcctccacctggtcctccacctggttgccccggaggtccaggaggtccgctgcagcatcggcaatgggacaatggccccaggcagtggcaaccacgtcgtccgccaccaaatcaccatcgcaacttccacaacatcttcctgaacaccgaaagcaaagtggacggggagaactacaacaagaccgcggagacggaggacttgcacgacgacttcaatggccgatccattgtggcacctggacagtacccgcacatggtaagtaatgaataaataaaggtgcagtccaaaaaaaaaacaaaaatcgtagatcaacgaaggccaataaataaataaataaaatcgcacgaaaccgga

SEQ ID NO: 41687 - DNA, 1409 bp, DROSOPHILA
gcttcttatatgaaatgtttgaaagaaagtaaataatgaaatcacagaactcacaaatagaatgataatactttggtctctaatcgtgcatcttcaattgacatgcttgcatttaatcctgcagactccaaatcttgaggctctcgatgcccttgaaataatcaactaccagaccaccaagtacacaatccccgaagtttggaaagagcagccagtggcgaccattggcgaggacgtggatgatcaggacaccgaagatgaggaaagctatctgaagttcggcgacgatgcggaggttaggacttcggtttcggaaggacttcacgaaggtgccttctgccggcggagcttcgatggccggagtggatactgcatcctggcctatcagtgcctccacgtcattcgagagtatcgggtgcatggcacccgcatcgacatctgcacccatcgcaacaatgtccctgtcatctgttgtccattggcggacaagcatgtgctggctcagcgcataagtgccaccaaatgtcaggagtacaatgctgccgccagaaggcttcacttgacggacaccggacgcacattctccgggaagcagtgtgtgcccagtgttcccctgatagtcggtggaacccccactcgacacggactcttccctcacatggctgccttaggatggacgcagggtagtggctccaaggatcaagatataaaatggggctgtggaggcgccctggttagcgaactgtatgtcctgaccgctgcccactgtgccacctctggtagcaaaccaccggacatggttcgcttgggcgcccgccagttgaacgagaccagcgcgacccagcaggacatcaagatcctcatcatcgtgctgcatccgaagtacagatcctcggcatattaccacgatattgccctgctcaagctgaccagaagggtcaagttctcggagcaggtgcgtcctgcttgcctgtggcaactgccggagctccagatacccactgtggtggccgccggttggggacgcaccgagttcctgggcgccaaatcgaatgccctgcgccaggtggacctggacgtagtcccacaaatgacctgcaagcagatctatcgcaaggagcgacgtctgcccaggggaatcatcgaggggcagttctgtgcgggatatttgccaggcggcagggacacctgccagggtgactccggcggtcccattcatgccctgctgccggaatacaactgcgtggccttcgtggtgggcatcacctcgtttggaaaattctgtgcggctcccaatgccccaggagtttacaccaggctatatagctacctggattggattgagaagattgccttcaagcagcactagtttcattttattttatttattaaatatgctttttaaaatt

SEQ ID NO: 41688 - protein, 435 aa, DROSOPHILA
MIILWSLIVHLQLTCLHLILQTPNLEALDALEIINYQTTKYTIPEVWKEQPVATIGEDVDDQDTEDEESYLKFGDDAEVRTSVSEGLHEGAFCRRSFDGRSGYCILAYQCLHVIREYRVHGTRIDICTHRNNVPVICCPLADKHVLAQRISATKCQEYNAAARRLHLTDTGRTFSGKQCVPSVPLIVGGTPTRHGLFPHMAALGWTQGSGSKDQDIKWGCGGALVSELYVLTAAHCATSGSKPPDMVRLGARQLNETSATQQDIKILIIVLHPKYRSSAYYHDIALLKLTRRVKFSEQVRPACLWQLPELQIPTVVAAGWGRTEFLGAKSNALRQVDLDVVPQMTCKQIYRKERRLPRGIIEGQFCAGYLPGGRDTCQGDSGGPIHALLPEYNCVAFVVGITSFGKFCAAPNAPGVYTRLYSYLDWIEKIAFKQH

SEQ ID NO: 41689 - DNA, 5332 bp, DROSOPHILA
aacacacacactttgtcgactggaatacatatagtacatttatttgagtcagttgcaaacaaaggatcgttcgcttcgggtggtaagttagttctattctaaatgctacataacaccacgtacggattagcaaacctacgcatgcgtcatgatacatttacagactgattttgggtttttagttcgcttgctactcgcacttttaaaacatgtttacgtttacaacgctcagatatagtatatatagtatagtatagttagtaaagtacttgtaggtttggtatgtttcgcttttcgttttgtaaaattcctctttttttctagctttagttatacacttataacacaattctgcagagtactagctaacgacttggaatttcgctgcggaatgaacaacatctatgagtaaaactggaagatgaagtaatgcaaatgctgaggcgggttctatatgtagtagttattggaatttacattgcattcggcattttcgagctcaacacaagccaggcctgctaggaaaccttgtacatacaacatggtacgatgcgatgccttaactatgcaaaatttggtatcatatacatgtggttctttttagtcaacaatctatcttgtggacaataacaatgtgttaggttctctacgactctactacttgtttgtttttaatttgggataaatgggaatgataaaatccaacagagggaacaggatcccatcttaaaaaccgattgatttctttgaaattggtgttgggtgtttaaaaactaagattatgtgttgtggtctttcctgtttggtttgtatgtatatacatccatggatatatttcgtatataaacgagtctatcaaaacatcattgaaaaataaaactaattcgcttcagcagcgcactccaaaatggtaaatcagcgcagggattcgttagtcactaataacaaaatcattaacatagcagacacagtgtacacagtcgcctcatacttggtccatctaaaataagcgggtcaggcggggccggaagaaacgaaaggcaccgtagcatccgaggccaattaggccgtacttcagggtgtacttgcagacgcgttgtcccaggctggccggcggtatttcgagaatggccggaatcttcttcggatcgacggtgccccacatcttggcaattccgttggcgtgtccgatgcccaccactccgaccacacgtaccggacggacctgttggccacctggagccgcctgaggcagcgcagccagttgcagagagtggcataggaaaacgtcgcgctcgcgcacaaacacatccgaaaaggcaggaaactcgccggccatctcctgcatcagcttctctaacagatcgctctgcttgcactcctctacctcctcaatgctgatgctgtccgtgaaggtaagacgccacaccagtttcatggtctgccacatggacaaagcgcgcagagcgcggtaaagtgtgatgcggattgggcgatcgcctagatgtaagatgcaaccgggcagcttgtgaatctcctcgaaggcacggcgaaattcgccaccgggcgccatgcccaggtccttggcgatctgagcgctcatctgcagcagtaggatgaaaaagatgccattgatgtagccgtgcgtgtgcaggattcctcgaatctagcgggattataaacacattcagttactttgataaatttgtggtcctccaatgcttaccttgggaatattgatgcttttggcttcctccagcagggtcttttcatcgagcttaaggatgtgtatgcgcgatggacacaactccaccattaccacatctggacggacattgcgaatgacctgaggagattgcatacaaaattaaacctagttatctattattgagtatcgaactcacataagagacgtcatcctgcgactcctcgctgaagtgggccgtgcccacaagatataccttgctgccgaagggcgtgttcaacagcgtcaccgtcgacggcagattctgttcgaactcctcaatggtatcgtaaattgtgatttcgcgcttggtctgcggctgatctatgaccgacaccagatcccgcttctcgccatcaccatcggcggctgccgaagcttcagcgatggaaatgtccaatttttgtttgctcgtgtgcagtagggattccttgcggcgtcttttgtcagcgtttgccgaagcctccttgctgggcgacttcttcaaaagattcttcacactgtcgccctcgaccagcaccaccttctcgaggtcctcctccttaatcgagttatcgttaatttctataattgacaggttgggattatccgtcttgaatattgtcttgttggccagttgtgacttggggtccacctcctcctgcgaggtattagtgtccgtgctctccgactgaatcagcagcatgctggcatttagcgctggcgtggcattgttgaaagctgccggggatccgaggggcttgaatgcagcggattcattgccaaattccgcactagctgtcttgttggccgagttcgaggggccaagaggattctggctgagttcgctgataaggctctctgtggattgtaataaaattaaaagaatgagttaatcaaggtttacatcaagtttaataaaaatcaacataaaatatatatgaattgtataaattgcattataaattttgtgtgaattgtgcatttttgtgaattgtatcattcaaaacataacgtaaatataatttatttttttaagatttcctgttcatatagagcttccagcttctttatataatcttcgttgcaactttcatcttggcagtcggttaaaaggaactgcttcagcagatcgaaacacttttgcttcatggctaacgcgtttcgctgttggctttctttttgcctgtccaactggtcctcatacttttgaataagcctctgcttaagcttcttaatcttctcactgatagtgtcttttaggaaaggcttctggctttcgtaggcatgtctgcacattttctgcactatttgcttcagttcgtagtccatattcttaaaatgatcattaagtttctcatcgtccgcaaatggcgcaaatatttgcgatattaaatgatcgggaaacgtatcgggcgtttgggattgcagactctctcgggctgctaccattattgttttctttatgctctgactgaagctcagcttttggctgctctgcaatttaagattctcgatcgtttgcttctgatgtcttgtttgaatttgcagaacaacgagcttcagtttgagctcattaaccttgcgatccaattggtcgtgctcatctatgaggttcttttgctcgtaaatagctctcgaaggaaactcatcttcttccgattctcctatatactccggatttgtgaaggaagcgctttgattacccatttcggttaacttgtggtccatatccgtgtcctgcccgtatgtagagaggtctacttctttttccgaccgctgaaacttttctgctttcgaggagaacgggtgattctcctggaagacgtggccctccgttcgcggatctctgctactcaggatcttgagggctttgtataggtttggatgcttaccattgcacgacttgtaggccgtggtggacagctggtgatccagggcgctgtcgtagaaagtgttgtcgcccacatagatgctgtttctcttgtccggcgaggattcaaacgacgtggaggcggatacgtccatggtcgtgttcagttgggtcagttggaggcctggaagaatcggttgctagtggaaattcggtttcggttgctggcgaggcgacgtttaaacatctggcgaagaactgtggagtacccagagttgaagagcgattatcagagacatgtatatagataatacgtttgccttactctctgcaaactgcaaatttgttttacttttctgcctacgtgtcgtacattgccagttgattatgttcagtcgggttttctcgactgactttaaagtctgcgccacacacgcacacacatttgtgctccacatatttgccttagaatttgtgtaattcacctgggcattctgtgttttcttaatttactcacctgaaaatttgtgtttagtgtgggtgttgttgcactgctggatgtttggggcacattggcagaggccttaattgacgactgtctgctgattgaaaactcaatttgattggcgctgattacgtttttgattcaatgcgtgctcttaatttaaataaaaacccaaaaaactaaagaaattaaattgtgattaaattcttcttgctagcgtcgaccagtgttgcctaatgcttaaaatgcaattataagagcgactctagtgcaagaaacgagtaatcgattctggttcgataggcaacgacttcgataaggcgcaaattaaactagttgtaaaggttttacgctatatgttgtatgcaagaaaatcaacataatttagctataaatataggctacacttatttttaattataagtccaaatttcttagtgcataggagtggaataactaattttatatcagtttttggaatgcccctaacatgtccgtggtattattatttagtaacgtcagggtcacacttttgttttgttttgctttgcaacttgacttttaaaattgcaattgcagcatggccgaagaacccgaggaacccgccaaggtatggattacataaatctattggacatcaggtgcctgattaagctttaactatgtttaatctcccatagagcttcgttatcttcggacgcgatgtggcgcagatcccgtgctttcgtaacagttttctctacggaatcagcggaggaatcggcatcggcttgctgacttttctgggcacctcgcgaacccacctgtccacccacgtgggcttcggctccttcttctgcggcaccatcgcctactggatgacctgcaggtaagtgactgtgattaaaaccgtgcggcgcccttatcacttaattatcaatgtggcatccgcaggtatcaatggtccgtcaggagattcgagcagcagcaattgcgtgaggcgatgagacgacaagccctttatgagggcacccaaagggagagagacttagatctgaagtcggcgtagcataagtcagatccttcattactacttcgatgtttgttttcactctaggataccaagtaatcctggcattgttaaatcccttgtgttgtaaactaccttttgttaccaaactttatagtagccaatatattatatatatgttgtaagtgaaatcttagcttgccactcgtagggaattaatta

SEQ ID NO: 41690 - DNA, 1921 bp, DROSOPHILA
aacactggtcgacgctagcaagaagaatttaatcacaatttaatttctttagttttttgggtttttatttaaattaagagcacgcattgaatcaaaaacgtaatcagcgccaatcaaattgagttttcaatcagcagacagtcgtcaattaaggcctctgccaatgtgccccaaacatccagcagtgcaacaacacccacactaaacacaaattttcagttcttcgccagatgtttaaacgtcgcctcgccagcaaccgaaaccgaatttccactagcaaccgattcttccaggcctccaactgacccaactgaacacgaccatggacgtatccgcctccacgtcgtttgaatcctcgccggacaagagaaacagcatctatgtgggcgacaacactttctacgacagcgccctggatcaccagctgtccaccacggcctacaagtcgtgcaatgagagccttatcagcgaactcagccagaatcctcttggcccctcgaactcggccaacaagacagctagtgcggaatttggcaatgaatccgctgcattcaagcccctcggatccccggcagctttcaacaatgccacgccagcgctaaatgccagcatgctgctgattcagtcggagagcacggacactaatacctcgcaggaggaggtggaccccaagtcacaactggccaacaagacaatattcaagacggataatcccaacctgtcaattatagaaattaacgataactcgattaaggaggaggacctcgagaaggtggtgctggtcgagggcgacagtgtgaagaatcttttgaagaagtcgcccagcaaggaggcttcggcaaacgctgacaaaagacgccgcaaggaatccctactgcacacgagcaaacaaaaattggacatttccatcgctgaagcttcggcagccgccgatggtgatggcgagaagcgggatctggtgtcggtcatagatcagccgcagaccaagcgcgaaatcacaatttacgataccattgaggagttcgaacagaatctgccgtcgacggtgacgctgttgaacacgcccttcggcagcaaggtatatcttgtgggcacggcccacttcagcgaggagtcgcaggatgacgtctcttatgtcattcgcaatgtccgtccagatgtggtaatggtggagttgtgtccatcgcgcatacacatccttaagctcgatgaaaagaccctgctggaggaagccaaaagcatcaatattcccaagattcgaggaatcctgcacacgcacggctacatcaatggcatctttttcatcctactgctgcagatgagcgctcagatcgccaaggacctgggcatggcgcccggtggcgaatttcgccgtgccttcgaggagattcacaagctgcccggttgcatcttacatctaggcgatcgcccaatccgcatcacactttaccgcgctctgcgcgctttgtccatgtggcagaccatgaaactggtgtggcgtcttaccttcacggacagcatcagcattgaggaggtagaggagtgcaagcagagcgatctgttagagaagctgatgcaggagatggccggcgagtttcctgccttttcggatgtgtttgtgcgcgagcgcgacgttttcctatgccactctctgcaactggctgcgctgcctcaggcggctccaggtggccaacaggtccgtccggtacgtgtggtcggagtggtgggcatcggacacgccaacggaattgccaagatgtggggcaccgtcgatccgaagaagattccggccattctcgaaataccgccggccagcctgggacaacgcgtctgcaagtacaccctgaagtacggcctaattggcctcggatgctacggtgcctttcgtttcttccggccccgcctgacccgcttattttag

SEQ ID NO: 41691 - protein, 532 aa, DROSOPHILA
MDVSASTSFESSPDKRNSIYVGDNTFYDSALDHQLSTTAYKSCNESLISELSQNPLGPSNSANKTASAEFGNESAAFKPLGSPAAFNNATPALNASMLLIQSESTDTNTSQEEVDPKSQLANKTIFKTDNPNLSIIEINDNSIKEEDLEKVVLVEGDSVKNLLKKSPSKEASANADKRRRKESLLHTSKQKLDISIAEASAAADGDGEKRDLVSVIDQPQTKREITIYDTIEEFEQNLPSTVTLLNTPFGSKVYLVGTAHFSEESQDDVSYVIRNVRPDVVMVELCPSRIHILKLDEKTLLEEAKSINIPKIRGILHTHGYINGIFFILLLQMSAQIAKDLGMAPGGEFRRAFEEIHKLPGCILHLGDRPIRITLYRALRALSMWQTMKLVWRLTFTDSISIEEVEECKQSDLLEKLMQEMAGEFPAFSDVFVRERDVFLCHSLQLAALPQAAPGGQQVRPVRVVGVVGIGHANGIAKMWGTVDPKKIPAILEIPPASLGQRVCKYTLKYGLIGLGCYGAFRFFRPRLTRLF

SEQ ID NO: 41692 - DNA, 2932 bp, DROSOPHILA
ataaacaaaaaattttcggactaacaacgcaagtttgggccaataaatacaatcgcaacaattaaggatgggtgagaaaaggtaatttcaagaacaatctgaccgaactgaaaatttgaattccaaacaaatgtgccagcgtcgaaggaagtgcaagcgagagggcttgccagagagagagagagagagagagagagagaggaccccccgccaaagacaaagtgtggggataattcagggaaaagtacgaaccatgccacttttttttcttctctttttttgataaagaaatgtgcacgaagaatgttaaaaccccagacgaatgaatcacacacaccagctcacacacacacacactcacactgaggccggcacatgaatcgtcactgattttcaagtagaatttttgggagtggttcttggcctgcagtcacccaactacatacatttgctatcaatgccagcttgtattaaattaatataataatattataaatattttttttatgtaaaatgcattggaaggcaccgcactcacacacacacacagttgcaagttggcaacgacgcgcactcaccttttaatatgcgaaattaatcaaatagtacgatctctgaaaattaatcactgaaaagtaactgtatgttatatttttaacaacttttgataactaacttttaaacaaagcaaataatataaaataagaattacaagtgtgaacgtatgctttggtggacagaataccaaaacgcgagatggacttgaagaagtcatccgttcacactgctgtccaaaaatacttgcttttcgaaaaagtttttagttttgaaacagcttcccctaaatctattttatactttgtaagtatgggtttaaaaagaaattattaattagtttaacgaatcttgctgaaatgcaatttctaataagaatcgctgtttggtcattgtctgcaacagtctggcaacgccgacaaacagctgcttgttacttcatcggcgatttcggtgtgcaagttgaaaaacacaatttactccgttaatttacaatgacatcccagtacctgagccagctaataacggccgacaaattgtccgccgagccctggcccgaagacgccaccctctaccaggtaaggtcctggtttataggtccagaatcttcactaacattaacctttcattaatgtgcattaaaaaaaacagccgtatgaagcggaacagatcctactgccggaaaacgccagttgccttgctgtgaaggcttacctgaagatgtgcaacctcccctttttgattcggtcctgtgccaacgcggagcacatgtcgccgggcggcaggatgaccaagttgcccttcatccgcgcaggagcattcatctttgccgaattcgagccgatcgtgaactttgtggagcagaaggaactggccattggcagctggcaggacgaggacgagaaggccgacatgcgcacctatgtgtcgctggtggagaacatcttcaccatggctgagctgtacattagcttcaagaacgaacgcgtctacaaagaggtcacagcgcccaggaacggagtcgtttttccctggcccctcaatcacatgcagaactatggaaagcggcggaacgcgctgcgtctgttgaaggtctatcagtgggacgacctggacatcgatagcgtcattgacaaggtggccaagtgctgtgagacgctcgaatacaagctgaaagagtcgccggaaacgccattcttctacggcgatcagccctgcgaactggacgccatcgccttcggccacctcttcagcattctgaccaccacgctgccgaacatggcgctggcccaaacggtgcagaagttccagcacttggtcgagttctgtcgcttcgtcgatgagaagtactttcagacgaggtgcctaccaaattagttatacgtagtcgttgccttaaatgcttatcaattaagttgctcttgtcctttctttttaaccgcttatatatgcaattctaaatgcccttaaaacaaatcgtcgccgtaagtcacaattattttgctactagcatttaaaaaaaaaagttgttctagtgattttgctgccattaatgtccaaaaatccatgtgaatatcatttgcacaagtgactcaatctgcaagtttgtttaaatggaattctaaaatacttctaacgatctttacttcatttattttgcagcaaataacttttctgctaataaaattgtgtaagtatttgctataatacatcaaataaattgttttcttagcaaaccaaaaaaaaaaatagtcttgatttttgaacattgctgccttttccttttcatacttttgaagaaattgaactctcgtttatgtaaagaccttaaatacacatatagttttattgatttattgttataattaatttagattattattatgaatgcaatgtacacatctttgcatgcagatggccgaaccaatcgcgccacttgtgatatttgctaacgcaatcatacaaaacaatcagatgattctcgaaaataaaagcttaacaatttgtccaggtttagcagttggtccattagcagttggcccagtagaagtcttagtttccagcctgattcactgccggtccggatagttcgtcgttgcctgccgccggagcagcgccagcttgcggtggtactggtggtgcaaacacatgggccatctgcggcggcaacggcgttggctgcgtgggaaacagtccgcccatggagggttgcacctgcggatacgacggcactgtctgtgcaccggctggataggagagcgcagccggggccgacatgtaggcctgctgtggtgcagagaacatgggcacagccgctggcgctgccgtggcctgtggaaatggtagctgggcagcgggtatgccacctagagcgtta

SEQ ID NO: 41693 - DNA, 859 bp, DROSOPHILA
cgatttcggtgtgcaagttgaaaaacacaatttactccgttaatttacaatgacatcccagtacctgagccagctaataacggccgacaaattgtccgccgagccctggcccgaagacgccaccctctaccagccgtatgaagcggaacagatcctactgccggaaaacgccagttgccttgctgtgaaggcttacctgaagatgtgcaacctcccctttttgattcggtcctgtgccaacgcggagcacatgtcgccgggcggcaggatgaccaagttgcccttcatccgcgcaggagcattcatctttgccgaattcgagccgatcgtgaactttgtggagcagaaggaactggccattggcagctggcaggacgaggacgagaaggccgacatgcgcacctatgtgtcgctggtggagaacatcttcaccatggctgagctgtacattagcttcaagaacgaacgcgtctacaaagaggtcacagcgcccaggaacggagtcgtttttccctggcccctcaatcacatgcagaactatggaaagcggcggaacgcgctgcgtctgttgaaggtctatcagtgggacgacctggacatcgatagcgtcattgacaaggtggccaagtgctgtgagacgctcgaatacaagctgaaagagtcgccggaaacgccattcttctacggcgatcagccctgcgaactggacgccatcgccttcggccacctcttcagcattctgaccaccacgctgccgaacatggcgctggcccaaacggtgcagaagttccagcacttggtcgagttctgtcgcttcgtcgatgagaagtactttcagacgaggtgcctaccaaattag

SEQ ID NO: 41694 - protein, 269 aa, DROSOPHILA
MTSQYLSQLITADKLSAEPWPEDATLYQPYEAEQILLPENASCLAVKAYLKMCNLPFLIRSCANAEHMSPGGRMTKLPFIRAGAFIFAEFEPIVNFVEQKELAIGSWQDEDEKADMRTYVSLVENIFTMAELYISFKNERVYKEVTAPRNGVVFPWPLNHMQNYGKRRNALRLLKVYQWDDLDIDSVIDKVAKCCETLEYKLKESPETPFFYGDQPCELDAIAFGHLFSILTTTLPNMALAQTVQKFQHLVEFCRFVDEKYFQTRCLPN

SEQ ID NO: 41695 - DNA, 7021 bp, DROSOPHILA
attagatgtatgcgggggtaaatgctttatttactgcatggccgccgccacctgacactgctgttggtacttggccacggattcccgatgcttcagcatgtccttctccctggattaaatgaaacgaaattgaaagaggaaaagggtaatatgtaagtaagagactatagacaactaggcgatggcaacccacatgttctccagtgcgtcggtggagctcttcagctccttggagatgtactcgatgcgctttccgacattctggcgcgactcctccagctcctgtttgaccagaacgggcccgaagagcttgtagaccttgttgtcggggcccagaagattcagctcgtccaggacgcacttgttctcgttcagctggctttcgagcactgctcgctgcttcaccatcttcaagcaggctgtgcatgaagttaaaagtacatacattccatgcacataagacaaaatcatggtacttatccaccagatggctggcatttactcacatttttgcaggttctggtacgactcaatctcggcctgcatctttttgtacaacgctgcgctcttcttgtccattttggtttagatacagcaggtgtttgttcggaatagggtgtttaatgaaacagttgcttcaccggttgctaataattttaactaaatttcgtcttttgcatgtgaataaaccgtgcagtgtgcccaaatatggttttcactaaatataccagcaaattgtgtcgttgccacatggctgtaactggcgtgctttacagcactgaccaaaacagctgtctgaaaggtgcactaattactgtctttcattcaatttactaattaaaatgggaaaaatatagaaagtataacctttaaaaaatgttttgtattaaacggagaagtaaatgcatatgaaatcaaattgtttgaaggactatcaaaacagtgttggcaaacgcgcaatgtattaggactggcgttttacatgcttggcatgaccgcaaaaaaataatgctttcatttgcaatgtttgtaagcgaataaagtgcttgaactcatcaacttaaacaagtacaatgggcatatgaacaaattatttagtcagtgtgcaactggtgaacagtaaaacaaaaacattcgtcatgcagtcgtagcgttgctagtgcgcccataataacgctgagacaaaagcaaaagatttcgcgccgaaaaggaggacggcagaaaacacgcattgcacggtggaaaagtaacaaaaaccgattataaatggactctgatgtggcgaaaatgtttgccaactaaaagcgattgcgtgcggttgtaattgtgatccgtggaaagcgtaccgccgtcagtaccgccctcgcccttcgccccccgcccccgttccccttgccaacaacacaaaaacaatggccccagcgaaaaaacgcgaaaaagacagtaatccggatggttctgccgcaaatggcattattggcctcacccatggagcaccggacgcgagcaatgctggctctactgtaccgccgacggccgagggtcaggtcaaactcaatggccaccagcaggagcaggaactctttttgcaggcctttgagagtaagtagaacatgggattgttttaccatcgggtcatcgagtaatttgccgaatactaacatttcagagcccacgcagatctatcgctacctgcgcaatcgacacgagacaaacgtaagttgatatcccttccaagtatttgggtcccatacatcattgcagactaagtttcaaataagagattcctcgaattcaggttacaacgcaatcgcaattaatactcagcttcaactttgctgctccagttatggagttatcttaaatccctttagaatgtctgggatatttagctccacaagttctgcaccactcataactatacataccccttctcaaatacagcccatcttcctcaaccgcacgctcagctacatgaaggaacggatgtcgcggaacaacaagaagcggatcagcttccaggtaaactccatgctggagagcataacacaaaagtcggaggcggtgagccagaactacctgcacgtcatctacgattcgctgcacgagaagttgccggcgaggttggacaacgagtctggcgaggatttgctgcaggagcagctgctctgcgaagcgggcgagtctgtgagtgtggagacaacgctgtacaagatcacacgcagcaagcgaaaggacagcacgctggactttcaggagctgctcagcaagtgctcgcagatcgtgtacaacccaaaggatcgtgtgggagaacatgccaccatcagcattcctctccagacgatgcgcccaatgggtgagcagcacacactgtacaagctgctatttcgcatcaaggtgctgtcgccaagtacgtgcaatgatgagaatgcaggtgagttctttgcaatgcgtccagttggtctacaaattataaaacttatccgtcatctgcagaaactccaccgaacaagcggtcgcgtccaaatgagaaaatgttcggatcggaactgatattgtacgagaagtccagcggattcataaccgaaggcgagtacgaggccatgctgcagcctcttaattccaccagcatcaagtccttctcaccaaagaaatgcacatgggaaacgatgccggatagctacattccactctcgttgacctacgacgtctaccagcagagtcccatgctcaagttccatctgacgctatccaatgagcagctgcccgagatgatttccgctccggagctgcagcgttatgtccagcatctggatgcggtggccgagatgaactacaacaacaataactacaataataacaacaactgcagcggattaaagaatggtagtggcggaggcaacagcacggtgtgcaagaccacaccggagcacattcagatcgtgtacaacttcatgtacagcaataatacccgtcagcagacggagtacacccaggagctgaactgcccgtggtgcggcctggactgcctgcgtctctacgccctgctgaagcatctaaagctttgccacgcccgcttcaacttcacctaccagccggctggaagtggagctcgcatagatgttaccatcaatgatgcgtacgacggctcgtatgccggatcgccctacgacttggccggtccatctggctcctcgtttgcccgcacctgcggccccgtgcgacgcacctcggtcaccagtctgatggtgtgccggcccaggcggcagaagacctgcctggacgaattcctggagctggacgaggacgagattagcaaccagcggtcgtacattaccggtcacaacaggtaaggcgccatttaaagtagaacaccttaaacttattttcaaaactgtatgaaaatccttgcagactctaccatcacacggagacttgcctacccgtgcatcccaaagagctggacatcgactccgagggcgagagcgatccgctgtggctgcgccagaagaccatccagatgatcgacgagttttccgacgtgaacgagggtgaaaaggagttgatgaagctgtggaacctgcacgtgatgcgtcacggctttgtgggcgattgccagctgccgatcgcctgcgaaatgttcctcgacgccaaaggcactgagattgtgcgcaagaatctctatcgcaacttcatcctgcatatgtgttcgctcttcgactacggactgattgcggccgagacggtctacaagaccgtacagaagcttcagggtctgctcagcaagtacgccgccggccaggagctgatgcagcggcagcgcgaggagcaactgaagtattggttggatgtgggcatgcacaagaagcaggaagaccccaagacactcaagtcaccccaaaagccagcaccgcccgcagaccaagcatctacctcatccgcatccacctctggaagtggttcggggtccagctcaatgcagccacccaaacgaatgccggctcatttgaaacgaggcagcgcagcgtcctccccgggcgtccagagcaagggcactgaaaatggcaccaacggcagcaacagcagcagcagcaacagcaagaacgtggccaagaagagcgccgaccagccgcttagcaccctggctaacacaagggagcgacgctcggagtatggccagaaacgcaatgtcagcggatcgcgactggcggccacaccagcatcgaagcgcaagctgagctccaaaggtgagtgccgcatcagcaggcaggaagcatacccgtctcatccccatcgtagtcattttaactttgcctttttgtttttacaatggcttgggattacaaacagtaatctgactaaacttgatgcctaatgaaaaatgaatcgtctctgagacttaaacataattgcaactcgatagtgtgagccttatatatacaaaatcaaagaattactttctcatttggcaatccgaattgctcatttcatttaaaatcgatgtaaatgaagttattatttgagatatttgagataagtcttattatcttttataatcttttatcgtttgcaatttgtgtaagcccctatttcccccattgaacatatcatcatcaattgtgccacataaagtagctttatgcagaccaaactgataacatatccaagacaaggaatcgctacatgcatcttcatatgtacaaaacatccaatgcatcccaccatcgtcatgagttcacaatgaaagccaccgatcagaagcaaatcccaaaattcaatcaaaattgtatcgtttggacctttttctttcaaaactttcgcttttcctttggacattaactgaattcttcctctcaatgtgaacgcacggtctgtggcagatgtggagcaggcggcggatgcgccagaagtgctgacccacagcgataatgctgtcgatgttggtattattgatgatgagtgtggcggatttggtgccgtgggagttatgaatggagttgcgagcccagttgccaacaactgtgtgggcaactaaatcagtagtaacttggattcaacttgcatttgacccgctctaattctaatggtatatgttttggacctttgctagataatacagtgcttaacaagcggcagcgttacagcgacggaagtcccgggaccgggatcggaaatggacacggaggcggaagtggaagcggagccaaccgcaacaaaagcaataaccattcactgccagcaaccagtaacaacgccagtagcagcagcagcaacagcaaacgagcgattgcccggcgtcgctccacatcggagaggaccaaggcgagcggatcgacgggaggaggagctggtggcgtccgcaccaggctatcggtgccggccaagtatgagaggcgctgacgcaggcgccgccgctgctgctgctgctgctccaactcatcctcatcctcatcgtcctcctcctcctcctcctcctcaataatcgcctcccgttgaccacatgcatcgcagggcttagtttgtttaattcgtagacgcaatgccagaccaggccattttgcaaaccctaagtttattgctatatattctattctattatgttgtgttatattttaactgattgatcatgttggacatttgttaagacttgtgtcgaatttgaaattgacctcaaaatcgttcatttggttcgttgctaccagttgctacgccacaattgtatctaaaatcaaatatactttaattctaatttggcagttacttaaacttaacaaatctacagggctaatggaaaatcaaaattcaaaatcgatttgaattcccatgcttacacttcacatccggtttggattgtgtaaaccaaccttttgtggcgaaacaatgagacaattttatcatatgtaattagtgcagagtgtatacaaatatatatatatatatatttacagcagcaataagtaagtctatttttaaagtaaagttcgtacaagcgaaacaaacagctccaaaaaaaaaatccagcaagaacactatcactagagcctacgactacatacatttatatatacgtatacatgcataaataaaaatccacttcgagcacacgcaaaattaatattgctaaaagccactgaataaagtttgcatatatatattttcacacaatgcgtttgtgtcgcctgcaattgccagttttaaaagcggtttgtagttatgggtaataaaaagagcacagcgtttattctttatatgtagatatatttcgtattaattgaatcatttgaatcaactgccagtggggggaacaaataattattgggagttagtggctgaacttcagtttctcgcatgaccttaaacgttaaatgtttgaatgcacttctatttcacaaaatttgggttctttttcagtataacgaagccctccatgaccggagtgagggccagatactcatcggtggccagctcggcgcgctcgccaatggccagcaggacgggcgtggtgtgcgtttggaagccggtgatggtcttcggcttgcctgcctggccgaccacatcgatggcaatgccgacgcgcacgggcacctgcagctgattgagctcctcatcgaaggtgatcagcatgcgagcctgcatggcaggcaccagtgtgtagagcagatagtgcgatcggttcagtatcaggttcttcacgtccagcagggaaaccagcgtagccatcagtccagcgacggccatggggttcatcagctgcctatcgctgtggtagggactcagcgagagcgtgcccttgcccaagtgcgtcaagctctgggcgatgcgcaccatgaacagattgctgggatccttagaatggtactgcgccaactggcgtagcatggaggccagccgagcgttattcgtgccggcgcccaccaagcccatggcgaagatcgcattgtgggccacctcggcgtcgctatcgtgcgagaacttgctcagcgtgtcgatgatgttcagcttgggattggaggcggatatc

SEQ ID NO: 41696 - DNA, 3572 bp, DROSOPHILA
aaaaaataatgctttcatttgcaatgtttgtaagcgaataaagtgcttgaactcatcaacttaaacaagtacaatgggcatatgaacaaattatttagtcagtgtgcaactggtgaacagtaaaacaaaaacattcgtcatgcagtcgtagcgttgctagtgcgcccataataacgctgagacaaaagcaaaagatttcgcgccgaaaaggaggacggcagaaaacacgcattgcacggtggaaaagtaacaaaaaccgattataaatggactctgatgtggcgaaaatgtttgccaactaaaagcgattgcgtgcggttgtaattgtgatccgtggaaagcgtaccgccgtcagtaccgccctcgcccttcgccccccgcccccgttccccttgccaacaacacaaaaacaatggccccagcgaaaaaacgcgaaaaagacagtaatccggatggttctgccgcaaatggcattattggcctcacccatggagcaccggacgcgagcaatgctggctctactgtaccgccgacggccgagggtcaggtcaaactcaatggccaccagcaggagcaggaactctttttgcaggcctttgagaagcccacgcagatctatcgctacctgcgcaatcgacacgagacaaaccccatcttcctcaaccgcacgctcagctacatgaaggaacggatgtcgcggaacaacaagaagcggatcagcttccaggtaaactccatgctggagagcataacacaaaagtcggaggcggtgagccagaactacctgcacgtcatctacgattcgctgcacgagaagttgccggcgaggttggacaacgagtctggcgaggatttgctgcaggagcagctgctctgcgaagcgggcgagtctgtgagtgtggagacaacgctgtacaagatcacacgcagcaagcgaaaggacagcacgctggactttcaggagctgctcagcaagtgctcgcagatcgtgtacaacccaaaggatcgtgtgggagaacatgccaccatcagcattcctctccagacgatgcgcccaatgggtgagcagcacacactgtacaagctgctatttcgcatcaaggtgctgtcgccaagtacgtgcaatgatgagaatgcagaaactccaccgaacaagcggtcgcgtccaaatgagaaaatgttcggatcggaactgatattgtacgagaagtccagcggattcataaccgaaggcgagtacgaggccatgctgcagcctcttaattccaccagcatcaagtccttctcaccaaagaaatgcacatgggaaacgatgccggatagctacattccactctcgttgacctacgacgtctaccagcagagtcccatgctcaagttccatctgacgctatccaatgagcagctgcccgagatgatttccgctccggagctgcagcgttatgtccagcatctggatgcggtggccgagatgaactacaacaacaataactacaataataacaacaactgcagcggattaaagaatggtagtggcggaggcaacagcacggtgtgcaagaccacaccggagcacattcagatcgtgtacaacttcatgtacagcaataatacccgtcagcagacggagtacacccaggagctgaactgcccgtggtgcggcctggactgcctgcgtctctacgccctgctgaagcatctaaagctttgccacgcccgcttcaacttcacctaccagccggctggaagtggagctcgcatagatgttaccatcaatgatgcgtacgacggctcgtatgccggatcgccctacgacttggccggtccatctggctcctcgtttgcccgcacctgcggccccgtgcgacgcacctcggtcaccagtctgatggtgtgccggcccaggcggcagaagacctgcctggacgaattcctggagctggacgaggacgagattagcaaccagcggtcgtacattaccggtcacaacagactctaccatcacacggagacttgcctacccgtgcatcccaaagagctggacatcgactccgagggcgagagcgatccgctgtggctgcgccagaagaccatccagatgatcgacgagttttccgacgtgaacgagggtgaaaaggagttgatgaagctgtggaacctgcacgtgatgcgtcacggctttgtgggcgattgccagctgccgatcgcctgcgaaatgttcctcgacgccaaaggcactgagattgtgcgcaagaatctctatcgcaacttcatcctgcatatgtgttcgctcttcgactacggactgattgcggccgagacggtctacaagaccgtacagaagcttcagggtctgctcagcaagtacgccgccggccaggagctgatgcagcggcagcgcgaggagcaactgaagtattggttggatgtgggcatgcacaagaagcaggaagaccccaagacactcaagtcaccccaaaagccagcaccgcccgcagaccaagcatctacctcatccgcatccacctctggaagtggttcggggtccagctcaatgcagccacccaaacgaatgccggctcatttgaaacgaggcagcgcagcgtcctccccgggcgtccagagcaagggcactgaaaatggcaccaacggcagcaacagcagcagcagcaacagcaagaacgtggccaagaagagcgccgaccagccgcttagcaccctggctaacacaagggagcgacgctcggagtatggccagaaacgcaatgtcagcggatcgcgactggcggccacaccagcatcgaagcgcaagctgagctccaaagatgtggagcaggcggcggatgcgccagaagtgctgacccacagcgataatgctgtcgatgttggtattattgatgatgagtgtggcggatttggtgccgtgggagttatgaatggagttgcgagcccagttgccaacaactcggaaatggacacggaggcggaagtggaagcggagccaaccgcaacaaaagcaataaccattcactgccagcaaccagtaacaacgccagtagcagcagcagcaacagcaaacgagcgattgcccggcgtcgctccacatcggagaggaccaaggcgagcggatcgacgggaggaggagctggtggcgtccgcaccaggctatcggtgccggccaagtatgagaggcgctgacgcaggcgccgccgctgctgctgctgctgctccaactcatcctcatcctcatcgtcctcctcctcctcctcctcctcaataatcgcctcccgttgaccacatgcatcgcagggcttagtttgtttaattcgtagacgcaatgccagaccaggccattttgcaaaccctaagtttattgctatatattctattctattatgttgtgttatattttaactgattgatcatgttggacatttgttaagacttgtgtcgaatttgaaattgacctcaaaatcgttcatttggttcgttgctaccagttgctacgccacaattgtatctaaaatcaaatatactttaattctaaaaacagctccaaaaaaaaaatccag

SEQ ID NO: 41697 - protein, 955 aa, DROSOPHILA
MAPAKKREKDSNPDGSAANGIIGLTHGAPDASNAGSTVPPTAEGQVKLNGHQQEQELFLQAFEKPTQIYRYLRNRHETNPIFLNRTLSYMKERMSRNNKKRISFQVNSMLESITQKSEAVSQNYLHVIYDSLHEKLPARLDNESGEDLLQEQLLCEAGESVSVETTLYKITRSKRKDSTLDFQELLSKCSQIVYNPKDRVGEHATISIPLQTMRPMGEQHTLYKLLFRIKVLSPSTCNDENAETPPNKRSRPNEKMFGSELILYEKSSGFITEGEYEAMLQPLNSTSIKSFSPKKCTWETMPDSYIPLSLTYDVYQQSPMLKFHLTLSNEQLPEMISAPELQRYVQHLDAVAEMNYNNNNYNNNNNCSGLKNGSGGGNSTVCKTTPEHIQIVYNFMYSNNTRQQTEYTQELNCPWCGLDCLRLYALLKHLKLCHARFNFTYQPAGSGARIDVTINDAYDGSYAGSPYDLAGPSGSSFARTCGPVRRTSVTSLMVCRPRRQKTCLDEFLELDEDEISNQRSYITGHNRLYHHTETCLPVHPKELDIDSEGESDPLWLRQKTIQMIDEFSDVNEGEKELMKLWNLHVMRHGFVGDCQLPIACEMFLDAKGTEIVRKNLYRNFILHMCSLFDYGLIAAETVYKTVQKLQGLLSKYAAGQELMQRQREEQLKYWLDVGMHKKQEDPKTLKSPQKPAPPADQASTSSASTSGSGSGSSSMQPPKRMPAHLKRGSAASSPGVQSKGTENGTNGSNSSSSNSKNVAKKSADQPLSTLANTRERRSEYGQKRNVSGSRLAATPASKRKLSSKDVEQAADAPEVLTHSDNAVDVGIIDDECGGFGAVGVMNGVASPVANNSEMDTEAEVEAEPTATKAITIHCQQPVTTPVAAAATANERLPGVAPHRRGPRRADRREEELVASAPGYRCRPSMRGADAGAAAAAAAAPTHPHPHRPPPPPPPQ

SEQ ID NO: 41698 - DNA, 8624 bp, DROSOPHILA
ttagatcgagcaccttgtgaccctccttgttcaactcagcggttacgtagcggatccggcgctccagttcatcgcagcgtctcacctcgccaataaattttcgctgctgagcgtttattttcgcattcaactgtttgaaagatggtaaaagatttcagaatcataccgaggtcctcttttcaatttgaaaacgcatagctatcaaatttatattatccttgatggaaactttttattggcagcacttacatcacggaactgaacacatcccacctcgcccaaggcggcaatcgtatcgtaggctgcctccggctgcagatacatttgcaccaaggacatcacctcgctgcggaagatgctgttgctctcctgattggagccgcagctccaccacttggacatgatagctgatcctgttgatccttgctccttgggttaaaacaattccggagtgggctcctcactttcggagcacagctgacgaactgatcggtctggtcacttgacttggacgaggaaggttccgtgacaattgctggcccacgagcaactttaccggcttatcagtgcaggcgagttgcctcccctggataaatatttggggaacttggtgcccaatcgagccatccatcaatgtgatggaatggccgttacctcaattgcgattcccctcaccatgactcttccttatcggtagttactttgcctttggctgtaaagttcaactatttggacttaaaaacccattgtcagtcgcttacgaattaattaccttctcaatacatttacaaatatctgtatacacatcggaacttatgtaaataatacaagctataacaacaatatggtctatctgtatctgggcgtgctgtccacatttgtgaacatcccaaaagaatgctacaaaaaaattaaatttattaatgtgcaatctgtattgtgagaacatgtagggtagataagctgtggggtttgagttttcaatgaattccaacaagtcttcgttctcttctttgctgtatatttattacaattagtatttgtataattagttatttataacaatgaatatcaaattattgctttcgaaagggtttttgagaatactaggcacaactcaaaagaggaatactttgactacaaatggaatacacaacggaggatacaaaaatgtgggaagagcaccacaatactgacaatatccaaaaaattaaacaaaacaaaaacatttaacaaacaatcaaaatagttcgggctgggggtataattgtatacacgtttccctagtttgagcacatttggatgggtttactcctcctcttcgccatcgagaatggccttgaagctgaacggctggaaggcgtagcccattccctcgtagaacttgctcatgaactccacccagtgcagacgcagagtgtgcaggaaggcggacagaccctccatgaggaccaggatagccagggtgaacaagcaccaggcgccgaagatgatgaacagaccaatggcaccgcccacgccggacatcttaaggcccagggacaacaccatttgccacagcacctcggagagctctgcaatttgtgagttattagttagttaatcacaaagaatagaatagaatagaatagaatagaatacttacgggcgtgagccagggacagagcccagagacgcagataggacgccgtgtgcgagatggtactgagcacatattcgatggtgtggatggcttgatggatgtagatttcgctcatgggctcatcgtcatggccatgggcacccccggcattctcctcgtttccagagaatcctgtgggcagaggagtctcgccttcggccagttcaatgttgccggtcaactgaccattgtgattggcctgcgagagaaaattggaaattaatactggaccaacttcaaataattaaatgataaacccacatgagccttgtttttgcgagtgaacttgatgtacaggggcttgcccagaagcatccaaggaatgcagcacagggcgatgagcacaaaggccttctgcaactggggctgtgactcgaacatgaactcgttgcaaccctttggtggctcagtgttcttgaacagcatcatgttgatgaacatgatcaacacggagggagcgcatccaggagtttctggctggaagctagtcctagcgttatagctgaaccacttgaagaacctgcacaaaaaagcactcgttagataaggaaaggagtgagctatttacaagtaaactcacatcatgaacaccatgtagccgaagagcagtagcaggaacagaatttggggcacgaactccaggaaaatggaggcataacgcttgaagtgggtgaagttaacgaccgacatgcacacgccgaagaccatgtgcagcactccgaagatgatcgagagcttcatcttgaaactgttgaggaagatgatcttgttatcagccaactgccacacgggatccattccgaagggatagacacccacggcggagctgttgggcggcaactgcagattcgggttggtcaggacagtcgttgtgttgtagttgttgaaccaacgtgatccaaacaggttcatcgacttggagaagacatcgttgtaaaccaaaccagtgtacatggcaaacagacccatcagcagaatgatatagcgaccgccgaagaagatgttccagatctcaccaccgttgcggatgcgagccagcttgcgctcgcacaaaaccatccaagctccaaacaaaaccagaataaggccgtgacccaaatcgccgaacatcacagcgaaaaggaaggggaaggtgatgcaggtgtacagggcgggattgcactctctgtacgaggccactccgtaggcatcaatcagattctggaagccacgggtaaacttgttagtcctgttaaaggtcggcggctgctcgttggtgtcgatcacgttcaggaacgagggtatggtgctgcccactgcagcagatccatcggacagagccttttggacaacgggcaaatcattggtgggcacccaacactcgccaatcaggcacttcttggtcacgtccatgttgaacagattcagcgtgtggtaaatggccttcatcttcttgaccatgatcgaccacgagggcagattcttggacacggtggccaggacgcggctacgatgatcctccgtctggctaaggaccagcttcagatcctccaggcgggtgcgcacattgcgaaccatttcctcgcgctcgttgtgcgagctgggacagggatacagcgaggcgtggaagccagtgcacaccttcttgatacggttcttcagttgctcgccctggaagaaggccacgaagacggtcttgtagatgggatgtccggtggccggatcgttcagcggctcgtccagatcggagcgcttgaggaagacattgcccctggagatgcgccacagcatacgctcaaaggcaaacactcgctcccggttaattacaccggcaacgaatccaagccggccacggtgttgagcagcagcatcgttgtctcctccagctcggttggaggagtccagattgagaacctcctggtcggagaagaagccctgcgtgttctccagcaccttgcgcagctcggtcagctccagatagttggacttcatgttcacctcgttctgggccagctcgatcatctccgactcggtcttctccagatgcgcctccagatcgatgatctcgcgtggattgggcgcacgcggaatgtcatcctggatgtcgggcaggacgatgccgtccttcttgatctccgtctcgatgtagcggatcttgcgctccagctcatcgcagcgacgcacctcggtgacgaacttgcgctggaaggcgttcacgttcacattcaactgttggtcaagatagatatattatctgattagtcgcggtatctcgcaaagacaatccgtacttacgtcgcggaactgcacgcagccggtttcgcccagctcagatacggaggtatacgcggcctccggctgaatgaacatctggcagagtgccatctcctcactacggaacatgtcccccatcttggcgactgcttacgttccctgtgggcgaaaggaggattttgggggtggaggtaagtttcggcattccgcagacgtgcaattaaaacagggaaaagctgcttcagccaacgacaacgttttgttttcgccctcagtgaatgttttgtctgggccacaatgtcgtatacgataaacaagtcgcagcactgagggaaatagtctcagaaagtgggacttttgctatgaaattatatgtttcaaacgaaattcagatctatctatctgttatttgttgaaaaataattgtaatataaaatgaaattatgtatcttttttactaattcttttttattaatttgattttctatagtttctcaaaaaatattcataaattttttttcagtgctacttcgcccgctattcaacccgacatatttatgtatatacgaattttgccggcttgctctgcaaatcattttatttatttgtctttcatttgttttcctctgctgcggaaaggcaatcactctattttcagctccatatggcgctcggacctggccgaaactcaacacatgttttggctttcagtgcgactagaggagagtcaattatttgaggatccaaatatgtatcggttgctcaattacaacaccttgtcacgttctaggcccctgagtttaactgctaaatcacgtaacttcaaacggatcgttaagtgcaaatgaatttcaaactcgtggcgactcttcaaggtcttttccaatcaaattgaagattgcatgaaatgctaaacaagggaaaagtaccgaaaagaatgagaaaacattttggtatacaaaaggagttaaacattttaagaaagcagcaggaagtgattcaatggttatcgcactttcaaaacgatatacggagtgggatccagaaagaaatcatcatattatgatggtatatagtaattaacgatctttgatatgaacaatcgttaagatattctatttttatggtctcattcattgctcacatatgtacatatgtctaggcgcaccaatttgggatagtaccagtttatcttgactcatttcttactgcgaggcgcatgttgtcccatgtccccaaaatgtcattccctggagttggtaatctagaagggtgagcactttgcaaggcctttttcatcgcaatcttaacttatttgcttgagttatctccatacccgctgcaaaagtgtttacggccgaataaaacagttcttatcgcccatgtcgaccgtaaatgcattatttctacactttccttctcaactcgaaaaatctggcaacataagcgcatatatgtatctgcagatgagctaatataaattatggttcagcaaattaactgataattgtaacattatcaagagcggacttctaccaaaaatcggtggatccagataatgccagttattactgtttttgatttaattgagcgggtggactggtacatctgtggttgggcgacatatggtgaccgcgggggagtggtggggcaggtcctgggaaggggcattggtccgtagtcaccagtcaccagtcaccattccggtgtctgcactcgagagcattccgccatttcgctgtgtacacacagaccacaaacaccaaggtttgttgtgacatcatcgggccaaacagtcaacgacacggcgacgtcagcctcgcacattatcgaactttaatgtctcccccggatccccgagatccctggatcccgtccaagtggccagtccctcaattcgcgacagcaggaaaattagcttttgctttttgcgggacacataaaacgaatgatgtgttattttatatgtgaacacatttatgcagaggtggcaggcattaagaacaaaacattgggcatttgttatcgaggaaagatatagttgaaaaatctctatagctcttaggctaatttttaatatagcagtttaatgtatttacattttttacttgttttttaaagaatctatcagtaaaaatggaatcgcatcattggtacattcccaagaatttccggaagattttgctgagattttacaagcgttgaattaccactttgtaagttttggcatcccacgttaatatgaatagtaaactcttgcgattgcacaaatacatcataatgttgaagaattgtaaagccccatatgtcatactatagaataaaacccttgggtggccgccaagacaattggacaggagccagtatggggacgtcattgatatccatcgacaaacccaacccatagctattggaggttcatcaatcatgtgaccaactaaagtcggatgggtggaaaagggggcttgaaacccgaattcctcgaggtttcagcgcgcaacttcgctggggattggaattgcatatgactccccaatccgatccgcgtctactctgaatacatatgcatatgctcctctatcgcctgttgcttcccatatctttcgaccagtttcagcgtttttgcttacattttatcagctcagtcagcatttatgtaggttgacactttgttgttctgctctgtcgttttataaccaagaatcgttggctgtcggcagtttgctaaaaatagcagagtcatgaaattcgcagcctaattgctcctattattaattaggaatatggcaagttctcagctcgttaaggctcattttagaatgtttgtcgggcaattgttttcaacatctttatggcattattaaattactattggcgtgcgccgaaacagcaggtgggggaaatccttatagagcgggtctctccaatttaaagcggctacttgttaaatttataatgcaatttggcggtgttaactattaacgaggttaagtggcgcaatttgaaaccacatttgaaggatttcccatggtttaatggtgtgcatttttaagcaccctagtgcacggcatttctagtacttggcttaataataaatgtaagaacaaacttatagaccaattaggttctagcaatttatcaaaacgttacgacgtgttgtattctttctaaggcgtagaaaatagcgaatgggaaagcttcttatttataattcattgtttgaggtaatttactattgaaggtttatcacttaaaagcggaaacagatatggctcagactttaacctaggcattatatgtagatatgaaacctatttacaagttttatatttctctctgaactcaaaatagaattaatatatagtattaaagatatactgctgtgcaatatataggaacaaaactaagcttccaattataataaatgcaataaattagtataaattcacatgaaacccttacctccgccgacgagaattacctccaaaactcgattggctttaaaaaaaaaaccggtaatagaattgtaactcgcctgctcaaatgttgtttaatgattcaacgagcgcactttcgtttataatgaattcaaccaaaagtccagtttccaattgcgatagcccaatatcgcaatatcacagttcacacgcacagctcgaacactaaaaaaacactgagccagctgagaggcaactgctaactgctaactgtaaaccagttcgacttcaaaacaacaactaagtgccgttcgctctcttcgccttctcttttctctcccgctttcttctctccacctcttcactgctttgctggtcaatctagccttgtgtgcgtgagtgtgggtgcgcctatcacgatgtacaggtaaacttttattattactaaatgtccagaagtctttaattaaaataattacttattgcgacaataagtaagaaggtgaaatgtaagacttcccaaattgcaataagaacaatagctgtgagagcaataataatcttcagcttttatcactgagcggagcgacataagcaagctgcactgtacttcagatgcaatgttgttgtttcagttgttgtagctgctccttggctttcacacgcgagttgtgggtgagccttaatcacatttattcgatggtgagtggagaaggaggtgctgagtgggcgagggagcggcgccgagagagcgaacgagcggttgacattgacaaccccccttttttgctgttgggagcgggcgcacgcccatgtgtgagtaggctaatatcgctacacttcgaagtttcgttgaatttgcgctctgttttgtttgcttctctctttatcgctctgcgctttggctctcccgttcgctatttgttgttaattcgaatacgaatataacttctagtttttatggtgcctttgcgctcggttttatgacaaaaccattttttttccactgcgggtaattaagaactcgctggcacgaataaccgaaccaattcaatgtgaatccacagtggaggcgatcgaggaacaaaaacagtccgcaccatcatttattaacgccaattgtcagttcaattcattttcttcaactgcttctgtgcgaagaaaccgtttcattgcgtcacaaagatgattatgctcatatattatcgaactaatggggggaattcaaaattatatagagctgtaaaacagga

SEQ ID NO: 41699 - DNA, 3062 bp, DROSOPHILA
cctctcagctggctcagtgtttttttagtgttcgagctgtgcgtgtgaactgtgatattgcgatattgggctatcgcaattggaaactggacttttggttgaattcattataaacgaaagtgcgctcgttgaatcattaaacaacatttgagcaggcgagttacaattctattaccggttttttttttaaagccaatcgagttttggaggtaattctcgtcggcggagggaacgtaagcagtcgccaagatgggggacatgttccgtagtgaggagatggcactctgccagatgttcattcagccggaggccgcgtatacctccgtatctgagctgggcgaaaccggctgcgtgcagttccgcgacttgaatgtgaacgtgaacgccttccagcgcaagttcgtcaccgaggtgcgtcgctgcgatgagctggagcgcaagatccgctacatcgagacggagatcaagaaggacggcatcgtcctgcccgacatccaggatgacattccgcgtgcgcccaatccacgcgagatcatcgatctggaggcgcatctggagaagaccgagtcggagatgatcgagctggcccagaacgaggtgaacatgaagtccaactatctggagctgaccgagctgcgcaaggtgctggagaacacgcagggcttcttctccgaccaggaggttctcaatctggactcctccaaccgagctggaggagacaacgatgctgctgctcaacaccgtggccggcttggattcgttgccggtgtaattaaccgggagcgagtgtttgcctttgagcgtatgctgtggcgcatctccaggggcaatgtcttcctcaagcgctccgatctggacgagccgctgaacgatccggccaccggacatcccatctacaagaccgtcttcgtggccttcttccagggcgagcaactgaagaaccgtatcaagaaggtgtgcactggcttccacgcctcgctgtatccctgtcccagctcgcacaacgagcgcgaggaaatggttcgcaatgtgcgcacccgcctggaggatctgaagctggtccttagccagacggaggatcatcgtagccgcgtcctggccaccgtgtccaagaatctgccctcgtggtcgatcatggtcaagaagatgaaggccatttaccacacgctgaatctgttcaacatggacgtgaccaagaagtgcctgattggcgagtgttgggtgcccaccaatgatttgcccgttgtccaaaaggctctgtccgatggatctgctgcagtgggcagcaccataccctcgttcctgaacgtgatcgacaccaacgagcagccgccgacctttaacaggactaacaagtttacccgtggcttccagaatctgattgatgcctacggagtggcctcgtacagagagtgcaatcccgccctgtacacctgcatcaccttccccttccttttcgctgtgatgttcggcgatttgggtcacggccttattctggttttgtttggagcttggatggttttgtgcgagcgcaagctggctcgcatccgcaacggtggtgagatctggaacatcttcttcggcggtcgctatatcattctgctgatgggtctgtttgccatgtacactggtttggtttacaacgatgtcttctccaagtcgatgaacctgtttggatcacgttggttcaacaactacaacacaacgactgtcctgaccaacccgaatctgcagttgccgcccaacagctccgccgtgggtgtctatcccttcggaatggatcccgtgtggcagttggctgataacaagatcatcttcctcaacagtttcaagatgaagctctcgatcatcttcggagtgctgcacatggtcttcggcgtgtgcatgtcggtcgttaacttcacccacttcaagcgttatgcctccattttcctggagttcgtgccccaaattctgttcctgctactgctcttcggctacatggtgttcatgatgttcttcaagtggttcagctataacgctaggactagcttccagccagaaactcctggatgcgctccctccgtgttgatcatgttcatcaacatgatgctgttcaagaacactgagccaccaaagggttgcaacgagttcatgttcgagtcacagccccagttgcagaaggcctttgtgctcatcgccctgtgctgcattccttggatgcttctgggcaagcccctgtacatcaagttcactcgcaaaaacaaggctcatgccaatcacaatggtcagttgaccggcaacattgaactggccgaaggcgagactcctctgcccacaggattctctggaaacgaggagaatgccgggggtgcccatggccatgacgatgagcccatgagcgaaatctacatccatcaagccatccacaccatcgaatatgtgctcagtaccatctcgcacacggcgtcctatctgcgtctctgggctctgtccctggctcacgcccagctctccgaggtgctgtggcaaatggtgttgtccctgggccttaagatgtccggcgtgggcggtgccattggtctgttcatcatcttcggcgcctggtgcttgttcaccctggctatcctggtcctcatggagggtctgtccgccttcctgcacactctgcgtctgcactgggtggagttcatgagcaagttctacgagggaatgggctacgccttccagccgttcagcttcaaggccattctcgatggcgaagaggaggagtaaacccatccaaatgtgctcaaactagggaaacgtgtatacaattatacccccagcccgaactattttgattgtttgttaaatgtttttgttttgtttaattttttggatattgtcagtattgtggtgctcttcccacatttttgtatcctccgttgtgtattccatttgtagtcaaagtattcctcttttgagttgtgcctagtattctcaaaaaccctttcgaaagcaataatttgatattcattgttataaataactaattatacaaatactaattgtaataaatatacagcaaagaagagaacgaa

SEQ ID NO: 41700 - protein, 834 aa, DROSOPHILA; identical to SEQ ID NO: 41499

SEQ ID NO: 41701 - DNA, 4872 bp, DROSOPHILA
aaaaaaagaatgaaaaggttacatcgcaagaaaatgtatttccctttgccctttgctgcaataaaatccacaaatctttatttttagttttcctaaaatgtcacatgctcttcttgcattcgtgcattcgtatttttgcaggtctccatacacaatatttcggagtccaacttcacgcgcaacaacgcgtcgccgtcgccgcatcacgtggagatcaccagcgtgtttggaaaccgggcacgctcctccaacgcctatgatccgcagcagcagccgccacccgttccgggtgccaactactgcgacaacgtggccgccgactacggcagtggttagtttatacatgttacatggctaagagtcctcaatccaattgacccatttgtacatatttgcagattcccacctcttcgtgcagaacaatctgctgacgcgaatggcacagccggcggttccgccggacccatttggctatgacttcgatccctcctcggtggtgccgggcggaggatcgaaggcggccagcgtggccagcgatctgaacgaattcctgcgccgcagcccgctcagccagcgaacatcgccgtacagccaggacgagaatgccgccgccctggaaaccttcgtgcagaacatgaacgcactgcagatcgccacggatgcggagtgctcgcggctgaatggcacgggaactggaggtgggccgagcgatgtggcctcggcggacgccaccgccggaggagctgccaatgcggccgccgcctggtggtgagccacatgacacgaggtgcgctgcctggccagcagattgagttgaactcctcacattcataacagtctctcacatacgcagacatttcatcgatgaaaagcagaaagaaaaaaaaaaaaacgaaacataaaaattcaaaaaaccgaaaacgcatccaagaaatcattcaaaatgacttaggagtcaatttcaatgtttcaacaaaaaagagaaaaataaagaaaaattaactcaaatggaagttcacatatcctgcgattgtgtgtttttattcaattccccttaaattaactaaatctatgctaataatcaaagctaaattatcaaaatgagctttatttctccttgcgattttaattgttaattgtattttgttataattgataaaacaatgccgactaaattgaaactggttggggattttggatttattgttaaattttcaatttgatgctagtaaatataaaaacgttacgcttaaatagcaagaattagttgccgtcgagtggctaaaatacttgagtgctttcacatctcgaagacgagcgatccggaggcgtagctaacgctggagtcctcaatgtcctgacactggctgctctgggcgtacttgaggaacttgaaactcatcttgtcgtagccctgatcctgcagtgccttcacggcgcctagcattactccgatgggatggcgtccgcatatcgtattgttgtacttgcgcaagtactcggtgaaggagtgcggattgagcgactcaatgatgtccatgccctgcttgtccagcttctcgatggacttgtgaatcgctccgcaggagctgtcatagtaggtatagctgaagcgatggccccagtggcaaaagtcggaagatatcacaaacagattggtggggtccatcagatacgaggacagcaggctgccgtactgcgcctcctgttcgggattgagcgaacccaccagaataggcacaatggtgaactgatccttgtagctgcagcagtgctattacttagtaaaacgcctcgagcatatattcaaatccacttactcctccatcactttggcaatgtagggtaaatgcatctcgatggagtgttcatcctcgtcagtcttcatgtccatccaagaaaactttccagtcttctcaagctcagagttgactaaatataaataataaatgaaatcaataaaacatgcaatgcaccttgtatttgcaatcgacatactctgagcatcaattttgagatcatagaggggtgtcctgtacttcttcgccacggataaggcgcagccacgcagacgcacatgatgcgagggacccagtatgaagattcgcttgctgcaagcaaaggttcaataaaaccggattgtcttcgcggaaatctcgaatgtgaacttcttacacgacaactgggctaacttggcgataggcaaaggcagcgcaggctccacagtacgtatatccagcatgtctgtggaatatcaatcagtaagttcaatggtgcttattgcaagaattcggttaaatcttacggagcaatgatggcacgagccggtccatgggacaaatctgcggcacccagccaacgatccaactgtctcgagagctcggcgcctgaaaagcaaagtaaatacatttattaacgaataaataatatcgtaaaccataattccctgctcaggaattggtttcagtttcgaaatcaacgaaaatagttggccagtcgttgcctagcagcaaacaaacaaatatttcctggtttataagactttcactaaatcgagacttatcacagcagcgatataaagttattaaatattgatttaaattttagttgaacattccgcgatggaaactgataaggaaaaacaaagcgatgagctcatgaatcgcattcggaacgagcttacagctatattatctcaagagtaagttatcaagttacccaatatatatatatatatataaaagaagaaaaaaatcaatccatttataatcctacaacagggctgctgatgattccgacaaggaggcgtcacaggaactgctcctgagtcccaatccgctgcccattttcgggcccataaggaaaacaaggaaagcaaaatcgaggagttccaagaagaacaatagtaaggcctcctcctcgtccgctggcagtacaaagagttcgtcgtcgggtaccagatcatctgaagatcgtttaactggaggtggagcccaggagaagccatcggatccggtctccacatcctcgagctattcgctaagatcaggatatgacgctccgcccgtggaggccagtgcccgtgccgacttccttgaatcgcaagcggccaaaagcatcgacgaagatgtccggaagatgcagctggagctcaagcagagctacgaactcttccagggcattggcgagaaattggagtcggttagcttcacgggcttgaaggaccgcatacgggacctgcacctaaacgaatccaacaacgagttgggcaaagcgacgactgcagagcttcagatgatgttcgaccagcgtttcctgcaaaatcgcctggacaagctatccacggacgccacgcagggattccgtcggcatcccggcgaattcggcgacatacccgagctgagcaccttcttccaggcatgcactcagttggaacgcggactggatgcactgcgtcagcagcggcggcgcaacagcgagctggagaagcgtctgtgctgggccaccgaaatcgcatacgatcgcatggacgagattcgcaatgcggttggctcggatccggaaaagaacttctgaattggtgacctgtagttacatttttggttcaccctaaggttcattacccgcacacaaacacacacacaggcaaacacgcacaggtgcaatacatatgcgtttatcccacacccataggcgatgcaataattgattgtgttatcttctgggccgcagctgggttgttactcacccgagtccgtgtaccagctgcctgcatgggttgctcttctggccgacattttgtgcgagatccctaatcggtctgtttagttagtaagagctattaactggccgttacttgtagaaaaaacgagttctttgttattggtacagcagtgtgaccgtcgtcttgtttttgaaataaacacgttctctggattcgctgatcagcggtcacacttcttcagggctgcattaagtacttaaatatcgttttttttttggtataatcatatataccattaatacttttttattattctaaataataaatcacacaaataaaatacaatacataaggtaacgtaattttatttaagtgttgttttttattaatttccataaatgaaatcgcataacatatacaactgaaactcacggaagtcgaaagtcggaattctgcaataccaacatttcaaactataccataattcttgcagtttgcctgcgcgcaccgaggtattttcgaacgacccgtgtgcggtcacactgttcgcatagcgtcattgctgtactaaaacctaaaaatccgccgtgttcgtattccgccattttgaaagctgcgagtggaatttggacgcgttgctggtaaattaattgtgggaaaactgcccaaaaagtgcataaaatttgtgaaaagtggtcggcaacggtgcatgagacccgccgccaagtgtttgtccccgaaaattgtgtgtggccgcgtttttggcacgtgaatttcttgcccaattgtgaactcgcaaaaaaagaaaaagaaaagagagaagaaaaccgacgccgccgtcgccgccgccacaaaggaataggcgaataagcgagagaaaaaaaggcgaaaacgagagctgaaaatcaaattgtgcgccgctgattgcgtttcagctatttaataataccacaatcgaaaatccgcggcagcggcgatttttccacggattactacaccatatatttcccatttgcctttccgtttgcaacgagtgtgcgcctgtgcctgtgtgcgtgcgtgtgtgtgagtgtgcgataaacgtgtacaagaaaaatttaaacgtgcagaattctgatgaattttaaagcggaactgctattgcctgt

SEQ ID NO: 41702 - DNA, 1263 bp, DROSOPHILA
ctcgttttttctacaagtaacggccagttaatagctcttactaactaaacagaccgattagggatctcgcacaaaatgtcggccagaagagcaacccatgcaggcagctggtacacggactcgggcgccgagctctcgagacagttggatcgttggctgggtgccgcagatttgtcccatggaccggctcgtgccatcattgctccacatgctggatatacgtactgtggagcctgcgctgcctttgcctatcgccaagttagcccagttgtcgtcaagcgaatcttcatactgggtccctcgcatcatgtgcgtctgcgtggctgcgccttatccgtggcgaagaagtacaggacacccctctatgatctcaaaattgatgctcagatcaactctgagcttgagaagactggaaagttttcttggatggacatgaagactgacgaggatgaacactccatcgagatgcatttaccctacattgccaaagtgatggaggactacaaggatcagttcaccattgtgcctattctggtgggttcgctcaatcccgaacaggaggcgcagtacggcagcctgctgtcctcgtatctgatggaccccaccaatctgtttgtgatatcttccgacttttgccactggggccatcgcttcagctatacctactatgacagctcctgcggagcgattcacaagtccatcgagaagctggacaagcagggcatggacatcattgagtcgctcaatccgcactccttcaccgagtacttgcgcaagtacaacaatacgatatgcggacgccatcccatcggagtaatgctaggcgccgtgaaggcactgcaggatcagggctacgacaagatgagtttcaagttcctcaagtacgcccagagcagccagtgtcaggacattgaggactccagcgttagctacgcctccggatcgctcgtcttcgagatgtgaaagcactcaagtattttagccactcgacggcaactaattcttgctatttaagcgtaacgtttttatatttactagcatcaaattgaaaatttaacaataaatccaaaatccccaaccagtttcaatttagtcggcattgttttatcaattataacaaaatacaattaacaattaaaatcgcaaggagaaataaagctcattttgataatttagctttgattattagcatagatttagttaatttaaggggaattgaataaaaacacacaatcgcaggatatgtgaacttccatttgagtt

SEQ ID NO: 41703 - protein, 295 aa, DROSOPHILA
MSARRATHAGSWYTDSGAELSRQLDRWLGAADLSHGPARAIIAPHAGYTYCGACAAFAYRQVSPVVVKRIFILGPSHHVRLRGCALSVAKKYRTPLYDLKIDAQINSELEKTGKFSWMDMKTDEDEHSIEMHLPYIAKVMEDYKDQFTIVPILVGSLNPEQEAQYGSLLSSYLMDPTNLFVISSDFCHWGHRFSYTYYDSSCGAIHKSIEKLDKQGMDIIESLNPHSFTEYLRKYNNTICGRHPIGVMLGAVKALQDQGYDKMSFKFLKYAQSSQCQDIEDSSVSYASGSLVFEM

SEQ ID NO: 41704 - DNA, 3039 bp, DROSOPHILA
ggtctcttgaaattaactgatctaatctgatttcttcagaaattggttgatggttggttaggatgttaatggatctctctagttccaacattcatcctgcgtaatatcttcgtgagtttaggaaaaacattatttcactgacactgattcattagatgaattctcggcatctcctacaaaactgtctccgtcatcggaccccaaaagctgtgaatttgagaaatcctcttgatccgaggtattgtggttctaatttttttctctcttgactttcatatcagcagcaatggcagaacttttggtcctgcaaaaaaaggaatcagtcgtcaggtgtatataatattagagatatgggtttcaaactatgaatgggtaactccgaaataatggctattccgcatggcttttacttgtcttgaattttcttttaagataatactaaagctagcctcgcaactcttcactgaaattcaaaagtaaaatctataacgcgggcatatatcctaccatcagtattctattccgcgacacactattccaggcctgatgcaaggccatccatggcagtgcttcttgtcggccatattcccagaaatctcttcagtctgtaccgagtggattagcgttatcttaagcgttgttttacacttcggcaatcgatttttctgcgattatatttaagctcttttttctcttagtaacaaagaaaatactactaagttatcaattatcagaaggaatcaaaacattatttagactttataaataattagcacaattagcactaataagaagacttattttaggttcttattattaaggttctttgaaggttttcattcaaatacgataacccacgaaacgatacagaatcggtataaaatatcgaaatatacaaaaataccagatttgtattttaatcgaaaacttaaaagtctttagaccacatgtgaactcagtttgtttatttttatattcaatcaaaagatataatataaatatgctagcggtgaaccagacgaagaacaccctactcgatggagcctccattgaggaagagccgtacacaactccgcaggaaagcgaggatttctttgagagtctagacaaaccgtcgagggagccaacacaactggcacccagaaacacctgttagaagtgcacatccttatttgtatttcaatttctcatacctcttgtgacttacagtcatccgcgccggtgtgttgaccacagtgagaggttccgcctacatggagtatggtaacaccaaggttctggccattgtggccccgccaaaggagctaatccgcgccagcgcacgcagaatgaacatgggtgttctgaattgctatgtgaattttgcggccttcagcacaggggatctagattcggtgccggaacgggaacgccacctgagcagcatgctgaccaaggccatggagccggtggtgtgccgcacggagttccttaactttcagctggacatacgggtgcttattctcgacgatgacggctgcctgctcagcactgccatcaattgctgcggagtcgctttggtggagtgcggcatttccacttacgacttaattacggcctccacagcttgtatctatcgggatcacgtcttcctgaatcccagtgccaaggttgaggagctgctctggaagcatcgcaacagcagcaccgatagcacaaccagcccatcatccgcccaggagcacggcctgatcattaccgccagcatggatacctttgaacagatcgcccagtgccagcagtgcggatatctcagtccagccacctatgtaaagctgctggattacaccctggccattaacaagtccctgagagaactagtcaaaggcgtgctcacgaagcgggtgaaggagcagcacgaactagatctacgcgagaaagccgagaccgctctagaagatcagcgtttggaggaaataatcgagaagctaaagaagcaaggaccagaggagtttatacaatcgaacatccgggaggatccctatgtaaagaggcagtagttggttgagaataaatcatactaatataaatcccagatctatttgaacaacaaccaccacttaaaaaatgattactacaaatatttagagtccagataaaacttttattcgttatttttgcacttccaaagttccgaatagcttcgaaaataataacatcaaatgcgtagcgcgcttcaaaactttaattcagacttgtatctttccgaaagtgaatttgtagaactgtagtgtatctagcaattcttaaaatgccttttatctactgctgatccgtggaggcctcaagcacggctccggagtaggccagatcccagtagtgttcgacctggtgcttctgaaaaaactcacgggccattttttccattggaaagatcttaaacttgatctcgccaaagtgccgtcgctgactagtcccctcccagacgagtacgcatgagttcggcacgtcctggccgtcattgcccttggcgttgtcctcctcccacttaatgcgcgttagcatgagcctgcgatactttttctgctgcttgggcccaccctccacgacaaccacacagcaatcccggaacaacaccacgctgccggtcatctgcagctgcttggcattggtctccaccttgaatttcttgctctggttgtcctgcagatctcgtatgcgatagacgctgacatgtacaccgcagctggtgtcttccctcagcttgcgctgcttcttttcgctcttctgctcgctggtcagcttgcgcgcattgttggcatcttcgtgcgccttctgccgcttggccatctggtcgcgcacatgctgctccattttggtcggatcttgtacggcctccgagccaagcacacgcatcaggttggatatgcgcagtttcggctctggtggggccaccaaacccagtcggatcttctcctgctcctccttccaggcctcgcgacggttctggcgacgaagctttttgcgctctttctttgtgaggaaaaccggcagatacac

SEQ ID NO: 41705 - DNA, 981 bp, DROSOPHILA
atgctagcggtgaaccagacgaagaacaccctactcgatggagcctccattgaggaagagccgtacacaactccgcaggaaagcgaggatttctttgagagtctagacaaaccgtcgagggagccaacacaactggcacccagaaacaccttcatccgcgccggtgtgttgaccacagtgagaggttccgcctacatggagtatggtaacaccaaggttctggccattgtggccccgccaaaggagctaatccgcgccagcgcacgcagaatgaacatgggtgttctgaattgctatgtgaattttgcggccttcagcacaggggatctagattcggtgccggaacgggaacgccacctgagcagcatgctgaccaaggccatggagccggtggtgtgccgcacggagttccttaactttcagctggacatacgggtgcttattctcgacgatgacggctgcctgctcagcactgccatcaattgctgcggagtcgctttggtggagtgcggcatttccacttacgacttaattacggcctccacagcttgtatctatcgggatcacgtcttcctgaatcccagtgccaaggttgaggagctgctctggaagcatcgcaacagcagcaccgatagcacaaccagcccatcatccgcccaggagcacggcctgatcattaccgccagcatggatacctttgaacagatcgcccagtgccagcagtgcggatatctcagtccagccacctatgtaaagctgctggattacaccctggccattaacaagtccctgagagaactagtcaaaggcgtgctcacgaagcgggtgaaggagcagcacgaactagatctacgcgagaaagccgagaccgctctagaagatcagcgtttggaggaaataatcgagaagctaaagaagcaaggaccagaggagtttatacaatcgaacatccgggaggatccctatgtaaagaggcagtag

SEQ ID NO: 41706 - protein, 326 aa, DROSOPHILA
MLAVNQTKNTLLDGASIEEEPYTTPQESEDFFESLDKPSREPTQLAPRNTFIRAGVLTTVRGSAYMEYGNTKVLAIVAPPKELIRASARRMNMGVLNCYVNFAAFSTGDLDSVPERERHLSSMLTKAMEPVVCRTEFLNFQLDIRVLILDDDGCLLSTAINCCGVALVECGISTYDLITASTACIYRDHVFLNPSAKVEELLWKHRNSSTDSTTSPSSAQEHGLIITASMDTFEQIAQCQQCGYLSPATYVKLLDYTLAINKSLRELVKGVLTKRVKEQHELDLREKAETALEDQRLEEIIEKLKKQGPEEFIQSNIREDPYVKRQ

SEQ ID NO: 41707 - DNA, 8149 bp, DROSOPHILA
caacacgtatacgcttgcacagtatagcaacaatcaactcacaagtaggccaaacaaagccataaacgtgattttatattaaaattggtcacaattttgcagcaacaagaagtcaacgtccaacaatttaaagctcatatctcgattgaccgataagtctagaccaccaaatcgataatacgcatttaccaacactgctgtggcaagagagcagagcgagtgagcgggcaaaacagctgattgcgactggcacacggttgttgttgcagtcgtgctgtttttctttctgttttgttggaactttatcgctgcagcgataaagagagcggagcgcgagagggagagcagcacaaactactacgtgtgacgtggtgtgggggcatacaggtggcaaaacagctgtttcaacagcaaaaccaatctgttttttattagaatacataatcaattgtaagtacgcccgttgcctgtttgcttcttaatccgccactaagctgaactattattcttatagtaccgcctgcagatttccagctaaaaaacaaactcacatacaaccaaaaagtaagcttagtctatctaattttttttttaatttgctaagacgtgcccagatcccaaaaagctcacacgcgtaaaaagagaggcaaaattaagagattgacgagtgccaagtgcgcacattaaaatattgcaaacttgttttcatttctgccttgctttgcttgactggcaaaaacaaaaacaacgaattatacggcaagtgatacaaggcacgtacataccaaaagaagcgaggagccagagagcgagagtggacaggctaagagcagcgaagtgatctgccactcgctacttccgttctctcacttgtaataaacgagtgcaaagagagcagtggcagcagcagtagcaacaacaacagcaatcgacgggcaaccacttgaaagcaactcgtttcgatttcatttagcagataccttttgtacgttgattaagataccttggcacacacagacgcactacaaaagaagagaaggcagctaaaaactgcacttaaaaaacacataaaataataagaagtcaactcgattaattcagaacagttctccaaatgaatgtacaacaaaatccacttgaccaaaaatgtcttgagtaaaagtgtcgcatacgcgtaaagcgtacgtataatatagaaatagatatatgtattcgtgtgtgtccgccagccaatacaaaagcagcacaaaaagtggttaaaaggcattaaaatcaaacaatatttaaagtgctgaaaattagtgtgcgtgtgcaaagaaagatttaagtgtacaagcatacctgcgtctgtgcacactgcgatacgccaaatcgtacttatgtatctatgcgcaactaaaaaatataataagcagagtcagtgccaataaaatatataaaaatcaccgtacaaacacagatgatttttagcgaaaaagcgaaaaggaaaaagatcaagcagcagcaacaacaaaaataacaacaacagcaagagtcgcagagaagccaatcaaaccagcagttgtctcgcttcaacgcgctcgttacgatcaccgtatgagcaagtgagagagcgtaaggccagtcacggacgtgtgcgagcggagcggagcattgatttgctgtctttgattttgcttatgacctgaggtgctctcttacatacatataaacgccatcatccaggcagacagtaggcgagtgtaagcgagagagaaagagcatgcgacacacatacgcacacacattgacacctggcgcaggagtcgcggcttgcggcactttcaaataaattaaaaaatagcaacaaaaccaacagggagagaggcgaatagagcagtaagccttcccccagcttcctcgctcagtagtaacattagtaagagcaacaaaaacagggacaagagagcaaaaatacatgcctaccttaacccaattaaaataccatattatttaacaaaagaaattgtgttatttgcaagcaacccatacaaagagagcgatcgagcgagcaaaagagagagagagagagtatttgactttttgaaagtgtaaaatttaaaaattgttgcctttgccatacggaagtgaaattcttacattcgtcaaaaaaaaaaaaaaacatcatataagcatagcttgaaaagtcattgagataagttagcctgcatagcttggatttgtcagttcataaaagagcgcagtggaagtgtgtcacgtcttagcaacaacttaaatatccaatacgattacaacatactaaaatcaaataatatttgcacagaaccaacaatatctacaaaaaacaaacgttagcatccaagagagagaaacttccagtggcaagttgtctacttccacaacgagtgcttcccgtacttcccgtcctttccacgagatcaaccaagccggcggccaccttccacacaacaataactagcacagcccagccccttccacaatttccaagctggcccaaacaacacaaccaagtgcaactttccaaactacaacaactactactgatccgatccatcacaatccgtttcataaattttccggaaacaatcgagtggctatctaattgctatctaattagcggctagttgcgcgcacgttatgaccaattcgattgcgtcaacgaaatgcctgcccaatgcactatcgaccggcaattatggaatgtcccagagccaccgttacaccgatgatagcaaggagtacatcatcgtcaagcttaccgattctgccttccgtgcgatcgaggaatatcagcgcgatgacaacgctaaacgcctgcaaccaggccaaagggccaaaatccaatttgtgggcaacacgggtgtcatacagttcccgcgaccagcgacggatgctaatggcatccctaatgctaatggcaatggcagcgacgcgactggagcaggaggaggaggtggtagaaaatttggcttcactatcaacaatatggagggaacgcttgaatgcgttcagcagcagcaacggagcctcggagtcctcggagcggtcaccctgcgaatgcggattcatgccaatgaagatgtctacgattcgacacgcacaaaaatggccattgccgaggagacggagaagagcaagtgcatcagggaaatcaagccgaatcagtcggatatcgggcgtaaggtgaagaagccgccatcagcaatccaatcttctgcctcaaccgcctcagccttctcctccaactcctctaactccggtttgacgacgacggcatttcatcatcacagcaacagcaacaacagtgggaacaacaacaacaggagcagcagcagcagcaatagttttaatagcaacaaccatagtcgtaagttaggttcatcgccatttaatggcctaggcgtaggatccagcagctcctccagcgcgtttgcctcgcgctcgcccaatcccagcacgctgggcgctatcggcacagtcaatggctctggcgttgttggtggtcgctatggtggcggtgcagcctcctcgctagcttccacattcgccaacggcatctcacagggctaccacaacctgagcggcagctcgccaagagactcgatgacagcgggaacatcaagtgcgactgcctcatcagtcatctcctcacgcaacaagatgccaagcggaggccttacctcctccaactccaactcctcatcgtcctccaggagtgccaatagcaagtcttcgggcggcaacaagatgtccgatgtgtccaggcgcaatatacgcgaacggcttatccatctgctggccctcaaggccttcaagaagcctgagctctttgcgcgcctgaagaacgaaggcattcgggatcgggagcgtaaccagatcaccaacatactcatggacattagcaccatgtcgcacaacacgtacaatctgcgtcgccagatgtggaacgatgtggacgagaactggccctttttcagcgaacaggaggttcagcagctgaagcgacgcaagcctcaaaatctgacaccgccaatgagttcggacgcgggcagttcgacgtccggccagagtccaacatcgacgcacacgggcagtccgccgccgccttcaagtaatggtggtcccggtggagttggaagtggagcaggcggtacgagcatgaagcggaccagcctcgagtacgacgagaccatgttcagcactgttcagcccaagaagcagcgcatcagtcactacaagaaggacactccgccctcgggaacgtcgtactcttccgctggggtatcgatgtcactgggttcatctggatcatccagtcggagtcggtatacgccgccgcaacgccagcctggtccattggatgatcacagcacaactgaccttagctacaatgtgctggacaacatagtagagtttatgagctccacggcagcggcgacgcagcaatcgatggaacagcagcagcatccgagaagcaacagtagtaataacagacgtggaagctcctcgttggcgggcaccagcaatgggggcaacaacaaggataagcggaactctacgggcagcaattcaagcagctccagtggctatgagacgcaacaggatcgccagcgttcaacaacgccgatgtcgtcaaaccgcagcagcgcatcctcttcaacgacgccgccgaagcttgcggccagttttgtgcccgcggccacctctggatccgcttccggtaccagcaaacaacgtatgccgccccagcaaagcgactacaactcgtacaacagcaataacgctcaacatgtggcgtccaacagcaaaaaaaggatgggtagtgttggtcctagtggtggatcgaatggccagcgtcaaagaagtgccagtggctctaattctggctatcaacaggtgccgccaccctcgtccaactcgcggtcgtctatccagcagcagaatcagcaccagaagcagcaggtgcaacagaagcaggcgccgtcgcagcagcagcagcagcagcaacagcaataccatcagcaagccaagcatccatcgccatcgcagcagttggctgctgctgcccatgcctatgcccatgccaccgcggatacggactcatccgccacgccgcgctacgacttcagccaatacgtgcccatccagaccctggaggtgcggcgccgttacaagactgagttcgaaagcgactacgatgagtaccgcaagctgctgacgcgcgtcgaggatgtgcgcaatcgtttccaggacttatccgaacgtctggagagcgccaggcgctgtgacaacggatacggggactacgatcacatcaagcggcagattgtgtgcgaatacgagcggatcaataacgatcgcaccattggagaggacaaggagcgttttgattacctgcacgccaagctggcgcacatcaagcagctggtgatggactatgacaagactttgatgagtgccacgatggcgatggcgcccacggacgtcgttgctgctcaagggcccgatccagctgtggctaaggcggcggccaggttagccgaacatcatcgtcggcaacatcacgccgcagagacgataaaacaacagcagcagcaaaagcagacacatcagcatcatttgcagcgtcatttgcagcatcatttgcagcagcaacaaaatctactgcagcagcaacaaaatctactgcagcagcagagtgtgagtaattcggatgacagttcggatagctcggattccaatgatgacgacgacgacgacgatgaggactgcgatgattccaactctaataccgatgacgatgaggcacgctactgatcctgatcctgatcctgctgggactacttcgatgagaccatccgcagattcccatgtaaaaaggcaaaacaagcaagaaactaatatacataaatacaacactattgtagtaaaaacgcaaaacaaaagaaaaaaacaaaaaaaaatacaacaaacaaacaaatcatcaaaacggcgaaaacaccaacaaaaacgttctataagaaattgtactgcaagcaaacaaaaaaccctcaaaacaaaaaaatgttgaaattatgttaacaaaacaaaaactaaaaaaaaaatacacactttcgagtaaaataatttttattataataaaaacgaggggtgggcggcggtccagaactgctgtcaccgaattctacacatataaaattcatatatggactatatatatacataacaacaaaaagccagaagacgacgacgatatgatgaggaggaaacaaaatcaatatttttaaaagcaacggcgaaagcaaaaaaattatacgagttgtagacttaattttttgttgagcatattgagcagcttaagtaactaaatgaaaacgaaaacagatgttttaccttgcgttttgtgtgtaataaatattattattatattattattatcaacatttaaatatagcatgtatgtttttcgtttttaatctagactcttcttatttttattcttgattttgtttaacatttgttacaaacggcaaacactcacacctcacctcaccggatatcacacacatgacacacacacacaacactgaaaaaaggactacactcatcaacaaaactcttctgcattttcgggcatagcttttgttttagatttgtgtttacaaatggagagattgagagagatatagcgagcaagcgagtggggggccagcacaaagtgtcctcgctgctgccgactgcacgtgcccgatgtcctgcatccaggacactcatacacatacatattacatatgtgtgtggtgggtgggactggggattgggtgcgagtagagttaactgatattgagccaatgtttgcctaggcctacgatgaccacaactgaataccgtgaccaaacgacgaacacaccgacacactgagagaaaaaggaggggagctccacagaaactgcaattgataaggggggggggggtggttggagaggggagagagtgaataaattgagcctgttattcacattttagtttggcaaggcattttaaggatacaattaacttatgattggtaccaactagggattggttaggaacttaagattaaaacaatgtaacaacaagcaaaacttaattcaagtggtttgtaaacgatggagctgatccttaaacgattttctatgcttgtacttcggtatagttgccgttgcatcgtttacagccagcttaatgttaccaatccccattgaatatgcgagaacgtgtatgaaaacatttccctttggtgggtgttgcatgcgggcgtgcctctaaacaatagactgaacttttaaacggcttgtgtagagaaaattcttgtgttttatcgataactagttaatttgttatatatttttgtgttttaaaatgcacagggtttcgtttcgcgtttcttttttggccaacagcagcggcagtacctttccaaacgttaaactatcgaaatctgaagtaatagggacattttccgaactgagacgaagacgacgggggagactttaattatatacatacatatacatattatttgcggctttggactagttattgctcaaaaactatgagaggactaatagaaatgatatacttaatggttgtatcacagctatggcgatcccttaagttgtttgcttttagttttaggacaactttaagcgtgttacgaaagcttccttaagtaaaataataataatatcgaactaaataaaactgagcggagagataaataaagtcgcttgataattatcaaattatttgctgaaactctagtgtccaaaatgataaagatatgtgaagaatatgaaacgaaagaaatgcaaaactaaacaaagaactaacacgaaattgaaaaaaaaaaccatgaaattttagctatttcgttgcaatattttttatatacgatatttaagtagtagggatgaaaaacagacggaagggaaaatcaaatgaaacattgagatcaagttgcaaaaatcaagcgtttaaaatcgattcgtagcaattacaacagaaaacaaaatcatatatacaatttatatacaagaaacaaacaaaaaaaaacactaaatatatacaaaaaaatatatatatatat

SEQ ID NO: 41708 - DNA, 4311 bp, DROSOPHILA
taccttggcacacacagacgcactacaaaagaagagaaggcagctaaaaactgcacttaaaaaacacataaaataataagaagtcaactcgattaattcagaacagttctccaaatgaatgtacaacaaaatccacttgaccaaaaatgtcttgagtaaaagtgtcgcatacgcgtaaagcgtacgtataatatagaaatagatatatgtattcgtgtgtgtccgccagccaatacaaaagcagcacaaaaagtggttaaaaggcattaaaatcaaacaatatttaaagtgctgaaaattagtgtgcgtgtgcaaagaaagatttaagtgtacaagcatacctgcgtctgtgcacactgcgatacgccaaatcgtacttatgtatctatgcgcaactaaaaaatataataagcagagtcagtgccaataaaatatataaaaatcaccgtacaaacacagatgatttttagcgaaaaagcgaaaaggaaaaagatcaagcagcagcaacaaatgaccaattcgattgcgtcaacgaaatgcctgcccaatgcactatcgaccggcaattatggaatgtcccagagccaccgttacaccgatgatagcaaggagtacatcatcgtcaagcttaccgattctgccttccgtgcgatcgaggaatatcagcgcgatgacaacgctaaacgcctgcaaccaggccaaagggccaaaatccaatttgtgggcaacacgggtgtcatacagttcccgcgaccagcgacggatgctaatggcatccctaatgctaatggcaatggcagcgacgcgactggagcaggaggaggaggtggtagaaaatttggcttcactatcaacaatatggagggaacgcttgaatgcgttcagcagcagcaacggagcctcggagtcctcggagcggtcaccctgcgaatgcggattcatgccaatgaagatgtctacgattcgacacgcacaaaaatggccattgccgaggagacggagaagagcaagtgcatcagggaaatcaagccgaatcagtcggatatcgggcgtaaggtgaagaagccgccatcagcaatccaatcttctgcctcaaccgcctcagccttctcctccaactcctctaactccggtttgacgacgacggcatttcatcatcacagcaacagcaacaacagtgggaacaacaacaacaggagcagcagcagcagcaatagttttaatagcaacaaccatagtcgtaagttaggttcatcgccatttaatggcctaggcgtaggatccagcagctcctccagcgcgtttgcctcgcgctcgcccaatcccagcacgctgggcgctatcggcacagtcaatggctctggcgttgttggtggtcgctatggtggcggtgcagcctcctcgctagcttccacattcgccaacggcatctcacagggctaccacaacctgagcggcagctcgccaagagactcgatgacagcgggaacatcaagtgcgactgcctcatcagtcatctcctcacgcaacaagatgccaagcggaggccttacctcctccaactccaactcctcatcgtcctccaggagtgccaatagcaagtcttcgggcggcaacaagatgtccgatgtgtccaggcgcaatatacgcgaacggcttatccatctgctggccctcaaggccttcaagaagcctgagctctttgcgcgcctgaagaacgaaggcattcgggatcgggagcgtaaccagatcaccaacatactcatggacattagcaccatgtcgcacaacacgtacaatctgcgtcgccagatgtggaacgatgtggacgagaactggccctttttcagcgaacaggaggttcagcagctgaagcgacgcaagcctcaaaatctgacaccgccaatgagttcggacgcgggcagttcgacgtccggccagagtccaacatcgacgcacacgggcagtccgccgccgccttcaagtaatggtggtcccggtggagttggaagtggagcaggcggtacgagcatgaagcggaccagcctcgagtacgacgagaccatgttcagcactgttcagcccaagaagcagcgcatcagtcactacaagaaggacactccgccctcgggaacgtcgtactcttccgctggggtatcgatgtcactgggttcatctggatcatccagtcggagtcggtatacgccgccgcaacgccagcctggtccattggatgatcacagcacaactgaccttagctacaatgtgctggacaacatagtagagtttatgagctccacggcagcggcgacgcagcaatcgatggaacagcagcagcatccgagaagcaacagtagtaataacagacgtggaagctcctcgttggcgggcaccagcaatgggggcaacaacaaggataagcggaactctacgggcagcaattcaagcagctccagtggctatgagacgcaacaggatcgccagcgttcaacaacgccgatgtcgtcaaaccgcagcagcgcatcctcttcaacgacgccgccgaagcttgcggccagttttgtgcccgcggccacctctggatccgcttccggtaccagcaaacaacgtatgccgccccagcaaagcgactacaactcgtacaacagcaataacgctcaacatgtggcgtccaacagcaaaaaaaggatgggtagtgttggtcctagtggtggatcgaatggccagcgtcaaagaagtgccagtggctctaattctggctatcaacaggtgccgccaccctcgtccaactcgcggtcgtctatccagcagcagaatcagcaccagaagcagcaggtgcaacagaagcaggcgccgtcgcagcagcagcagcagcagcaacagcaataccatcagcaagccaagcatccatcgccatcgcagcagttggctgctgctgcccatgcctatgcccatgccaccgcggatacggactcatccgccacgccgcgctacgacttcagccaatacgtgcccatccagaccctggaggtgcggcgccgttacaagactgagttcgaaagcgactacgatgagtaccgcaagctgctgacgcgcgtcgaggatgtgcgcaatcgtttccaggacttatccgaacgtctggagagcgccaggcgctgtgacaacggatacggggactacgatcacatcaagcggcagattgtgtgcgaatacgagcggatcaataacgatcgcaccattggagaggacaaggagcgttttgattacctgcacgccaagctggcgcacatcaagcagctggtgatggactatgacaagactttgatgagtgccacgatggcgatggcgcccacggacgtcgttgctgctcaagggcccgatccagctgtggctaaggcggcggccaggttagccgaacatcatcgtcggcaacatcacgccgcagagacgataaaacaacagcagcagcaaaagcagacacatcagcatcatttgcagcgtcatttgcagcatcatttgcagcagcaacaaaatctactgcagcagcaacaaaatctactgcagcagcagagtgtgagtaattcggatgacagttcggatagctcggattccaatgatgacgacgacgacgacgatgaggactgcgatgattccaactctaataccgatgacgatgaggcacgctactgaagcctgttattcacattttagtttggcaaggcattttaaggatacaattaacttatgattggtaccaactagggattggttaggaacttaagattaaaacaatgtaacaacaagcaaaacttaattcaagtggtttgtaaacgatggagctgatccttaaacgattttctatgcttgtacttcggtatagttgccgttgcatcgtttacagccagcttaatgttaccaatccccattgaatatgcgagaacgtgtatgaaaacatttccctttggtgggtgttgcatgcgggcgtgcctctaaacaatagactgaacttttaaacggcttgtgtagagaaaattcttgtgttttatcgataactagttaatttgttatatatttttgtgttttaaaatgcacagggtttcgtttcgcgtttcttttttggccaacagcagcggcagtacctttccaaacgttaaactatcgaaatctgaagtaatagggacattttccgaactgagacgaagacgacgggggagactttaattatatacatacatatacatattatttgcggctttggactagttattgctcaaaaactatgagaggactaatagaaatgatatacttaat

SEQ ID NO: 41709 - protein, 1059 aa, DROSOPHILA
MTNSIASTKCLPNALSTGNYGMSQSHRYTDDSKEYIIVKLTDSAFRAIEEYQRDDNAKRLQPGQRAKIQFVGNTGVIQFPRPATDANGIPNANGNGSDATGAGGGGGRKFGFTINNMEGTLECVQQQQRSLGVLGAVTLRMRIHANEDVYDSTRTKMAIAEETEKSKCIREIKPNQSDIGRKVKKPPSAIQSSASTASAFSSNSSNSGLTTTAFHHHSNSNNSGNNNNRSSSSSNSFNSNNHSRKLGSSPFNGLGVGSSSSSSAFASRSPNPSTLGAIGTVNGSGVVGGRYGGGAASSLASTFANGISQGYHNLSGSSPRDSMTAGTSSATASSVISSRNKMPSGGLTSSNSNSSSSSRSANSKSSGGNKMSDVSRRNIRERLIHLLALKAFKKPELFARLKNEGIRDRERNQITNILMDISTMSHNTYNLRRQMWNDVDENWPFFSEQEVQQLKRRKPQNLTPPMSSDAGSSTSGQSPTSTHTGSPPPPSSNGGPGGVGSGAGGTSMKRTSLEYDETMFSTVQPKKQRISHYKKDTPPSGTSYSSAGVSMSLGSSGSSSRSRYTPPQRQPGPLDDHSTTDLSYNVLDNIVEFMSSTAAATQQSMEQQQHPRSNSSNNRRGSSSLAGTSNGGNNKDKRNSTGSNSSSSSGYETQQDRQRSTTPMSSNRSSASSSTTPPKLAASFVPAATSGSASGTSKQRMPPQQSDYNSYNSNNAQHVASNSKKRMGSVGPSGGSNGQRQRSASGSNSGYQQVPPPSSNSRSSIQQQNQHQKQQVQQKQAPSQQQQQQQQQYHQQAKHPSPSQQLAAAAHAYAHATADTDSSATPRYDFSQYVPIQTLEVRRRYKTEFESDYDEYRKLLTRVEDVRNRFQDLSERLESARRCDNGYGDYDHIKRQIVCEYERINNDRTIGEDKERFDYLHAKLAHIKQLVMDYDKTLMSATMAMAPTDVVAAQGPDPAVAKAAARLAEHHRRQHHAAETIKQQQQQKQTHQHHLQRHLQHHLQQQQNLLQQQQNLLQQQSVSNSDDSSDSSDSNDDDDDDDEDCDDSNSNTDDDEARY

SEQ ID NO: 41710 - DNA, 3692 bp, DROSOPHILA
ttatactcactgggaaactccagcattccggtgtcgacgaaccagagacgcccacagacatccactgaggttctatagacagacactaggttctgctcgctcgcattatactgattcaccgccaagttgggataggcccgtagatggggactctgactccacccatccttggccagatcgatgtagtttaaggtggacggaatgcccggctgtcgccgtggcacggtgacaaagaggcgtcctcgaaagtgggttactccttggggcacgttgttgtattggatgaaggatcctgaggatgaggagcctaagcacttgcgggagttgtagaaatgcgaatctttgtcgaacgaataattgtgatatatatacatattattcgttataaaagtgacgataaaatggtgattaaaataatattcatattacaaccatttcataatgttttgtggaaaaacttagtgattcaccgacatttgctgatgtttgaaattgaacatatttcaattggatatttttggagttacctggaatgcagatcctgttccacaaatccttatagccatcgccgcgattgtaaaagtccaactgcttccacttgaagacctcaatcatgggatctccatctgcagagattagcaattggaaccctgagattgcgcacaggagcagaacgtccagcgataacattttataaaattccggtcgttcgcctttcctggctgaaaacccacttgtgactgactgactcctcagcttgggttcaactgagttaaacgtgctctgcgactcaaaaatgagctcagaatgtaaagtgataagagcagtcactgggattcccaagctcttattttccatgtctctttattcaacttttaagatttgttgataatctgaagagtatatttgtaaagctaactatttattcgaaaatttcgtcattcttacttatgtatgtatttttaattaagtaacaaattcaacaggaattccacacgaatcactcacaaactgtgcccctcttggccagtgaagccttctgcttccaaatccggaaattgtatatactcgtgtccagtgtggagtagatgaagatgggcatggagttggacatgacccaaatggtgccatcctcgtcaatctgcaatagtaagatgagatgtataactttttttcttcaacttttttatccaaaaccatttgcttaccgacaagtcgctgggataaatcatatcctcggcattggaatccacagagccatagttttccgccgagatgggcttgctggtcttccagcagcccactccgttgcgctggatctcatcgaagaagatcaccccagtcccaggatcgtaagcgtgcatcgtagactgggtggacggaccacggcttccgagtacccggaaatcgttcccatgatcggaacgtgcggcgttggattcctgctgcagaacccggttggagaccacaaactcattcgtactggccatgggatggaagtaggcatcgcggctcccatccagtttctgggcccccaaagttattgagaagatgccatcgtcccagcggaaggtctggccgccaatgctgagatccccggacagcggatcgaagttgaagtagttgtgctcgaaggaccagattctatcgtttcgcaggtgatagacgtacaggcgccggtacaccagatccggaatataggcgtaggcatcgccacactgacccgccttcacatccacggtgatgctggccaatccgcgacccgtctcagctatactctccggaacatcgaagcgcttcagcacctgatccgtggccaagtcaactacccaaatgctgggacggcggatctgttggcggttatctggatatgagaatcatgattgagttttttatattcttggtcaccaaattagattaatacggatcgatcctgatcttttatattacatgtcaatacatgccaactcacttggatactccagcattcccgtgtcgataaaccagagacgctggcatgcatccacggaggttctgtagacggacaccagattctccgcactcgcgttgaactgattaagcgcaaagttgggataggcccgcagcttggggctgcgattcgatccgtcctcggccagatcgatgtaattcaaggtggatgggatgcccacccgtcgacgaggcatcgtgacaaagaggcggccgcggaagtgagtggctcccatgggcacgttattgtacggaatgtaggaggcgttggggtcgtcgctgtcggcgcgggagctgaccactaccggtgtatcgcgggaggtcataatcttacgctttcgacgagaatactttccaggaaagacaaccggagctagttgaacaataaaaaaatagtacataagtaaataccaataaatctatctaacaaggctcgcgagattgctattgctgaatgagaactagtaatatcatattatgagtactaacctgaaaagctgggcctgtctttccttccgcccgagcttagatggccatctccgcgattgtaaaagtccatctgcttccatcggaagacctctatcatgggatcagcatctgccaaggaaagcagctgtaaccctgagattaaacttagaatcaaaaattggggcgataacattgctcggttttcctggggaactataatctaagttcgccttgccaagttgaggcctcaatagcgactgaaagccaatttgttcccaattggaatctattctcacagcggttcgaacgcaaattattaaaattgataagaaaagcgcgactctcacaagttctcaaaccggttttgtgacttgttagcctgataataatcgttagtaaaaatctaattatttacatacaaatggaattataaacagctttcagcttttctttctttttatgttgtatacatatataaatcaatcacaaaaacatgagaagaacatttagttgtaagaaacgttacgctattcgtttatgaaagcattgctgttctagcaatatattctctagcaattaataataattaacccaaaaatataaatttaatgcataatttctaaacttagaaaactaaagcaacaaatttcgcgccaaaagacttaacggcgatttattaaattaatcaaatcactaccaacaatcgataagaggtatcgatatacaaagctgttgtgtaaatcgtaatttatttagcgtaaacagtgtaaatagcaatatgcgctataatctgttagccagttcgttaaaattgctgaatagcacgaaaacccacaatttgttcttggtgaacgtgcgcagcttgaccggcgccgcccacaccaacgatgcagtggctccgaccacgcgcccaccggccgcagaatcgaggaatcccggagaggagcaacgatcactgcacatcgcggtaattggagtgcccaatgtgggaaagagcacgttcatcaacaacacggtgaaccaccgagtgtgtcccacctcggccaaggtgcacaccactcggcagtcgaacacggccatttacaccaccggccagacgcagttggtcttttacgatacgccgggcctggtcacgcaacatgagattcgtcggcaccacctggaccagaactttaagagtgcctaccgccatgccatacagcatgcggacatcatcgccgtggtgcacgatgcct

SEQ ID NO: 41711 - DNA, 1401 bp, DROSOPHILA
gcaaggcgaacttagattatagttccccaggaaaaccgagcaatgttatcgccccaatttttgattctaagtttaatctcagggttacagctgctttccttggcagatgctgatcccatgatagaggtcttccgatggaagcagatggacttttacaatcgcggagatggccatctaagctcgggcggaaggaaagacaggcccagcttttcagctccggttgtctttcctggaaagtattctcgtcgaaagcgtaagattatgacctcccgcgatacaccggtagtggtcagctcccgcgccgacagcgacgaccccaacgcctcctacattccgtacaataacgtgcccatgggagccactcacttccgcggccgcctctttgtcacgatgcctcgtcgacgggtgggcatcccatccaccttgaattacatcgatctggccgaggacggatcgaatcgcagccccaagctgcgggcctatcccaactttgcgcttaatcagttcaacgcgagtgcggagaatctggtgtccgtctacagaacctccgtggatgcatgccagcgtctctggtttatcgacacgggaatgctggagtatccaaataaccgccaacagatccgccgtcccagcatttgggtagttgacttggccacggatcaggtgctgaagcgcttcgatgttccggagagtatagctgagacgggtcgcggattggccagcatcaccgtggatgtgaaggcgggtcagtgtggcgatgcctacgcctatattccggatctggtgtaccggcgcctgtacgtctatcacctgcgaaacgatagaatctggtccttcgagcacaactacttcaacttcgatccgctgtccggggatctcagcattggcggccagaccttccgctgggacgatggcatcttctcaataactttgggggcccagaaactggatgggagccgcgatgcctacttccatcccatggccagtacgaatgagtttgtggtctccaaccgggttctgcagcaggaatccaacgccgcacgttccgatcatgggaacgatttccgggtactcggaagccgtggtccgtccacccagtctacgatgcacgcttacgatcctgggactggggtgatcttcttcgatgagatccagcgcaacggagtgggctgctggaagaccagcaagcccatctcggcggaaaactatggctctgtggattccaatgccgaggatatgatttatcccagcgacttgtcgattgacgaggatggcaccatttgggtcatgtccaactccatgcccatcttcatctactccacactggacacgagtatatacaatttccggatttggaagcagaaggcttcactggccaagaggggcacagtttgtgagtga

SEQ ID NO: 41712 - protein, 379 aa, DROSOPHILA
MTSRDTPVVVSSRADSDDPNASYIPYNNVPMGATHFRGRLFVTMPRRRVGIPSTLNYIDLAEDGSNRSPKLRAYPNFALNQFNASAENLVSVYRTSVDACQRLWFIDTGMLEYPNNRQQIRRPSIWVVDLATDQVLKRFDVPESIAETGRGLASITVDVKAGQCGDAYAYIPDLVYRRLYVYHLRNDRIWSFEHNYFNFDPLSGDLSIGGQTFRWDDGIFSITLGAQKLDGSRDAYFHPMASTNEFVVSNRVLQQESNAARSDHGNDFRVLGSRGPSTQSTMHAYDPGTGVIFFDEIQRNGVGCWKTSKPISAENYGSVDSNAEDMIYPSDLSIDEDGTIWVMSNSMPIFIYSTLDTSIYNFRIWKQKASLAKRGTVCE

SEQ ID NO: 41713 - DNA, 7303 bp, DROSOPHILA
ttaacatacatgaacatgatgatatattccaaacgaggagctatgaataaaacaacttttaacgcttgaaatgaattgtttctttttttttcttaatgaaatttgattgtgggctgtggggaagagatcatttagaaacttacggagtagtaaagcagatcctgcggaacccaatcccatgccaacccacataaataattcgcccagaactcctttgcaatggaattaaatacatttatatttgtatctagattatgtaatcacatagtagagaagttaataagaactattgtacttgtcgtatgtgaactgaccgcgagtcgtgctctgctgagatccgatccgccccaggagcagaaaccgaagcctggaaacaccgaactcgccattcgccaagtgtcaaacgttttgcattaattatttgtgtgaacgcgacgtgggtccattttttgtttcttgatatctggatttcattgcaaatgattatgataaatatatgttgtgggtgtgtgggtgtgcaggtgtgttaccgtgtagaaatttaaattcttagcttgagtaaagtatatttgcatggaatacgaatgctcttaacatagatattgaggagatgcctagacgccggaattattcgatagctggccgggcaccgagaactgtggccgaaagttggcaaagttgccagccggtccgctcgtgaatgctggcaatgttgtgccctggaatccagccgggaattgtgccatcaattgagctgcaacagaaataaaataacaattgaatatcaagctataggacagttcaagaggcaagactcacctgcattggaggcatttccggcggtggccgccagtcgggagagaatcgatctctcggacatctgaagccgttgcgcaacaggtgggatgcgagccagtgtagctggcagccgggacacatcgctcttcatgtccgagagcagctcttcgagctggttgagcaccttgtgcagaacagcgtttgcgggcttgttaccggccagcgattccttgctcagatgctgatgggattcagccaggcattcgacctctgcgaaacgggcgtttagcgacattgccgggtggctggggtcctgggcgaggttaaggtaggccgctcgccgcagctgctcctcgatgaccagcgcctgctccagcaacttaaaacgccgggccaggaacttgtttttgatttccagaaagttgcccttaccaacgtccatcttgaaaggttcgtttatgatcgcgaaacggatatcgttttgtatatcctgccaacggccatagccatgggtcacaattccggccaacagccagtagtcgtggcgacggtgccagatctcgtattctcgcccaggaacggcagccttctcctcgttgagccacaaagtgtgcagttcggtgaacccgccgtcggcgatgttgaacataaatttgcgctttagcacctccaagctgtcctccgctcccttgccagtggctccagttgcagcagacgtagcagcggcgactgccttttgatccttgggtgaactggcactgggcttttctagctcaccgtcctccttgacaatcatcacatcgtcatcgtcgtcgtcaattactgtcgtcggtggtattggtttcttgtcatccaccttttctttttccttctcttcggtcttgggctcctcctttacctccgggtccttggtctcttccttgggttctgttttagccacctcggttttgacctccgcgtcgctgggctttgtgtcgccggcagcttcttccacagggttctcctgcttgacatccccaggcttcttgtcctcttcagcctcttgttcttgcttcacctcgctcttctccgccgaggtcttatccttctccttttcggagtccttgtctttgtcttcacctttttcagaggctggcgctggactgggagccgcactggtggctggagtgacgctattgctagtagtagcgctcttgtcgacattgccaccggtaggcggagcttcaagtgccgccacatcctgtttcagggctgatcgtacgggctcgcacggcttgagaatgagctccggcatgctgtagtatccgttaatatgctcgaattcctgtaccttctttcgaattagcgacatcactccgatccgggtgagcacatgctggcgggatagtccttcgcgcggcacaccatcggcaaaggtttccgcattgtccgctcccggctcgcaaagatgccgcataaacagagaaacatacgccttaaaattgcgctccgatttaccacgcaaatcccggactagccattgcgagttgaaggcatcttgcggcggcattccgtaccgcataatggcattgaggaagctcttgcgttgacgggcattaaaaccgagcacctcgatgtttccacccacgcgggccaacagtggaggcaatggacgatcgtcgcgacgctccaatcgccgcttggcctttctctctgcgccattctggtcatcgaagtcatcgtcaccgccatcctcatcggagccagctgaatactcggagttatactcgctgccgttgtcctgccagttggaatcatcccgcgtggtatcagccgccacaacgccgccatccgtgtagttgacctgtttgcggacgcgcttgcccttgcccaggctgcgacccacatcttcctggtgctgttcatagtgatgccgcagcagcttcacccagtacgccggatcagagttctcggcatcctgtttaataatctccgtctcttcctcctcctcctcttctttagtggcgtacgaagccaccttaaacgaggacagatactcgttggcccaggactccttctcctcgataccgcggttggttctgtcgagcagctcggccaccgccttgtcgtcatagtggatagcttcctccttgtcatcctccttgaacagatcctcggtaccgaaacgaaggatatcgtccagttcttgctttgtaaagttagcgcctttaccgcccattcccggacggaccacaagatgagtcaacatcatcttacgcttggccacctgggtaacgcgctcctccacagaatttcgagtaacaaatcgatagatcatcaccttgttagcctggccaatacgatgggctcgggagaaggcctgaatatcgttgtggggattccaatcggagtcataaataatgacagtgtcggccgtggccaaattaatacccaatcctccggctcgagtactcagcaagaagacaaactgctgcgctccgggtgcattgaacctatcaatggcttcctgacgcaatgttcctgtgattccaccgtcaatacgttcgtacttgtactgctcgccctcgaggaagtcctcgagaatgtccaacatcttggtcatctgggagaaaatcaagacacgatggttttgtgccttcagctgcttcagcatcttggatagcaggaccagcttgccagcagccttggtcagcgagttaatctcgtagagaccaccggcagcggtggttgcctcctcggcggccgaggggaagagatacggatggttgcagcacttctttaggtccatcataatgttgatcagtgagcaagagccaccaccgctcttcgaattcaaagcctcgtagttcttggtcaagatgaacttgtagaactttttctgcatggccgacagctcgacgcgcacgataaactcagacttggacggcatgttcttcagcacatccgtcttcaaacgacgcagcatgtgcggtccaagcatctcgtgcagacgcttaacctgctcctccttcgaaacgtcagcgaattcgccctggaaggcctgcagatcattgaacttgtcgcggctcaagaagttgagcagatggaacagctcctcgagattgttctgcagcggtgtgccggtgagcagaagcttgtaggcaatagtgtagctgttcaggatacggaagaacttgctctggttgctcttcaagcgatgggcctcgtccaccacgagcacggcccagtcaatgctgccaaggcaagcagcgtccatggagatcagctcgtagctagtcagcagtacgttgaatttatactgggtggtccgcaaacgcgaaaccttgctaccacgaatggcgccctcctcgaagctcagctcgttctcccgtataaccgctctcgagtccttgtcaccgatatacgtgatgcagtaaaagtccggagcccacagctcaaactcacgctcccagttcactagcgtcgagagtggcacggccacgaggaagggtccgcggcaatggccctccttgtacaaagagtacaggaaggtgaccgtctgaatggtcttacccagacccatctcgtcggccaggatggtgtcgatgccctggccccagctgtagcgcaaccagttaatgccctcgatctggtagggatgcaattgcatgccagtgccctccaagaaagccggctgatcctcatacttcttcttcagatcagtagttggcttttccggcggcggtgtgtagtgcttgaccgggcgatcctcgtcgtcctcgaccttgagcttggacttgcgacccttcttgctctttttgctgcgcgactgagttgtctccgaggtgcaaaccgcacgcagatcctgatagtaatcgatggcttgccgcaggccctgtatgtcatcaccctcttcttcccaggtggacttgtcatagggcaactcgcgccacttcaccagatacatggtgctgccatctcttgccgtacgatggttgattacgcgctgaacaatgagccactctggcttgacgccattcttgtagaaccgctcctccagcacttcggcatcatcgtttgccttcatgccaaccttgtccttgtgtcgctgaatacgcttgtaacgagtgtccgcctcatccagcgactcctcgaacttgggcggttcttccatgtcgtacttgcgctggaacgaacgaatcatgagcggatgatggacgtccagttgcacttcgggcacccattcgcaatgccagtaggacatgttgtgccacttgataaagtactcgcgcacccgggagttactgttctttgatcccttcgaggtggagggaccgtcgtcattgctacgctgtgcccatcgccaggtgatgatcttctcagccttgccagtgagcggagggcagctgcaacgaggacagcgccaatcgccatcgggtatagtgtccagaggcggattcaagcagaatgtgtgataggcggagggacatgagtcgcagcacagcaactcgccaccgtccttgcacacgcggcagaattcctggtgctcatcatcgtcctcttcctcagcagcacctccgtcagcctcgcagtgcggacacgaccacttgccctctggcggttcatcgagttctggctccaggcacaccaagtgatatgcccgagggcaggtgtcgcacaggatgatctcacctccttgctggcacacctcgcagtagtcctggtgctcatgctcgccatcttcgccctccgggaagttcttcgttttcttgagtttattcttcttcttgaacttgttgccgatcttggtcttggccttcttgcgcaccactggagctcctgatccatcgtcctgggcagcgggtgctgagttgtccgccttagaggagacaggagcctccttttcatcggcactgtcatccgatttctgaagcatccgttcaaactcaagatccgaatcgcgttccgatgcaccgctagcatcttgctcctcatccgaactatcgcgtttgcgcttgccgagcagcttaatcttaagagtgggcaccttgccggagggacgacgccccttcttgccacgtccactgcgcttacgacgaggtttcttctcctcctcctcctcttcttcctcctcctcgacggcctcctcgtaaatgtcatccggtttctcgttgcgcgaggaacgcgatgatcgaggttcctccggctcatcgcctgtcacactgcgtgcctgtccggcggatccaccggagccggcggcaccaccctcctgctggatgtgcggattgctctcgcagaactcacgccacttggctgccaccagcatcactagctttggtgccgcaatcttggggttttccttctgcagaatcggacgaacatgatgcatgaaagccttgtaggtcgttaggctctgcagctcctcctcactgtactcgatctccacattgcagacgctaaaggctgagcacacgtcttccacagatggcattcctggcagtgggtgaaaaaatcagcataagtgaaccgtgaagttaatccctcttctaaagccaagactacttagctcaactctcataaaactcgtggtaactacactatttagaatcctagctcttaccggatgatgccgactccttctccttggcggcctgtttctcctccttgcgcttgcgaccgcgcttggaggtgctggggtactccacctcctcatcgtgctggacaaagtcgctgtcctcttcgctctcgttcttcttgcgcttcttcttcttgcgacccttctcttcgcccttcctggtcttgcgcttcttgcccttcttcttcctgcgactgtcctccggatcgtagtcgtcgtcttcgtcgttctgctgggaatttaagaggattacatccatataccatatgtatgacttataaaaccactcacattcggcttcagaggggcgtcggaatcgttggacagctccgccgcaggtgcgttgtcctcctgggcctcttcttcttctaaaggagccagagaggaataaggaagagttgcaattagttataccccaatatattgatcgctttggaaggcgacctggatttaccgtgagccatgttcaaggagcttcaatcgatgatcgggttggtggtcaatagatggaggaaacacaataattaaaataacgtactttcttcgattcaatattttatttgattctatttttttgctttttttgtcaattttttttttcatctttcttcttttgttgtttgtggtcttaataattactagtatataacaatatctctttttttgtaagatttttcattctgctggtcttgtcagcggttttgctcttaagatgtacaataataataataatatttttctcatgtctcttgatctgttttactcttcttctattcgcggcttacacaatcattaataagttcctttttcaattgctgtgttagttctccagtatgttggtgtgtttgttgtgtttggtgtgtgagttttgtgggcgtattcatgtatgag

SEQ ID NO: 41714 - DNA, 6025 bp, DROSOPHILA
atggctcacgaagaagaagaggcccaggaggacaacgcacctgcggcggagctgtccaacgattccgacgcccctctgaagccgaataacgacgaagacgacgactacgatccggaggacagtcgcaggaagaagaagggcaagaagcgcaagaccaggaagggcgaagagaagggtcgcaagaagaagaagcgcaagaagaacgagagcgaagaggacagcgactttgtccagcacgatgaggaggtggagtaccccagcacctccaagcgcggtcgcaagcgcaaggaggagaaacaggccgccaaggagaaggagtcggcatcatccggaatgccatctgtggaagacgtgtgctcagcctttagcgtctgcaatgtggagatcgagtacagtgaggaggagctgcagagcctaacgacctacaaggctttcatgcatcatgttcgtccgattctgcagaaggaaaaccccaagattgcggcaccaaagctagtgatgctggtggcagccaagtggcgtgagttctgcgagagcaatccgcacatccagcaggagggtggtgccgccggctccggtggatccgccggacaggcacgcagtgtgacaggcgatgagccggaggaacctcgatcatcgcgttcctcgcgcaacgagaaaccggatgacatttacgaggaggccgtcgaggaggaggaagaagaggaggaggaggagaagaaacctcgtcgtaagcgcagtggacgtggcaagaaggggcgtcgtccctccggcaaggtgcccactcttaagattaagctgctcggcaagcgcaaacgcgatagttcggatgaggagcaagatgctagcggtgcatcggaacgcgattcggatcttgagtttgaacggatgcttcagaaatcggatgacagtgccgatgaaaaggaggctcctgtctcctctaaggcggacaactcagcacccgctgcccaggacgatggatcaggagctccagtggtgcgcaagaaggccaagaccaagatcggcaacaagttcaagaagaagaataaactcaagaaaacgaagaacttcccggagggcgaagatggcgagcatgagcaccaggactactgcgaggtgtgccagcaaggaggtgagatcatcctgtgcgacacctgccctcgggcatatcacttggtgtgcctggagccagaactcgatgaaccgccagagggcaagtggtcgtgtccgcactgcgaggctgacggaggtgctgctgaggaagaggacgatgatgagcaccaggaattctgccgcgtgtgcaaggacggtggcgagttgctgtgctgcgactcatgtccctccgcctatcacacattctgcttgaatccgcctctggacactatacccgatggcgattggcgctgtcctcgttgcagctgccctccgctcactggcaaggctgagaagatcatcacctggcgatgggcacagcgtagcaatgacgacggtccctccacctcgaagggatcaaagaacagtaactcccgggtgcgcgagtactttatcaagtggcacaacatgtcctactggcattgcgaatgggtgcccgaagtgcaactggacgtccatcatccgctcatgattcgttcgttccagcgcaagtacgacatggaagaaccgcccaagttcgaggagtcgctggatgaggcggacactcgttacaagcgtattcagcgacacaaggacaaggttggcatgaaggcaaacgatgatgccgaagtgctggaggagcggttctacaagaatggcgtcaagccagagtggctcattgttcagcgcgtaatcaaccatcgtacggcaagagatggcagcaccatgtatctggtgaagtggcgcgagttgccctatgacaagtccacctgggaagaagagggtgatgacatacagggcctgcggcaagccatcgattactatcaggatctgcgtgcggtttgcacctcggagacaactcagtcgcgcagcaaaaagagcaagaagggtcgcaagtccaagctcaaggtcgaggacgacgaggatcgcccggtcaagcactacacaccgccgccggaaaagccaactactgatctgaagaagaagtatgaggatcagccggctttcttggagggcactggcatgcaattgcatccctaccagatcgagggcattaactggttgcgctacagctggggccagggcatcgacaccatcctggccgacgagatgggtctgggtaagaccattcagacggtcaccttcctgtactctttgtacaaggagggccattgccgcggacccttcctcgtggccgtgccactctcgacgctagtgaactgggagcgtgagtttgagctgtgggctccggacttttactgcatcacgtatatcggtgacaaggactcgagagcggttatacgggagaacgagctgagcttcgaggagggcgccattcgtggtagcaaggtttcgcgtttgcggaccacccagtataaattcaacgtactgctgactagctacgagctgatctccatggacgctgcttgccttggcagcattgactgggccgtgctcgtggtggacgaggcccatcgcttgaagagcaaccagagcaaaaaaagttctacaagttcatcttgaccaagaactacgaggctttgaattcgaagagcggtggtggctcttgctcactgatcaacattatgatggacctaaagaagtgctgcaaccatccgtatctcttcccctcggccgccgaggaggcaaccaccgctgccggtggtctctacgagattaactcgctgaccaaggctgctggcaagctggtcctgctatccaagatgctgaagcagctgaaggcacaaaaccatcgtgtcttgattttctcccagatgaccaagatgttggacattctcgaggacttcctcgagggcgagcagtacaagtacgaacgtattgacggtggaatcacaggaacattgcgtcaggaagccattgataggttcaatgcacccggagcgcagcagtttgtcttcttgctgagtactcgagccggaggattgggtattaatttggccacggccgacactgtcattatttatgactccgattggaatccccacaacgatattcaggccttctcccgagcccatcgtattggccaggctaacaaggtgatgatctatcgatttgttactcgaaattctgtggaggagcgcgttacccaggtggccaagcgtaagatgatgttgactcatcttgtggtccgtccgggaatgggcggtaaaggcgctaactttacaaagcaagaactggacgatatccttcgtttcggtaccgaggatctgttcaaggaggatgacaaggaggaagctatccactatgacgacaaggcggtggccgagctgctcgacagaaccaaccgcggtatcgaggagaaggagtcctgggccaacgagtatctgtcctcgtttaaggtggcttcgtacgccactaaagaagaggaggaggaggaagagacggagattattaaacaggatgccgagaactctgatccggcgtactgggtgaagctgctgcggcatcactatgaacagcaccaggaagatgtgggtcgcagcctgggcaagggcaagcgcgtccgcaaacaggtcaactacacggatggcggcgttgtggcggctgataccacgcgggatgattccaactggcaggacaacggcagcgagtataactccgagtattcagctggctccgatgaggatggcggtgacgatgacttcgatgaccagaatggcgcagagagaaaggccaagcggcgattggagcgtcgcgacgatcgtccattgcctccactgttggcccgcgtgggtggaaacatcgaggtgctcggttttaatgcccgtcaacgcaagagcttcctcaatgccattatgcggtacggaatgccgccgcaagatgccttcaactcgcaatggctagtccgggatttgcgtggtaaatcggagcgcaattttaaggcgtatgtttctctgtttatgcggcatctttgcgagccgggagcggacaatgcggaaacctttgccgatggtgtgccgcgcgaaggactatcccgccagcatgtgctcacccggatcggagtgatgtcgctaattcgaaagaaggtacaggaattcgagcatattaacggatactacagcatgccggagctcattctcaagccgtgcgagcccgtacgatcagccctgaaacaggatgtggcggcacttgaagctccgcctaccggtggcaatgtcgacaagagcgctactactagcaatagcgtcactccagccaccagtgcggctcccagtccagcgccagcctctgaaaaaggtgaagacaaagacaaggactccgaaaaggagaaggataagacctcggcggagaagagcgaggtgaagcaagaacaagaggctgaagaggacaagaagcctggggatgtcaagcaggagaaccctgtggaagaagctgccggcgacacaaagcccagcgacgcggaggtcaaaaccgaggtggctaaaacagaacccaaggaagagaccaaggacccggaggtaaaggaggagcccaagaccgaagagaaggaaaaagaaaaggtggatgacaagaaaccaataccaccgacgacagtaattgacgacgacgatgacgatgtgatgattgtcaaggaggacggtgagctagaaaagcccagtgccagttcacccaaggatcaaaaggcagtcgccgctgctacgtctgctgcaactggagccactggcaagggagcggaggacagcttggaggtgctaaagcgcaaatttatgttcaacatcgccgacggcgggttcaccgaactgcacactttgtggctcaacgaggagaaggctgccgttcctgggcgagaatacgagatctggcaccgtcgccacgactactggctgttggccggaattgtgacccatggctatggccgttggcaggatatacaaaacgatatccgtttcgcgatcataaacgaacctttcaagatggacgttggtaagggcaactttctggaaatcaaaaacaagttcctggcccggcgttttaagttgctggagcaggcgctggtcatcgaggagcagctgcggcgagcggcctaccttaacctcgcccaggaccccagccacccggcaatgtcgctaaacgcccgtttcgcagaggtcgaatgcctggctgaatcccatcagcatctgagcaaggaatcgctggccggtaacaagcccgcaaacgctgttctgcacaaggtgctcaaccagctcgaagagctgctctcggacatgaagagcgatgtgtcccggctgccagctacactggctcgcatcccacctgttgcgcaacggcttcagatgtccgagagatcgattctctcccgactggcggccaccgccggaaatgcctccaatgcagctcaattgatggcacaattcccggctggattccagggcacaacattgccagcattcacgagcggaccggctggcaactttgccaactttcggccacagttctcggtgcccggccagctatcgaataattccggcgtctaggcatctcctcaatatctatgttaagagcattcgtattccatgcaaatatactttactcaagctaagaatttaaatttctacacggtaacacacctgcacacccacacacccacaacatatatttatcataatcatttgcaatgaaatccagatatcaagaaacaaaaaatggacccacgtcgcgttcacacaaataattaatgcaaaacgtttgacacttggcgaatggcgagttcggtgtttccaggcttcggtttctgctcctggggcggatcggatctcagcagagcacgactcgcggtcagttcacatacgacaagtacaatagttcttattaacttctctactatgtgattacataatctagatacaaatataaatgtatttaattccattgc

SEQ ID NO: 41715 - protein, 884 aa, DROSOPHILA
MAHEEEEAQEDNAPAAELSNDSDAPLKPNNDEDDDYDPEDSRRKKKGKKRKTRKGEEKGRKKKKRKKNESEEDSDFVQHDEEVEYPSTSKRGRKRKEEKQAAKEKESASSGMPSVEDVCSAFSVCNVEIEYSEEELQSLTTYKAFMHHVRPILQKENPKIAAPKLVMLVAAKWREFCESNPHIQQEGGAAGSGGSAGQARSVTGDEPEEPRSSRSSRNEKPDDIYEEAVEEEEEEEEEEKKPRRKRSGRGKKGRRPSGKVPTLKIKLLGKRKRDSSDEEQDASGASERDSDLEFERMLQKSDDSADEKEAPVSSKADNSAPAAQDDGSGAPVVRKKAKTKIGNKFKKKNKLKKTKNFPEGEDGEHEHQDYCEVCQQGGEIILCDTCPRAYHLVCLEPELDEPPEGKWSCPHCEADGGAAEEEDDDEHQEFCRVCKDGGELLCCDSCPSAYHTFCLNPPLDTIPDGDWRCPRCSCPPLTGKAEKIITWRWAQRSNDDGPSTSKGSKNSNSRVREYFIKWHNMSYWHCEWVPEVQLDVHHPLMIRSFQRKYDMEEPPKFEESLDEADTRYKRIQRHKDKVGMKANDDAEVLEERFYKNGVKPEWLIVQRVINHRTARDGSTMYLVKWRELPYDKSTWEEEGDDIQGLRQAIDYYQDLRAVCTSETTQSRSKKSKKGRKSKLKVEDDEDRPVKHYTPPPEKPTTDLKKKYEDQPAFLEGTGMQLHPYQIEGINWLRYSWGQGIDTILADEMGLGKTIQTVTFLYSLYKEGHCRGPFLVAVPLSTLVNWEREFELWAPDFYCITYIGDKDSRAVIRENELSFEEGAIRGSKVSRLRTTQYKFNVLLTSYELISMDAACLGSIDWAVLVVDEAHRLKSNQSKKSSTSSS

SEQ ID NO: 41716 - DNA, 3578 bp, DROSOPHILA
cacatcctccaccacttcaaacacttcgcacccgtctaagcaacacatccttccttaaacgtttcttgcctgccaaatgttgccatcgcatgcactgaaaaaaaattagttatgcaaacaccataattcctttttttaagatttggattaaactgtaatgtttaagatattttccccaagggtaagcatagttcagtttcagtgttccgttttaaataactaaatttaagtaaatgaacttatttattatttagagttctgtcattcgagattttcagtatgagttcctttgatatgctaaagaacgcttaacatttaaataaaactagtttattttgcattgcaatttttcttagtgtatttgagattgtatagctctcggttttgctaggtttgagtgtggttttatgtatgcattgtattggcctggcataatagacacatttaattttactattatgcctttttgttgtcatcgcattcgtataataaaccgttttccttcgttttcaagtttgtgttttggggcggcaggattcccattccattttgtgttccattttgtcagtcatttatttgattttccacagaaaggatactaaaaatctgtgtgcttgtgtttgccaagaaaattatctgtgacgaagtaggaaagttaaatatatatattacctcttaatgaagtaatcgaacttcgatttatggaattggaataataaaatacatggtgatcaataactaattgattagcttttttagtatcatttcgtttattattataccaaaaattaaaatgtatattccttgagaaattcgaatttaaattaacatttaagacaaaatgaaattttcaggcccaccactttaattccgtttgtgtgcgtgctttgaaaacaatattgatatggaacccattcccccattgaaacgcatgtgtttcaactagcgagcattcaattaagaagtttaggcacttagcatacattatcgcataatagttttaggcctggttatgaaagattatcacatccttcagggttttggccaggaccgtgacagacgccccatcgaaatgcgactccaggccattccattcgctaagttctacgagtaattgcaatttgagtccgtctccagttcccctcggtaactgaagatgtggcgggaatcggttggaagtggtcacatctgttgatgcgtagtcggcctcataaagctcacttagagtgggtttggaaatggctgttgggaattggcgttcgaagtgatttaagcccctttttagggaacacttaaagctatccagatgtaaacgcagtctcaattgattcggtagacttaaatacatcctcgcctcaacgaccaggttctctggagcaactatatccaggccaatactaaatggatcatgattaagacgatgttgtcttgccacaagattacgacgcaggaattgtaaattattgcgatgtgacaaaagcagttgctggtcaattagattgatgagatccgtggtcatggtttcttcgaaggtcaccaggcgactaacttgaatatcaactatttttggggtctctctacctcctacatctggaaatatattctcattttcgtaactcttcagcaaatcatatatccgaaataagagcgagcggtagatgggatctctaagattggacgtagccgagcccaacatactaggttgatttattccctgtccattgacagccaggtttaattggcgacatatatgaaggtagttattacctattattccacccgctatagataaattatccatagcatggttattatgttttacagccatttcgattttatcctttaggccatctattgtcaagtctatgatacctctgacagcttcgatattcaaggatgttcctttgtagggtacaccaccggttgtcatcagcggcggatagataagttccgtagatttttgccctgttgccaaatcttccatagacaaagcagccacaaactgatgcagattgtataaatataatttcgtgttatgaaaatgagatcccaacgccaaatgttttttaaagttgacttcatcgaaggaaccacgaaatgctaccagccgatcgccatctataataataggttcattcgtcttttcctttccttcttcaatggaaataatcagacgagttatcagactgttccagtgtgagttcagttccaagtctaggctcagataagccacttttcgtgcattatcaatgatcagaggatcggttggaataggttcctcttccatccaaggttgcttggggtttcgatatcccaaaaggatatcaatccatcttcgtttcggtgtcaccaacctaatggggctcaattggttccaagtcacttcctgtgccgtcaggattacctccttttcgaaatacagctgaggcagcacctcatacatggctggcatccgaaggtctttggtgtcctccctttcctccactgccatttgaagggcgtttacaaatagcagaggatgaaagtgtatcctggcaaagcaagcatttcgctggaaggatgtccaatccacagccatggtcaaaaaacgatagattcccaacaaattcaggggcatttcctcatcgagctgatttaaaatgacaaacggacccggaactcgattctgatgcactcgctctcgaaaatcttttatatatctccaggtgccctgtgagagaaaattattactatatattttctatattgtatatactacaatatattatatcaatcaacaaataatattattttatttcttgaaacttacttccttatagctgtcaggatcatcgttaagttggctccccattgtaatgagttcctcgtgaagcaaaggtttgtggacttgaatgagcaaattcaggagaaaatactgacgatcttgcctttgattataattcacttctacatttgatgatccgaaatacttccaaggactgccaaaactttctgttctattttgaagaacgagaaaacaaaggcacacaaacgttaatcttaacattttgacgcagactgatcgatgacatgaactgacttctgcatatattcttaaatgcgattgttttgtttcatacccttactaagggagcattgatttccacgtaaactagtatataaatgcctgccacttttcttaaaaacttctatatattcccggtaataagaaaagatatcatagatccgtgcttttttatcataaagtcttctttttcgtataaatatagaattactgcaagggtatataagcttggaattgccacagctagcttgctctcttgttttcttttcatataaaacacactgaacttggttatcgctgcggttgattatgagcggttcttgggagaaagtgagcattatttgtggtgatcaaaattcttagttacagtaaaacaaattcgtttttattggttcaacaagaaacactatgaaataaatgtagcccaaagacccagaacaaaacattgtagatatacaaagatacatatgaactttgtaaaactaaagaatgagattgctaagtgcaagttaag

SEQ ID NO: 41717 - DNA, 1578 bp, DROSOPHILA
atggctgtggattggacatccttccagcgaaatgcttgctttgccaggatacactttcatcctctgctatttgtaaacgcccttcaaatggcagtggaggaaagggaggacaccaaagaccttcggatgccagccatgtatgaggtgctgcctcagctgtatttcgaaaaggaggtaatcctgacggcacaggaagtgacttggaaccaattgagccccattaggttggtgacaccgaaacgaagatggattgatatccttttgggatatcgaaaccccaagcaaccttggatggaagaggaacctattccaaccgatcctctgatcattgataatgcacgaaaagtggcttatctgagcctagacttggaactgaactcacactggaacagtctgataactcgtctgattatttccattgaagaaggaaaggaaaagacgaatgaacctattattatagatggcgatcggctggtagcatttcgtggttccttcgatgaagtcaactttaaaaaacatttggcgttgggatctcattttcataacacgaaattatatttatacaatctgcatcagtttgtggctgctttgtctatggaagatttggcaacagggcaaaaatctacggaacttatctatccgccgctgatgacaaccggtggtgtaccctacaaaggaacatccttgaatatcgaagctgtcagaggtatcatagacttgacaatagatggcctaaaggataaaatcgaaatggctgtaaaacataataaccatgctatggataatttatctatagcgggtggaataataggtaataactaccttcatatatgtcgccaattaaacctggctgtcaatggacagggaataaatcaacctagtatgttgggctcggctacgtccaatcttagagatcccatctaccgctcgctcttatttcggatatatgatttgctgaagagttacgaaaatgagaatatatttccagatgtaggaggtagagagaccccaaaaatagttgatattcaagttagtcgcctggtgaccttcgaagaaaccatgaccacggatctcatcaatctaattgaccagcaactgcttttgtcacatcgcaataatttacaattcctgcgtcgtaatcttgtggcaagacaacatcgtcttaatcatgatccatttagtattggcctggatatagttgctccagagaacctggtcgttgaggcgaggatgtatttaagtctaccgaatcaattgagactgcgtttacatctggatagctttaagtgttccctaaaaaggggcttaaatcacttcgaacgccaattcccaacagccatttccaaacccactctaagtgagctttatgaggccgactacgcatcaacagatgtgaccacttccaaccgattcccgccacatcttcagttaccgaggggaactggagacggactcaaattgcaattactcgtagaacttagcgaatggaatggcctggagtcgcatttcgatggggcgtctgtcacggtcctggccaaaaccctgaaggatgtgataatctttcataaccaggcctaa

SEQ ID NO: 41718 - protein, 525 aa, DROSOPHILA
MAVDWTSFQRNACFARIHFHPLLFVNALQMAVEEREDTKDLRMPAMYEVLPQLYFEKEVILTAQEVTWNQLSPIRLVTPKRRWIDILLGYRNPKQPWMEEEPIPTDPLIIDNARKVAYLSLDLELNSHWNSLITRLIISIEEGKEKTNEPIIIDGDRLVAFRGSFDEVNFKKHLALGSHFHNTKLYLYNLHQFVAALSMEDLATGQKSTELIYPPLMTTGGVPYKGTSLNIEAVRGIIDLTIDGLKDKIEMAVKHNNHAMDNLSIAGGIIGNNYLHICRQLNLAVNGQGINQPSMLGSATSNLRDPIYRSLLFRIYDLLKSYENENIFPDVGGRETPKIVDIQVSRLVTFEETMTTDLINLIDQQLLLSHRNNLQFLRRNLVARQHRLNHDPFSIGLDIVAPENLVVEARMYLSLPNQLRLRLHLDSFKCSLKRGLNHFERQFPTAISKPTLSELYEADYASTDVTTSNRFPPHLQLPRGTGDGLKLQLLVELSEWNGLESHFDGASVTVLAKTLKDVIIFHNQA

SEQ ID NO: 41719 - DNA, 4248 bp, DROSOPHILA
gtgaacaagatatgcactatgctgcccaagagtccattgacttcgccaagcgttgaggaattcgtttcgcaaatcaagcggaggagacaggactccgcagggtatcctgatctgtaaggaatgccattagtagtaggtcatatagttttttaaataaaaccaacctttccaatttatccttgagcattatgtagaaattagttcgactcatgatcggtaaagttcgtttttgggttgaactattatcatccacagaacgaaaggatctgctactactactatcatctccaccagtggtgttatacgtcaagtaactgtcctcccagttatcacccatctaagcgggaagatatattcattttcggataaatatgaacttaaaaaatcttaccaatatcggaggatacttgtagacgtgctcgggctggtagtagttgaattcatagttatacgaaagaaacacatttcggttcttcaaagttagtggcactgatatggccataaaaatctaaatattttgattacatgcatttattctggaatacaaacaattataacaatatttacaccgaattccgagttggtttgatatagcaaagtggactccacaaagatcaacttcagaaagacaaaacaagataatgctagactattcatttttgcaaaatatccttgaggtttcgcgaccaacaagtgccatccaactaaaccgccaagcgcccaagctgacaacttttatagaatcgcagcacctgttaattgatggccgtgagtaggcatcataactaaccacaggctgccgctgccccaaaataacagcagtcacgacaacagaatgagaattctccaaaaatagacatagaaacaggcctgacctaccaagttgcaaataatgttttattccaatgcgttccgcatactcttatagttaagcctagtctataataatggttcttgaggtgtgtggcagatgctcgagctcgcctccgttgagcgtttgctacctggtgttgcgcagttttcgctccttccaagttgcgaacttgctgttggcggtgcgcagcagctgattcaagtgctgcgtcagcgaggatcgcagtggcgaaagttcgtgcatagcgcggttctgaaatatacagagctttgtaatatgctgttaggggaaatactgtaaaactcacctcaaaaggcactagtttggccattttgaagcgctgcaacgtctcgtgcatacgctgtaactttgtctccagctcttctgaggtgggcggaaagcagctccaaaagtgtttcagcagctcggacagcgaaaggtataagtggcgcagctctcgttggaagtcgttcggaacaagttctgcaatgtcatcataaaattggtaacaatttttgttaagattggataatctctacttacgtcccgctgactgctcttggaaaccgcgcatcatggaaccgccaggacttagttcacccagagcatttactgccgccttagaacagatgaacgttcgttgcacgttgcggtttagccatgactccgaattccgcaccagcttgtactgcacctcttcaagactcattggatcgttgtggttgtcgtacatgctgttctggacagggccattgaggtaacgctccactttggacagttcgaagtgcttagacttggctttctcgccgttggcggaatcatctccctccaatatagggtccccgagatccacatagtgaatcttttccatcagtcgttgctttttgctctgcggctcgtctttgtccacctgatcggaggaactcttcgtcgcggtggccgtggcctggccctttccattcatcccgttcgtatacgcggattgggaaacaggcccgttggcattattggtaccattggtcatagttgacggcgctgaggtcacgttagcacaggtcttaagcaccatgatggaatgctgattgaatcgcttgatcatgttttggtgcacaatattcccgctgttcacgacgttgcggtcccctgctacgctgccaaagccctcttccaaaggaacatcctcaaactttttaaggtctagcaaaggatcaccagctccctgctgaacagccgcttttaatgcttggtcatcgatcttgccgcactccgtgaatatgtcctttgtgccggctgtcagtctgtcacgatgaaagtagtgtgattggaaaaacttggtccaaaactcggcctcggacattttggcaggcacattctcaaaatgtttgcgtttaacggcgggataggtcttgaaaatgcagtgaatcacatcagaggtgaggttgtacttgaggccattacagccgtctgtctgcggctttatgtcagccagaaaggcgccagaaacacctgcgattacaatttataagagtgcgcaataaaggggacacacagtttttatgcataccgatctcctgggatctgcccattttcttaagggcgtgatccttggcatgcgtagcccagaactcatcgctggttaggactttggttatgacaaggtccttgtagagttgcagcaggttgggattctcaacaaggatgcggttcttgtcttccaggtctttgtccaccttccgcttgaagttgggaagcagttgctgcaatagctccttgaccttgtccctgtcggcaagcattgcggcctgtccctggcggttgacgaagtggaaggtcgatgtgttgccgtcgtgaagaaccacttgcagctgcaccttgggcttgccctcaggagatatcttttgagctgcatattaaaaattaagaggttaccaaaactggtgaagaaggctttgaggaacaacccactcttgatatccgcataacgatgggagactgttaccgtgtcccggtgttccgccatccaggccacacgctcattcattacgtagagcgtgccgtcgcccttcttgtaccgcacctcgcccatctggagcagcacgtcctcactgctggtggtcatcttgttctacgcccggcgctcagcagtcgaagtcccagtcgcagatccacgctcgccgtctcacatgagagccttcgaaaggacgagaagggggacgccagaagattcctgcaacctgaaagagcatgaaatgcgatctaagaagcatcttcggctggcggaaaagtgccgcctggtgtttgcgtatgtcgcctgcgccggcgatacttttccccatttcgcggtcggcaaaacgcacaatcccacgttatttgcacgatattactggaaactcaacgcacctcagtcaggctagggatgtaagaatacatcgatgtatcgagaatcgatgtaccgtgcccataattttcgatgttttttgttgatatcgatgctttgctgaaccagctgtttaattatacaccgttcacacaaccgcgttttggttccatgtgaattatttaaatcgttctagatttaaataaaagtttttgtgtgtgttcttttttatttcttttactcctattttcagtcagtttcttcttattatcatatatcatcgtatatttatttatttgtatatgctgatacttatcattgaatgaatcatatcttaaagcttataaatgaaaaaataaatggtttatacatgtagttattaagttatttaaaatctgcccaataaaggcgcttaagagatttatttagtgcaatctgtgtttattggcctagaattttataccactaacttaactaacttcagtgccttgtgcgctccacagttcgcccccgatcgagtagctcccggaaggttttgacctcgtgtcggggtatgctctcccggtacttgggctgcatcagcccgtagatgaagtccagctccgtctcctcgtcgtgtcgtccctccggcaacttggctaggagcgctcgctgcttgcagatgaatgagtcgatcacttcgtcgtaggactgcttcgtctcgaagatctccatgtatatctggtaggaaggtttagtgggcgagaagtgatcgcgcagcagctgcagggcatccgaccaggtcttggcatcccggcgcacacccttccaccacaccacggcaatgctcttgaagagcagcggcaaaccctttagcgcatccttgtcgctgatgccctccacctctttatacgtctccacggcattgatgaactcgtccacggcatcgtgatcccgctggccactgaatctcaccgtgcagttgctaaagctacccttggatggcggttcctctttg

SEQ ID NO: 41720 - DNA, 2031 bp, DROSOPHILA
gcaaataacgtgggattgtgcgttttgccgaccgcgaaatggggaaaagtatcgccggcgcaggcgacatacgcaaacaccaggcggcacttttccgccagccgaagatgcttcttagatcgcatttcatgctctttcaggttgcaggaatcttctggcgtcccccttctcgtcctttcgaaggctctcatgtgagacggcgagcgtggatctgcgactgggacttcgactgctgagcgccgggcgtagaacaagatgaccaccagcagtgaggacgtgctgctccagatgggcgaggtgcggtacaagaagggcgacggcacgctctacgtaatgaatgagcgtgtggcctggatggcggaacaccgggacacggtaacagtctcccatcgttatgcggatatcaagactcaaaagatatctcctgagggcaagcccaaggtgcagctgcaagtggttcttcacgacggcaacacatcgaccttccacttcgtcaaccgccagggacaggccgcaatgcttgccgacagggacaaggtcaaggagctattgcagcaactgcttcccaacttcaagcggaaggtggacaaagacctggaagacaagaaccgcatccttgttgagaatcccaacctgctgcaactctacaaggaccttgtcataaccaaagtcctaaccagcgatgagttctgggctacgcatgccaaggatcacgcccttaagaaaatgggcagatcccaggagatcggtataggtgtttctggcgcctttctggctgacataaagccgcagacagacggctgtaatggcctcaagtacaacctcacctctgatgtgattcactgcattttcaagacctatcccgccgttaaacgcaaacattttgagaatgtgcctgccaaaatgtccgaggccgagttttggaccaagtttttccaatcacactactttcatcgtgacagactgacagccggcacaaaggacatattcacggagtgcggcaagatcgatgaccaagcattaaaagcggctgttcagcagggagctggtgatcctttgctagaccttaaaaagtttgaggatgttcctttggaagagggctttggcagcgtagcaggggaccgcaacgtcgtgaacagcgggaatattgtgcaccaaaacatgatcaagcgattcaatcagcattccatcatggtgcttaagacctgtgctaacgtgacctcagcgccgtcaactatgaccaatggtaccaataatgccaacgggcctgtttcccaatccgcgtatacgaacgggatgaatggaaagggccaggccacggccaccgcgacgaagagttcctccgatcaggtggacaaagacgagccgcagagcaaaaagcaacgactgatggaaaagattcactatgtggatctcggggaccctatattggagggagatgattccgccaacggcgagaaagccaagtctaagcacttcgaactgtccaaagtggagcgttacctcaatggccctgtccagaacagcatgtacgacaaccacaacgatccaatgagtcttgaagaggtgcagtacaagctggtgcggaattcggagtcatggctaaaccgcaacgtgcaacgaacgttcatctgttctaaggcggcagtaaatgctctgggtgaactaagtcctggcggttccatgatgcgcggtttccaagagcagtcagcgggacaacttgttccgaacgacttccaacgagagctgcgccacttatacctttcgctgtccgagctgctgaaacacttttggagctgctttccgcccacctcagaagagctggagacaaagttacagcgtatgcacgagacgttgcagcgcttcaaaatggccaaactagtgccttttgaggtgagttttacaaaccgcgctatgcacgaactttcgccactgcgatcctcgctgacgcagcacttgaatcagctgctgcgcaccgccaacagcaagttcgcaacttggaaggagcgaaaactgcgcaacaccaggtag

SEQ ID NO: 41721 - protein, 591 aa, DROSOPHILA
MTTSSEDVLLQMGEVRYKKGDGTLYVMNERVAWMAEHRDTVTVSHRYADIKTQKISPEGKPKVQLQVVLHDGNTSTFHFVNRQGQAAMLADRDKVKELLQQLLPNFKRKVDKDLEDKNRILVENPNLLQLYKDLVITKVLTSDEFWATHAKDHALKKMGRSQEIGIGVSGAFLADIKPQTDGCNGLKYNLTSDVIHCIFKTYPAVKRKHFENVPAKMSEAEFWTKFFQSHYFHRDRLTAGTKDIFTECGKIDDQALKAAVQQGAGDPLLDLKKFEDVPLEEGFGSVAGDRNVVNSGNIVHQNMIKRFNQHSIMVLKTCANVTSAPSTMTNGTNNANGPVSQSAYTNGMNGKGQATATATKSSSDQVDKDEPQSKKQRLMEKIHYVDLGDPILEGDDSANGEKAKSKHFELSKVERYLNGPVQNSMYDNHNDPMSLEEVQYKLVRNSESWLNRNVQRTFICSKAAVNALGELSPGGSMMRGFQEQSAGQLVPNDFQRELRHLYLSLSELLKHFWSCFPPTSEELETKLQRMHETLQRFKMAKLVPFEVSFTNRAMHELSPLRSSLTQHLNQLLRTANSKFATWKERKLRNTR

SEQ ID NO: 41722 - DNA, 3428 bp, DROSOPHILA
ttggcactttcggcgcttaccctgcaattaatattcataattacggactgcgactgctgatgcaatgtgcccttaaacgccgccatcattcacactctcccattgccgcgtatgagcagtcgtcttgcatccttaaacgcaatgcacttcatattcataatggcaattttttacgcttgcgatcttgggcagcattatgcacaacaataaatttattcaacacatgcccagtcagccaaggagacgaaaggagcagaacggaaaggaaccgaaaggcagggacactcggagtgttttacaaaattgtctgagcgggtgtcctgatgatttataccgtggtcttaaattacacacgccgaggagaacttgctgatattgcagttgttgatgggggccatgtaaataatagtgagtatctgggccgtcctgccacttgatatatttaaatgcctagcaaagcccatcgcctgaatgaggatttatgcggctaaaacacattctggttatcatgaacaaagcccattgggccataaacatagactgccacgccccctctaacattacggacatgtgtgttcgtgtcgatttaatgtcaataaatactagtggcggatttactgagcctctcattgataattcaactaattagcattcaagttaattatttcgcttccgaattttgagcacgcgtcggccatttttgttttgttatgtcagctgcacgattgtttatgtgtgcgtgtcgaaccggaaattacgtcactgacgaaagttttgataaatacaaatgactgttcagctgaacccaggttgctgaacccagcctcgaattctgtccaaataatccgcattggcatctgcatatatcaaatggggaatgtcgagaatgggtttaatattttcaccattgaagacgtctgtttgagagtggcatgggttttttagaagtgaacatgtttttgggctgcctggaatttttcggacaccaaccctcttttaaacacgctcgacgagaaagacaaataaaataaacgaataaatacatatttttgcccattgcggtatttggataatgcgctaaatgaaaagtcgccacagagagtgttgtttaaccaaaatttattaaaaaattccacaaaatcgacgaattcgtgatacggattatttaaactatgttaatatttgcggttttaggctgaacgtgctgaagccatcgtatcaaaaatccaactaaggatgggctagagtataaaatgctaattttttttgtttcggaaaaaatatatagaaaacctaaaaaagaattatttgcaagataattaatacaaattattctaatcgattacaaagaatttcgatgcgagaggagtagttctagtcttatttaatatatagtaaagcatttattttttgatttaacataagtaactaatgttttacatacgtcgttcttaaatgctttaagtatgattatttctaggcgctatatttcgtgtatcctgtgttcttgtgaacaactgatgttcaaaatttgtggtagttgcggcacccatattaagctaagtggcacacctagcagtccagcgttcctaaatcagagatacagatttaactttcacagaaaatacacttttgtagaaaacgattaggtgctaaaatatttgctcatcatgacagacttcagcattgccaagtttaacaactatcaggagtatctgcactcctttacgaccgtcgaggactttcggtacttacctttccacaaaacggtcattactctcacaaaactcggctatcgggaacaccgcactttctacgaggaggatgagttcttaaacgtgaaaaagcaggtggaacagctcctgaatccaacggtttctgcccagatatactacagtcagtacttcaagggaaccgatccagcactttgggcattggccgaacgcgagcacgggaatgtccagcaggagatatcggtaaaaacttttaagatttacattttacatttatagtagaagatcccaacctgcagaccattatctttctggaaataagcggacgaagtgggttctccaagtcaggctacattgactttgaggccagtctgcgaaactaccggttcaagggaccaaatgcagtcgattggaaggcggttttcgaggagcggaagttgctgaagccccagccgagtgatatagtcttctacgactggaagaccaggaagatttttgcgaatgacaacgacaattatacggtggtagctcatccggaacatggtcttatgtttgctcacaagggagatcacaagaacatacccgttaccaccaagaagaaccccttttccagcaacgttagacgctctatgatcaggtcaaatctatatggtttcattatactgtacgaccaccacgttcgtaagaagacttagattatgttcaactaatgttttggcgagcaatgaatataaatttaaatattggactaaaaagtgcatttcttagttgtctaatgtaggatgcgtctctttctaacccaactaataactgtccttcagataatattaatgtcatctgataaaagctaatgcttgcaacgctcgaccaagcaaaattccacttaagttgtcaacactctgctgcctacacaaccgcacacatatactcacccctccgcactcacactgcgacactcttttggacacgcacgcccgccttggcccatccatctacaccttaaatacccaaatcaaaaaataaatggtaaacactggacgatcccagcccccgaaaccgcatggccccatggaaaccagggcgagactccatcgaaaaatgctgatgatatgatatttagaatatttttttcccagtcggacgggcaggcaggcaggcagggatgtgttccttgggcttggggtctcaaaattcctgcagagcatggcaaatatttatttaatgctccatagtggacagccgatagctagacttgcaagccgaggggttggaaatactacttgtttgctttccgtggtgggggtggggcctccggtctttgagacagccccattgcttcggtcttggcaacattgttgctgctgctattgctgcttagttaatttctagtcatcaactgcagagaggcttttgtttggcaaacagacaatagagtatcaccgagaaaaaaaaccaaggataacgaggtcattattttacaataaaagaatctgcttaaggaactgcctaatagcatttcagaattagaccatgattaacgtacgatttaaaattatattgtatctatgtatatatccttaagtttaacagtttaaaatgtgtctgattttttttccatgtgtgctgactaagctctgatccttggaagagctccaaaagtgccagcaaacaacaaaaggggcgttccgggggtgt

SEQ ID NO: 41723 - DNA, 1372 bp, DROSOPHILA
acacgctcgacgagaaagacaaataaaataaacgaataaatacatatttttgcccattgcggtatttggataatgcgctaaatgaaaagtcgccacagagagtgttgtttaaccaaaatttattaaaaaattccacaaaatcgacgaattcgtgatacggattatttaaactatgttaatatttgcggttttaggctgaacgtgctgaagccatcgtatcaaaaatccaactaaggatgggctagagtataaaatgctaattttttttgtttcggaaaaaatatatagaaaacctaaaaaagaattatttgcaagataattaatacaaattattctaatcgattacaaagaatttcgatgcgagaggagtagttctagtcttatttaatatatagtaaagcatttattttttgatttaacataagtaactaatgttttacatacgtcgttcttaaatgctttaagtatgattatttctaggcgctatatttcgtgtatcctgtgttcttgtgaacaactgatgttcaaaatttgtggtagttgcggcacccatattaagctaagtggcacacctagcagtccagcgttcctaaatcagagatacagatttaactttcacagaaaatacacttttgtagaaaacgattaggtgctaaaatatttgctcatcatgacagacttcagcattgccaagtttaacaactatcaggagtatctgcactcctttacgaccgtcgaggactttcggtacttacctttccacaaaacggtcattactctcacaaaactcggctatcgggaacaccgcactttctacgaggaggatgagttcttaaacgtgaaaaagcaggtggaacagctcctgaatccaacggtttctgcccagatatactacagtcagtacttcaagggaaccgatccagcactttgggcattggccgaacgcgagcacgggaatgtccagcaggagatatcgaccattatctttctggaaataagcggacgaagtgggttctccaagtcaggctacattgactttgaggccagtctgcgaaactaccggttcaagggaccaaatgcagtcgattggaaggcggttttcgaggagcggaagttgctgaagccccagccgagtgatatagtcttctacgactggaagaccaggaagatttttgcgaatgacaacgacaattatacggtggtagctcatccggaacatggtcttatgtttgctcacaagggagatcacaagaacatacccgttaccaccaagaagaaccccttttccagcaacgttagacgctctatgatcaggtcaaatctatatggtttcattatactgtacgaccaccacgttcgtaagaagacttag

SEQ ID NO: 41724 - protein, 233 aa, DROSOPHILA
MTDFSIAKFNNYQEYLHSFTTVEDFRYLPFHKTVITLTKLGYREHRTFYEEDEFLNVKKQVEQLLNPTVSAQIYYSQYFKGTDPALWALAEREHGNVQQEISTIIFLEISGRSGFSKSGYIDFEASLRNYRFKGPNAVDWKAVFEERKLLKPQPSDIVFYDWKTRKIFANDNDNYTVVAHPEHGLMFAHKGDHKNIPVTTKKNPFSSNVRRSMIRSNLYGFIILYDHHVRKKT

SEQ ID NO: 41725 - DNA, 2569 bp, DROSOPHILA
gttatttcactgggtaagtaaaaagcgcacggtgtgtccacaagcttcggaaatactttgctacgcattaccatataattatagtactttaaaaatattttatagatggtcttaaaaacttaaatttcattatattttaccacgcaacactcccgcttgttttttattcagaacaagaacaggttattttacaccactgcgtaatagttctttatttaattctgttcgagtgtgtaatttcgctatgaaacttcacttttattattattgtcattgttatgtgtgcgaacgcctgtcggcgggtttatttggaccgtcccgcgctttattttcttttaattatgtactcagctcacaaatgtgggtcaattaacaagcagtcgatggtccccatcgatgtcgaaaaatcgggattaaacaatgccgcagacgtgctgccaggacaatgcaaacaattgtcagaatttaaatgcagcggcaacggaccgcgaagtttccactcactatccggttcaattttcgcataaattatgccgccatatgtcacacatctggcgaatgctacgaatttcgattttccgccgtttttccggaactgtcaaatgctcggcgtgtgtagttcgctgttttgcaattcttggacggaatgctggaatggttttaatataaatcactaagtgtctgcaaaacaatcaaaatctggcatgaactatgttacggtgaaacttagtcattaattaatatgccctcaaatttaagtcgctgaaaatgtcttgcttttcatataatcgagaaataaaattactattgtacctaagatctgtgttaagaatattataaaaagtcgcgtttgctttgactcagttgtcacaaatttgccaggcacaaatttatatttatgtaatttggagcatgggtttttaaaaacaataatcacaaaaagattttgaaatggaagcagttgctagagaaaatgatccaccaaatcattgctatataaatgaagaagttccagcgaatgaaactgccgagaatcctagtcatggccttcaaggtgaggcattccaattaaatggaaaattattaatgttcaaggtgagcaggtgaggtgatttcaaagggttatataccagacttgtccaacgcaaacgtcaatcagcaacagcagcaggaaaatgatggcgaagatgacctcttgcctggaactagacttcgctaccgtcgcaggaatttgcatctggatccctatgtgtgcaatgagtgcaaccagtatgtgcgtggtggtgtgatcaccatctgtggtcatttgttttgctggacttgcctgtggcccaaattgagtggtacagcacagccaagatgtccatgctgtcaacgacatttgctcatgtacgaggacatcatgcccttccatggagagggacccaatgcccgtcaggaggataataatgtgccggcccagccgggctcagtgcctcgcccgacgggactgtatctctctgatactgattttccctgttggttcgcggtcaacgatcctgtagatgggtgcccagcgactttccctgatattcgcagggagagggatcttcactgcgctataaggcttattccaatggtgtacccttggatcggagcacaaattagttttctcaagtggttccagttgggatgcgtgttgctcatatttctgatatggtccgtactgtcgctgttctaagaggtgtttttgtaatacatttttgtttttggttaatgggagaagagtgcgttttggttaatatcttaagaggttggtcggacctcaataaatttctgctaatgctgaaagtatctattttataaaatcgaatgatttaaatcgtatataacattcattataatttgttgcccaaacctctgcagccaagacattttcgttggaaccctcttgcatcttcaacgaatcgaagaaatattttatgaactctctggccaagtcaaagttagtaagtgcaacaacgcaaagtaccggggcatcctggccagctgaaacaataaattcttggggcagttaggaaaccagacaaaactgtaagcaaagttaagcagctttaagtcggaacttaaagccttttcacctgaggagtatggaaagaaacgaaccgaatactttggctaatgaaccatggtcaactgaatattcggggaattgggttagcccaattgagttgttaaccgacttttgtgggggatggacacttgatgacagctccgtgggggaattggagttgcgtgtcggcctttagcggcttggctctgggcaatatttatcattaattaagtgagtgccgagaaatccgtaaggatatataaccgaaaggcaagtgacagaagttaatgcgtcagctaggtggagaaagcgacacggacattgaaaggaagcggatgcagatgcatcctgtgattcagctttattattgcagcttaaatggcatttgccaacagcagcgcgcttgtgagcgtatgtttgcgtgtgtgtgtgtgtgtatctgtgtgcgtgtggggagaatggaaaatcctttctccg

SEQ ID NO: 41726 - DNA, 411 bp, DROSOPHILA
atgaagaagttccagcgaatgaaactgccgagaatcctagtcatggccttcaagcaacagcagcaggaaaatgatggcgaagatgacctcttgcctggaactagacttcgctaccgtcgcaggaatttgcatctggatccctatgtgtgcaatgagtgcaaccagtatgtgcgtggtggtgtgatcaccatctgtggtcatttgttttgctggacttgcctgtggcccaaattgagtggtacagcacagccaagatgtccatgctgtcaacgacatttgctcatgtacgaggacatcatgcccttccatggagagggacccaatgcccgtcaggaggataataatgtgccggcccagccgggctcagtgcctcgcccgacgggactatgggtgcccagcgactttccctga

SEQ ID NO: 41727 - protein, 136 aa, DROSOPHILA
MKKFQRMKLPRILVMAFKQQQQENDGEDDLLPGTRLRYRRRNLHLDPYVCNECNQYVRGGVITICGHLFCWTCLWPKLSGTAQPRCPCCQRHLLMYEDIMPFHGEGPNARQEDNNVPAQPGSVPRPTGLWVPSDFP

SEQ ID NO: 41728 - DNA, 4765 bp, DROSOPHILA
agctatcggttttttggctttcaactagcgacagagtggcatgcaaccactgcagaatgacttggaaacggagaatggctaatcactggagcggccaaaaacggcatcgcattttgggggacaaagccggtgtcgagtgtctccgccttccgtctttcgcatttcgtactccgtggtccatcatcacgctcgcgtccctctgttcaggcggcatgggttgcctatcagcatcatctaagccggctcaatgtctgctctgcacaagcgacgattaaaaggacgacaatgactatgacggtgacgagaatgaggaacggagcactgggagaaatccttctaaaccaatgagcttatcagattgagaaagtactgctaaaaacggataggatctgaagagaatccgaggtcttaatgagagttaaagtttttttcaagatatcagcataagaagatttgattacttaaagatctggaaacattttataagtattatttattttgttaaacttccacatcaaacacatgaaacatttaatacaatattcaatcgttcatattagagcttgataatgcgttcacttaatctaagtgcagacttaattaacgttagttaattttctcctattttttttttgtaagcgtaagatgagttttttgcctcagtgaagtgaatggctgcagctatccatgtccatgaggccatcaaaaggagcagactgctgcttgccagtctggccacaagcaaaacaaaagtagcatcatatgcaaagtcaaaaccactaatgggtctgcgcaatcataggataaattaaattccaaatacggacgacgacagtcgacaacgatacagggatattcagtgggttttgggtggggaggtggctgtttttagggttagttgttcgggtgcggggtggcatttataaagtttttgccaactgcaaatgatatcttgctcagaagagagacaaccgcaggcggcaaccgcagaggattccaaatggtggagaagaggggcgaggtggcggctgttgtggctatggctgcctttcgagaaacttttcatttgaatttcaagcacaacctaaccagcgtttttcccgctctccacatccaaggccaagctgtttcgcatctttcaacaagtcttcagcgtggaacgtgacgtccatcaggaggagctgcgccgcctggccatctttgtggtgcgcaaatttgtcgaggtagccccgactaatcccaaaatctatgcagagttattattttacaaaggcatcagggaggcaaatgagctggagtcgggctattgtgacgcctacgaagcgtgagtacgggctacttggccattgtctcctcatctttgtggctaaagggaatgggatggataggtagggcaatcacaatggccacatgattgactgagccggggcttcatcgtctgtcgtttagttggcacatgataaatgatggccagcggcgagaatggagtccctattgtatttgcaccccacggacagtagtgaaagggtcagatcatttgcatggcaagccaaaattacggggagacagtgtgctgaaaagacctggccccatatttatcgtattaactttacttgcagtggcaccaaaggagcctggaccgaggagcaggagtcggagctacgcttcctcttcgaggagaaccagcgcaatcctgaaacagataagggtaactataagattaaaagtatatataatgaaaaaagtgcaaaaatacgcatatacaaatttattcaaccattgaagtactttaaaaatccggaaaatgagtttttgcttgcactgcatctgcatttttcaaaactgcccttgagtgtgaattaaaacttgagtcgtaggaaatgaatggaagcaatcacagctccggcattctggccactcgaaaaagcgacaggcaggcatagagagagagagagggagagtggctaggaataggcggaaaacaactactcaattgtgtctgttctttcagatgtgattgattggattctggacaatttggtcgacaagacgcgcaaccgccgcaccgtcctgaagaagctgaaggaactgggcctgctattcaaggcgcccaccaagcgttcgaccaagtccgcccagagcggcaaaaacgtctggcagccggaagaggatgacgagctaaggagcttatatgatcagcatcgcattgagccgggtaagtggacaatcagtttgagtacacagagcaaaggatgcaatgtaggtctcgaaacaagggcacaaaactaaatccaaattgattagatgtttgggggaataagtacagaagtcagattttgattttacttactatttattcttgcagactgcctagagcggcttgtcaatgagttcgctgaacgacgtagcaaacagcagatcatcaagcgaatgcttcagattcatttgatagcggataaatccgagattctgcccgccaaaaaggggcgtggcaaagacaagcccaagaaagacgtagaaatggaaggcgagggcgatgagtttgattttgccgaggagcccatgtttgaggaccaggggtataagaagccgaagtccaaaccgaaaaaagtccagaagcgtcagatggtacgcacacccttggatgtaggcaccattagagctctaatcggtcaggtggattccgaaaagtatcaatcggccatcgagtggctgcaggaatgcctgcaagacgctagcgaagataccgaggaagcagtcgaggatgacgatggtgtgcctctcctgcctctaatggagaatcaaaagaatgccatggaagatggtgatttccaaaaggtcctggtcgccctgggcatgcagccaccaatttcgggaatggaagcctactggcgtattcctatatatctgaactcagccgatttgatattacgttccaaaatcctggcaggagaagaggttgatgctgagccggaagacgaggctgcagacgatgaggatggcgaggaagccgaggagagtgacgaagaggaggacttccttgaaaagcacagcaggcagcggaaggagaacatagccacccaacagcagcgaaaacttgatagtcttatgttcaaccagagcgatgacgaaaccgagcagcgtgctcccccaaaagccaaggacaaacccaaggccagcgaaaagaaggccaagcgaaaggtcaaaggcaaagccaaggagtcaaaggactgcaatgacgatgggacagataaagcagagctcgagaaacccaacacggatgatttatttaaccaattgagagccaagcgagccactaaaatcaaactgagcgatatggctctaaatgagtcaacaaatgccgctcaagaggcggacgatgatgcatttaacttcaactcggaggactatcgtgcccgcctgctggaactggaggatgaggagcagaacagcaaggatgcggatgagaacggcggtgacaaagagaacattaccaataagtccctgcagcgtgcacgtcgcgttaatgtaattgactcggatagcgacaacgacgatgatggcgccttgcccgccgacaagacaaacaaacgcccacgcagcgacgacgatggggattctggccacatggatgccaatgccgaggaggacagcgatgaggaggccaactttttggctcgcaaaaagccagccaaagtcgatggcgagccggccaagcggcgtcggttggccatcatcgatgacgatgatgaggatgatttttaatgcacacccgttctgctcttgattttatagctcaccggaatggaagctcgaataaatgtaacttataatttgtatatcagcttttgtttgttcctttttcatgttcgtcgagagtgtatactgtttatatgcgtattgtgattctactaggagagggtattaattgggcattatcacacagtttggaaatcctttttgattgaaaaaacataggtgtgatattcatttcataacgcttatgtggctcacagtactttagtataataaccctatcaattcttgattttctaatgtgtctctcaataataattacctatctattcgtgtagcttgtgtagttaagttaaaatgttaatctggctatatgggtcttttacgttcgccatgctgtttacattatttactgcctactgtggtcgcctaagggtatctacttggccaacaaaagtcaaccgactgcattgtaactgtctggcagcaaacatggcctagaccccgacgacccttccttcggaataaagtccctcttggccagttctattacctctgccattcccccagtcgacttgatggaattccatggtggtccattgtgagcagcacacactgccccacctccagagccttttgtgtgcctctgctaatttggtggcttttgttggtccgttgcccccactggggtgagcattcgccatgtttcgtgcaatgcattttgttaatttctggcaagggtgagacggttcaagtcccaggcttggctcgaattcgactggcaaaaggcatgcacttaagaaaatctcttcaattatccttggaacattactagagtaagtttgaaaataaaatatttatttttattgaggctacaatgcatactaagaagctaaaatactttttatcgcatatatacagtggttctatttcagttcttgcagaagtttccttacacagatatgtatagtatttttagtttttttttttcatcatcgctttggaagtt

SEQ ID NO: 41729 - DNA, 1932 bp, DROSOPHILA
atggtggagaagaggggcgaggtggcggctgttgccaagctgtttcgcatctttcaacaagtcttcagcgtggaacgtgacgtccatcaggaggagctgcgccgcctggccatctttgtggtgcgcaaatttgtcgaggtagccccgactaatcccaaaatctatgcagagttattattttacaaaggcatcagggaggcaaatgagctggagtcgggctattgtgacgcctacgaagctggcaccaaaggagcctggaccgaggagcaggagtcggagctacgcttcctcttcgaggagaaccagcgcaatcctgaaacagataaggatgtgattgattggattctggacaatttggtcgacaagacgcgcaaccgccgcaccgtcctgaagaagctgaaggaactgggcctgctattcaaggcgcccaccaagcgttcgaccaagtccgcccagagcggcaaaaacgtctggcagccggaagaggatgacgagctaaggagcttatatgatcagcatcgcattgagccggactgcctagagcggcttgtcaatgagttcgctgaacgacgtagcaaacagcagatcatcaagcgaatgcttcagattcatttgatagcggataaatccgagattctgcccgccaaaaaggggcgtggcaaagacaagcccaagaaagacgtagaaatggaaggcgagggcgatgagtttgattttgccgaggagcccatgtttgaggaccaggggtataagaagccgaagtccaaaccgaaaaaagtccagaagcgtcagatggtacgcacacccttggatgtaggcaccattagagctctaatcggtcaggtggattccgaaaagtatcaatcggccatcgagtggctgcaggaatgcctgcaagacgctagcgaagataccgaggaagcagtcgaggatgacgatggtgtgcctctcctgcctctaatggagaatcaaaagaatgccatggaagatggtgatttccaaaaggtcctggtcgccctgggcatgcagccaccaatttcgggaatggaagcctactggcgtattcctatatatctgaactcagccgatttgatattacgttccaaaatcctggcaggagaagaggttgatgctgagccggaagacgaggctgcagacgatgaggatggcgaggaagccgaggagagtgacgaagaggaggacttccttgaaaagcacagcaggcagcggaaggagaacatagccacccaacagcagcgaaaacttgatagtcttatgttcaaccagagcgatgacgaaaccgagcagcgtgctcccccaaaagccaaggacaaacccaaggccagcgaaaagaaggccaagcgaaaggtcaaaggcaaagccaaggagtcaaaggactgcaatgacgatgggacagataaagcagagctcgagaaacccaacacggatgatttatttaaccaattgagagccaagcgagccactaaaatcaaactgagcgatatggctctaaatgagtcaacaaatgccgctcaagaggcggacgatgatgcatttaacttcaactcggaggactatcgtgcccgcctgctggaactggaggatgaggagcagaacagcaaggatgcggatgagaacggcggtgacaaagagaacattaccaataagtccctgcagcgtgcacgtcgcgttaatgtaattgactcggatagcgacaacgacgatgatggcgccttgcccgccgacaagacaaacaaacgcccacgcagcgacgacgatggggattctggccacatggatgccaatgccgaggaggacagcgatgaggaggccaactttttggctcgcaaaaagccagccaaagtcgatggcgagccggccaagcggcgtcggttggccatcatcgatgacgatgatgaggatgatttttaa

SEQ ID NO: 41730 - protein, 643 aa, DROSOPHILA
MVEKRGEVAAVAKLFRIFQQVFSVERDVHQEELRRLAIFVVRKFVEVAPTNPKIYAELLFYKGIREANELESGYCDAYEAGTKGAWTEEQESELRFLFEENQRNPETDKDVIDWILDNLVDKTRNRRTVLKKLKELGLLFKAPTKRSTKSAQSGKNVWQPEEDDELRSLYDQHRIEPDCLERLVNEFAERRSKQQIIKRMLQIHLIADKSEILPAKKGRGKDKPKKDVEMEGEGDEFDFAEEPMFEDQGYKKPKSKPKKVQKRQMVRTPLDVGTIRALIGQVDSEKYQSAIEWLQECLQDASEDTEEAVEDDDGVPLLPLMENQKNAMEDGDFQKVLVALGMQPPISGMEAYWRIPIYLNSADLILRSKILAGEEVDAEPEDEAADDEDGEEAEESDEEEDFLEKHSRQRKENIATQQQRKLDSLMFNQSDDETEQRAPPKAKDKPKASEKKAKRKVKGKAKESKDCNDDGTDKAELEKPNTDDLFNQLRAKRATKIKLSDMALNESTNAAQEADDDAFNFNSEDYRARLLELEDEEQNSKDADENGGDKENITNKSLQRARRVNVIDSDSDNDDDGALPADKTNKRPRSDDDGDSGHMDANAEEDSDEEANFLARKKPAKVDGEPAKRRRLAIIDDDDEDDF

SEQ ID NO: 41731 - DNA, 5575 bp, DROSOPHILA
atttcatttcattataaacaaaaaaattttaaagtaggcttctttataaaatacttcaacagaagacctttgcccatagagtgcgaattgaaatgaacactggaatgacatgctgaacttgaaatgaatcgtattcgcagcgacatccgcatccgcgcattccagtcaccctaagcgtgaactgcactccactggctgtctaactgtttctcatgtgccttcgctgctttgttgtctctcacccacacagcgcacacctccaactgccaccccattcggttagcttttctattgtgacgtcattggcggcggagacgcaaatacccatgcacatgaaaacacatgcaataaagaagccacactggaatggcagtagataattgcaagagataggattaagaggagcatgaggatggtggtggcggaagtcagtggtgattcccgttggtcagaagacgtgggcgcaacaacacaatggaatcgattgcacctgcttgtacgttgttgttgctttcgcagggggttctgttttcttgattggcagtgacctattttctgcggctgggagacggccccacaagtaaccagccggaggagactcaccgcgtttcaccgaatcctcgtagctgacgctattggagtgcttggactccttggtgcccatggtccagaatttcttgtttgcgggggtgcaactcaatggattctggggctccgcctgctgctgcgtctggcgacgccacttttcacatttgttcaacttcacttcacagtcgcgggcggaacaataggctgctggcgaggatcaggtgcaggatcacgacgatatatgtgtatgaatatataatatacacctgtctttttgactcttgtcttgtgctattttcctctgtttctttctatattcgcgcactttccaacactaactggaaacagctgttttccccatcgtacgataagctatcgatagacgacggcgcgccagtgttgcgcagcaacgaattatcgaaactcatattttttgtacgggcgtaattagaaagcagtaattaacttcatttccacgtaattttcacaacaaaccaacgtagactcgcaccgcgtagcgagcgcctttgcatttgcccaccggaaaagccgccgcacgaaatccgaaactcgggcacagacaacaaaaaggtcttaaatctacgtcgccatttttgacacggctccgaaatcgaaaacacaacacacacacccaagagaaaaagagctgcgctgcggagagaaggaaaaaactatacgttttcgattcgagtcgattcaattagattgtggattagtgcggttacgtctgggtatagtgtatatgtacatacatacgctaaacggcacgcatggggcataatcgtgattagtgttattagccaagaatcggagaggaagtcagtcagttgattaaggagacgacgacgtgtacagagcatcatcacccttaacccgtaccctaacccccagctaagcactattatcgggccagatactgtgatcctaccgcaaaagcacacaaaatggccaaaacctacgactatctgttcaaactgctcctgatcggtgactccggagtgggcaagacctgcatcctcttccgattctctgaggacgccttcaacacaacgtttatatccacaataggtgagtgtcatcatccgcgtttaccgtgtcttccgattcttaatttttttttttttttggttattaattataacaccttcgttcgcatgaactcattcgcaattggaaatccgagcttctggcccagtgactcattaaatgcctcttttcttttttatttcctgccccatccgggcgcatttgtcataaatattgttgtttccatgggaggggcactcccaccatgtttgatttctcgcgcttattaagattttcccgtaaggaatatatccggatgccttatctcgccctgagattcacacccgcataggaaagcgatcagaaatgagtactcagtccgagtacccatagtctttgtactttcgctgctcttatcgccccagaagccggattgttccgatgcgagacttgaccgtcgcacgccaaatcgggaatgccctattatatacccagcaggcccatgcccagtctcagagggaattcaagtagttgttcccgtacgagtacagtgaagcctttctaccaaacacagcaaatactttttaataaattcgaatcataatcagtacaacttcaagtggcagttaaatcagattatgctagtaattttaagcttattaaaataataatcacaataatattcgacatgcacactgtactttcccgtacttgtaaacacaaaagtagagcgattcccatttctgctcgtggctaataattgtttattttcgtttttggcacgttttcatcgcgacacttccaattttggggcatttacttaacgacattgtttaaattaattgcgtggtttgtggatttcggttctcttcgtctcttattttagctgcgatgtcatgggttccgaccaaacaggtttagcctcttgccaaattatttaaattaattagcaaacgtacatgtgtgtatatgctcatctgttttctcttttcaggtatcgattttaaaattagaacaattgaattagataacaagaagattaagctgcagatatggtaagtactaggcgattcatctgtattctctaattacctatatctccattcattttccagggacactgccggccaggagcgttttcgcacaatcaccacggcctattacagaggtgccatgggcatcatgctggtatatgacataacccaagaaaagtccttcgagaacatcaaaaactggatcaggaatatcgaggaaaatgcgtccgccgatgtcgagaaaatgctgctgggaaacaagtgcgaattgaccgataagcgacaggtatggaaaaaagaaattggtgatttcgctggctattcctccaagttcgtttatttgtttgttccataaaagttatctacaaacattttatttatatatttcaaattcagttagtgtataatcatttgttattaaatccaataagggatagacaatgatttggcgcaatattcttttcagcttcataaagctatctgcccttaaggccgataattaaacaattttccacccgttgtaggtttcaaaagagcgcggcgaacaattggccatcgagtatggcatcaagttcatggagacctccgcgaaggccagcattaacgtggaagaagccttcctcaccctagccagtgatatcaaagcgaaaacggaaaagcgaatggtgagtgtgcgggtggcgagactcggacaaagcgttttttttactgtggctaaccatttacatcctttgtgtgcgcaggaggcgaacaacccacccaagggcggccatcagctgaaaccgatggacagtcggacgaaggacagttggttgtccaggtgcagtctgctttgacgtggcaacgtgcgctcggcactgaagcggcatggtggcaacgactacacggtagtggtttatggtggtaactacgaggtagtagttttcttaactcctgttaggttcgagtacaagcgggaccccgacaagcggacattaactgacatctaaatcaaccttaaacatcaatcagcagccggctccctttaaccgaataagcgcgataatggaatagaacacaaattgcattatgaaacagttattaaataaagtatatgacgacagcgtgtacgaaatatacctaggcatgataatatgtatacatatatacgtatataactcaagtttaaagataaaacgatccagcgatagcgaaaatcgaagagcagccaatccaacccgcccgcgtccttctcgaagaggttttagtatttacggaattatgattttctctagcagccatggttgtcgatttgtaaattattaattgtaaaacaaatatattgtatgtactatgtatgcatatgattagtttacctgtccttgttttgctcattgcttgtatgtactttcgatcgattcagaaacccttttgccattacgttgggaatacgacggaggaggtccagacgcacaatgacccaaaagtgtaaaacagcccaatccgccccgcacctccccctacccggtcctaactttatataatataatgtggtagtatcgcacagatcgagggtgcttattatattcttcttaatcttcacacacatttcatttggttagttcgtactctatttattttgttctttgccgcacaccacatgactttgtcaataaaacgttacacctaatattaaaacattaacgaagatttgcagatttgcgagatatcaccaattaaaggtagtctatcgatgagaatcgatcggcagcaataaacaattatgaacacatacacagcgcagtaatataaataatgtgaaattaaatgataactaattgcatatttgatattaattaattacttgtaatattaatgattaaacgtatacaattttataaaaataaatcatgtgcaaaaccaaaaactttttatttgaaaagattttatggctcgtttcgtagcgctgagcttctgtcataacagagacaggcgagttcgacgcgtcggacccaaagtcgcgtagacagattgtgctgtggagcattgtagagtatgggctgaggactatcaacttatacaaaatgtccatgctgcaatgcactgggtttcccaggtacacttgagaggaccttaagaaatccaataccagtttgtgggtaagtctattcgctcagggttcgatcagggattactcttaaatgatctggatcatgtccaatgacccaagtcggatggagaggattatgaatatgaatcatagcttaatcgttgacataccgacgagacatcatgttgcattatggggcatcataaatttatatatctgtgtggaaaattaaagaaaagtcccgtaaagttcttattatatggtggtaaaagagttcgaagctaagctaattaaaaattgtaaaaagagcccgtgggaattaaacatccctcacatggccagaccactgcaccctccgcctcttcatcttcttcaaaaatctaaaactaaactaaaaactaactaatcttactacttcctatcaaaatgctagaggcttgcgtagcaaactaaccaaattgtattgtaatagcctttcctttgcatcccgtataatagtgttcagagacttgtttaaagccggggatttaactccgaagtcttcccacgtacatatgtacacattatgaccgtccctccaaatgggaacgggttagatctaccctcccgttggaagagttactttttgacgaatcccataactcagaaatcatatgcgtaaaactgtcattttccgacagatcagtttatattatgtgctcgtatattccgctatcttctgaattcccagaatatctgaatactttgtccgctatccaatccatctcaaataaactgtctgacagggaccaattggtagttctagatgattttaata

SEQ ID NO: 41732 - DNA, 2247 bp, DROSOPHILA
aattatcgaaactcatattttttgtacgggcgtaattagaaagcagtaattaacttcatttccacgtaattttcacaacaaaccaacgtagactcgcaccgcgtagcgagcgcctttgcatttgcccaccggaaaagccgccgcacgaaatccgaaactcgggcacagacaacaaaaaggtcttaaatctacgtcgccatttttgacacggctccgaaatcgaaaacacaacacacacacccaagagaaaaagagctgcgctgcggagagaaggaaaaaactatacgttttcgattcgagtcgattcaattagattgtggattagtgcggttacgtctgggtatagtgtatatgtacatacatacgctaaacggcacgcatggggcataatcgtgattagtgttattagccaagaatcggagaggaagtcagtcagttgattaaggagacgacgacgtgtacagagcatcatcacccttaacccgtaccctaacccccagctaagcactattatcgggccagatactgtgatcctaccgcaaaagcacacaaaatggccaaaacctacgactatctgttcaaactgctcctgatcggtgactccggagtgggcaagacctgcatcctcttccgattctctgaggacgccttcaacacaacgtttatatccacaataggtatcgattttaaaattagaacaattgaattagataacaagaagattaagctgcagatatgggacactgccggccaggagcgttttcgcacaatcaccacggcctattacagaggtgccatgggcatcatgctggtatatgacataacccaagaaaagtccttcgagaacatcaaaaactggatcaggaatatcgaggaaaatgcgtccgccgatgtcgagaaaatgctgctgggaaacaagtgcgaattgaccgataagcgacaggtttcaaaagagcgcggcgaacaattggccatcgagtatggcatcaagttcatggagacctccgcgaaggccagcattaacgtggaagaagccttcctcaccctagccagtgatatcaaagcgaaaacggaaaagcgaatggaggcgaacaacccacccaagggcggccatcagctgaaaccgatggacagtcggacgaaggacagttggttgtccaggtgcagtctgctttgacgtggcaacgtgcgctcggcactgaagcggcatggtggcaacgactacacggtagtggtttatggtggtaactacgaggtagtagttttcttaactcctgttaggttcgagtacaagcgggaccccgacaagcggacattaactgacatctaaatcaaccttaaacatcaatcagcagccggctccctttaaccgaataagcgcgataatggaatagaacacaaattgcattatgaaacagttattaaataaagtatatgacgacagcgtgtacgaaatatacctaggcatgataatatgtatacatatatacgtatataactcaagtttaaagataaaacgatccagcgatagcgaaaatcgaagagcagccaatccaacccgcccgcgtccttctcgaagaggttttagtatttacggaattatgattttctctagcagccatggttgtcgatttgtaaattattaattgtaaaacaaatatattgtatgtactatgtatgcatatgattagtttacctgtccttgttttgctcattgcttgtatgtactttcgatcgattcagaaacccttttgccattacgttgggaatacgacggaggaggtccagacgcacaatgacccaaaagtgtaaaacagcccaatccgccccgcacctccccctacccggtcctaactttatataatataatgtggtagtatcgcacagatcgagggtgcttattatattcttcttaatcttcacacacatttcatttggttagttcgtactctatttattttgttctttgccgcacaccacatgactttgtcaataaaacgttacacctaatattaaaacattaacgaagatttgcagatttgcgagatatcaccaattaaaggtagtctatcgatgagaatcgatcggcagcaataaacaattatgaacacatacacagcgcagtaatataaataatgtgaaattaaatgataactaattgcatatttgatattaattaattacttgtaatattaatgattaaacgtatacaattttataaaaataaatcatgtgcaaaaccaaaaa

SEQ ID NO: 41733 - protein, 207 aa, DROSOPHILA
MAKTYDYLFKLLLIGDSGVGKTCILFRFSEDAFNTTFISTIGIDFKIRTIELDNKKIKLQIWDTAGQERFRTITTAYYRGAMGIMLVYDITQEKSFENIKNWIRNIEENASADVEKMLLGNKCELTDKRQVSKERGEQLAIEYGIKFMETSAKASINVEEAFLTLASDIKAKTEKRMEANNPPKGGHQLKPMDSRTKDSWLSRCSLL

SEQ ID NO: 41734 - DNA, 5515 bp, DROSOPHILA
caaataaagagaatctatatgtgtaaaactagacaaacgaaattcctccgccgtaatattccaggcgtgtctgaggctggacaaatgccaaccaatcggaggcgtgggtggggaggagccccatgctctggcacttgtagagggccaaagccacgtttgctaggttgcccaggaagtagacgatgcgctggccagttccctgggccccctccgccattttggaagtcacctgggtggtgaagatggccttgataggccggatcagcatcatgccgaccatcatgatgggaaaaatggaaatcgagtttcctgacatgtacatgatgaatagattcatgggaatctgagggaatccaaaggttaagcacgggtctttccaaagggctgctactcacgttcttaagaggtcccagggcaaggtcccacgacttcttgatgaccaggcgctggtcgcgcaccacttcactctggttcaccaaagcagatggattgtagcccagcggcgaaggaatatcagcatttttgctgcaggaaaaagcaaaagtggtaagaacttgagtcaccgcgcaggctagcaatccttacctcccgttaaagtccagcgcccactttaacttttttgggttttgcttggcggacatgctgtgctttcttttatttaatcttttgccaatttataaaacaaaatgacgattttttctgacaattggtcgctgagtgttgttcaacgttaaattccgaaattattgtagtgtagacaattcgataggcaactgatgtgtatggcaccagggtatcgataggcagttacgattttgcgcggactttttgaaacgcatgtgcaaaaatcgaacagcgcagtagttttcattaatatttaaattttatttcaaattaccttttaagtagtactttcctttttaatatggtcttatatatatgcgtgatttttaatggattttgcgtgaccaagcgacaacaagaaacagaagggttaaaaattaaaatggtatttgttgtatttttaaagagcaattacaattacagttttttctcattaatattactttaatattataaaattaaaaagaaatatatattttgatgaggggtagggagaggacaaaaataacttaaaaaagacatttttataccatatactatagtttcctttcttgtgtgattggttgggcttttcttttactcgatttgcttttaaacatccaataattatgtatacgaatttaaattatattatagcgttctttatatgctgcttgaaaggttatgtttttgcaattcaataaacaatttcagtttcttgtttggaaatacggacatgcggagccctttaagttatgcgaagatctgctgctcttgttgttggtgttggtgccgctgctgctgttttgtgaaaattccttctgatgtcgatttccaccgtttaccgctggatgttggatgtccttcagccgctctttctatggttctggttgctggttaactgcttcggctcgcttgaaatcagagttagttgtattcatattgttgctttaattttagtgtttaattagcgattagcgttcttcaattggttggacagccagtcgagtccctcgtacagcccatcaccgctagttgcacacgtcgcctggatgtaccagttgcggtttctgagtgagtgcaagccgagcttgtcggtgatttcggccgcgttcattgcatttggcagatcctaaaatgatcccagaaaagagcgaggtgcaatattagtatgacaatataaggaccgagcaactggctactgataacgacaacctttgcttggacctacctgtttgtttgcgaagattagtaagactgcatccctcagctcgtcctctgccagcatgcgcatcaactcctctctcgcctcaccgatacgctctcggtcattgctgtccacgacgaagataagaccctgtaacgattcaaatgaaaactttattccaattgtcctggcttgaatcgtaggagatagatctctaagataatatagtcagtcccgtcttgaaacaaaataaacttgaataatcacaatgcataatcattacaagctgttaacatcatatagaattttctggaatctgtggaaaagctgaaatcacacttacttgtgtattctggaagtagtgcctccacaggggacgaattttgtcttggccacccacatcccacactgtaaagctaatattcttgtattctacagtctccacattgaaacctagggggacaaccattagatattagatttggacaagatacattaaaggtgctaataagatacttaccaatggtaggtatcgttgtaacaatttcgcctaatttgagtttgtacagaattgtggttttaccagcggcatccaaaccgaccatcaatatcctcatttcctttttgccgaataggcctttgaataagttcgcgaatacgtttcccatggctgctgtttgtctttcggatgctcggtagtcgtaggaagttggatctctggttggcctgctcgctgtctgctggctggaattatgacaagttcaaatccgagttgctataccgatcagaatatgcaaactgcacacttgtgtgcatggagtgggagaatctgtgaagagtccaaaaatagacagttgtaggcgagaatttttcgtggtaggaagagctatcacaaaggacggatgcgccgaagctcctctggtgtttgtttcacttatgatcgcgcttacgtgttgaatggcgcttacccactctgagtcatacaaaaaccggaagagcggaaaaaccggaaaaagaaacgaaattcgtttttgtttattgtaataaggacgtcttcaatgcgtcagcatgagaaaaacagaaaatttgtttatgtaattaattccacacttaaatacaacgcgaaatggaggatgtatgaaacacgagtcgcttgcttttagtgtttgccccgctagcggctgctgataagatatcgatttttagtatagaaccatgacggctgtcggcgctcagcgcctcccttccaacgtcctccacccactttacacagagtacgcaagaaacgtgcgggctgagaagtgcgtgaatgataaggccaggtaacttgcagttttcggcgaacttgctgggcggaggggaagctcccaaactctacagtgagtcaccgctgccgccttttgagccctgcaaccgagcaggctgcaaccgatggctaagcaattcatgttaaaatggaggaacgcaatgagcaagcccgtttcgcacgaacacaaaaagaaaaaaggttgccagcgaaacatacggaaacctttcgtttgacagcaatcggatatccaaaaacctaagtttgttacagggaactaacaccccagagacttcttctccggaccggtagtgcgcaaagataggtgctccacgttactgagaagatgctgatgccagctgacgatagttggcttggaagcagccgaaatcgaaaactacacgtagcagcttttaatttagcgctgagggaagcgaggcagcccaccaccgcacactcacgcatacacccgcaggcgccagggttgccaactgcgttgagccgccctgcctttgctgcctttaatgcgtttaaatagaagctccaggcggagggcgtcactgctcgaagatgaacgcttcgccagcccacgccccatgttcagacatttcgcaactaagcccactttcggatcgggatcagacaactttgaactttatacgtggttgcctgcgtctgtgtgagtgacgtacgctgtttttcttatgggttggtgaaatgcggctgccgccgtcccttgtttttacaagaatacagagaccggtccgaagttacttggacttcttttaactgagatccttttagctcagtgacactttacacgtccatttaccgattattctgccttttttcgtggacttttctttgattgaattttctatgctgccaaacacaccacacaccgaattgcgaatagaaagataatggagagaaatgtatcgatagcatccgctaccgatagtcgatgagcacaagtcactattgtctgccgaacagagattgtaaaatgttcccaattatataatttagctatcacttttgtaattaaaggagagcttgtccttgtctcctgttacgataatgctataaacaaagcaccgacgattaattcgtgcggcttccaatactaatacttccactattcaccacagccgcgtacgttgcgcgagtgttcgtggatagcccacactaaacactcacacgaacatctacattactgcggaacttcttaaaatcaagaaaagtatctctgccttgacataccaccccctttttcgactgaaaacgcatacgcaccaactaattgaatcaaatgcacacggctaggagcggaaattttaaaaacttctgcttggaaatgtctaaaatcacagagcaaaataaaacttgaccgagaatacacttgctgttgaaaaaactgcaaactcaccaacataaacgttgccgatagagatgggcgcagcgcatgagctagagcgggatgccgatgttgtgtagtcccgtggtgaaaactcgggaaatgctgccacgtctcttctccgccacctcggctagagttgccaacgatttggattaatcgattcatcattgtcgcacaatgctcactcgataaagttcactatccaggtgatttgaactaagttaaatgttaatatgttttacccaaaaacaccatttttggtgaacccgttgctggaagccgatatccttaaagtgaatgtatgtactttcaatgtgcacaaatacgtatttacaacaaaaactggcttgcaaattttattaactgttaattcctggttttgtcaagtctgctgcacttgctccgctgttggaatggctgtgccttactcccaaagtcaccacttacagggtgaacactcttaggtgttccgttgacgactttcggaaaaagttagaagaaaaactcgccattcgctacggtgtaaaatctccaaggatttactgcttgccaaacctacccgagatgttgtgcattgatccgctggactcacagctcaccaaagctgtggccgactccgagctcaaggaggtagtggttgacactaactgcggagctgcactactgcgaggcgcccacatatacgcccccggtgttttagctatggagtcaaacactgagcgggaggaactcgtcaatgtctacgcagatctggatggaaaatgcaagcgcgggacggtcaagcggtacgaaagcccaaataaggttttcctgggtacaggcaaggtgttaatgcagcggtatcagctgttcaacaacgcggagaagcccgcctctggagtggccgtggaaatgcagtccaacgtcagcggagtgcccacgctgggggatctaagcagcgaagacggcctgttgcaaaacctgccttctattgtttgcg

SEQ ID NO: 41735 - DNA, 1383 bp, DROSOPHILA
tattctcggtcaagttttattttgctctgtgattttagacatttccaagcagaagtttttaaaatttccgctcctagccgtgtgcatttgattcaattagttgattctcccactccatgcacacaagtgtgcagtttgcatattctgatcggtatagcaactcggatttgaacttgtcataattccagccagcagacagcgagcaggccaaccagagatccaacttcctacgactaccgagcatccgaaagacaaacagcagccatgggaaacgtattcgcgaacttattcaaaggcctattcggcaaaaaggaaatgaggatattgatggtcggtttggatgccgctggtaaaaccacaattctgtacaaactcaaattaggcgaaattgttacaacgatacctaccattggtttcaatgtggagactgtagaatacaagaatattagctttacagtgtgggatgtgggtggccaagacaaaattcgtcccctgtggaggcactacttccagaatacacaaggtcttatcttcgtcgtggacagcaatgaccgagagcgtatcggtgaggcgagagaggagttgatgcgcatgctggcagaggacgagctgagggatgcagtcttactaatcttcgcaaacaaacaggatctgccaaatgcaatgaacgcggccgaaatcaccgacaagctcggcttgcactcactcagaaaccgcaactggtacatccaggcgacgtgtgcaactagcggtgatgggctgtacgagggactcgactggctgtccaaccaattgaagaacgctaatcgctaattaaacactaaaattaaagcaacaatatgaatacaactaactctgatttcaagcgagccgaagcagttaaccagcaaccagaaccatagaaagagcggctgaaggacatccaacatccagcggtaaacggtggaaatcgacatcagaaggaattttcacaaaacagcagcagcggcaccaacaccaacaacaagagcagcagatcttcgcataacttaaagggctccgcatgtccgtatttccaaacaagaaactgaaattgtttattgaattgcaaaaacataacctttcaagcagcatataaagaacgctataatataatttaaattcgtatacataattattggatgtttaaaagcaaatcgagtaaaagaaaagcccaaccaatcacacaagaaaggaaactatagtatatggtataaaaatgtcttttttaagttatttttgtcctctccctacccctcatcaaaatatatatttctttttaattttataatattaaagtaatattaatgagaaaaaactgtaattgtaattgctctttaaaaatacaacaaataccattttaat

SEQ ID NO: 41736 - protein, 182 aa, DROSOPHILA; identical to SEQ ID NO: 23463

SEQ ID NO: 41737 - DNA, 8915 bp, DROSOPHILA
ctcggcgcgtcacacaagccaatcaatacatgtaatacgtatgagtagagcaacaatagtctgcgagtttttggatgaaattcgtaacatcttgatattgctgatcaatcaatggataatatcaaactgtccataacgtttagccgttcgtgtttcacttccgcttgttatttacattaataattacaaattaaatggaattccacgacatggtctggcataaataataataaactggccaagctggcctaatacaattaaaatgtttaaattatatacaacaaaaacaaagcaacaagaaactattgagaatggatttgttcggcgtaacaacctaagctccacattggccaaccaatataacatatcatctacaagctaaatatgaatattgtatattacatgcattacacaattctcggcaaagaaaaataattcgtcctaaaactaattaggggataattaatcaactattgcagaaaatcaaaataggcttagaatagtaaataacaaaatataagcggttcgaaacaaaacacaaaccctctagaacagaacgcataaaatggaaaaatatatcttcatagccgcgatgtccacgacatcagttaggaaattgagcacagcttcttcagctctccctcggtctcgtccacctcgagtggcacactggcggtattgggcagcgtccgtccctcgatgttcggtaggtaaggctcgtagtccaggcccttgcgttcgtagaacagcagatatgcagcacttggatcgatgaccggcttctgggatatttcgcggcaggagctgtcgttatagcagtaccaggaaccagttgcattcgaagcataggaaatgtagtgacctccgttcagcatgcccgagtgagactacaaaacaagatataaggttatcacacaatcaggaggattaaaggcataggctacacccaccacaacagcatagagtcggtatctgggatcgaactgatccacatctggtttaagtcggtgttggtgatagtcttcgaactcgccatcaacgataggcgtttttgtgagactcgtagagatgaggcgttgtcgccggacagcatttttggtcttgctctggcgcagaatattccctgtgggcggtggcgacgccgtagcctttgtggaccccgtttgattgggtagttcttccttaacctccttactgggtgcatcaatctcgtccaattcgctaacaacttcgttagttgccatcgtcatttctgcatcattctttagctccagcagctccttgtgccgcagtatcgtctcctgagggactgaggccagatacggagtaggatcgaagtcatcgaaaggaaagtggaccactttctgtgacttcacccatttgccgttgacgcagttaaaccgcttcaagtgaacaatctgaggaatagaaattatcaataaaatttcactaggcaattggccattaggcctggcttaccaatatcggaggtagcttccagatctggagcttcttggtggcgggttttttgcccttgcaatgactgcagtgataccactgctccagtttctcctccgaggtgaaggcgcgcaggcaatgattcaggtctacgggctccacttgctcccgccgacttatggcaatggtctcgtgatccacccacagctaaacaattacaaatataagtatcccgtggacaaaataatgccgagtctacatacacgctccaaggtgctttggtagcgcaagtgcagggcggtcggatcccagtcgatggcaatggtgaagtcttcaaagtatttggttgtcggtgtgtacgacaaggaggcggtatattccggcgtccgtttagcctccagatttggtagcgatgggaatttagcattcatttttggcgttgatgtattacctgaaagtgaaagtagaatgtttatttctagcaacggcaagcggattttaaggtctctacgcactggcggcggcattgatgggcggcagggctccctggagtacataatcattgttgcatcgaatctcgcatccgcgacagaagcttgaccaagggcaaatagcgcaggttagaccatctgccttgacggcacgcaacgtgaaggggaaatcgtagcccaggctgtcatcactgcgtatatacacaagatcagtaaacaaaagcagcaagcaagtggaaatactcaccaatcggcggcatgattcgcctgttccgtggtggcaggcaatgggctgagtagcctgctcacctgcagccacacggcgcagtaaagatccttgtgggtgccaccctcgctgtttggaatgagcagcggaacgccaaagagacttggtctcgtcttgtggtaggacaggaagtagctgtcatgccgcgttatctttcgatgtacggctaccaaatacttgcccgccttgtgcggcggctgggaggagcgacgagagtagaccccgctactggtctccggctgcgaggttgtgatctgatccggctgatcgtgatcctccgcgttgccctcttccgcctgctcgtccacgtccaaactggcgcccagggtgtggcccgtgctgaggccactggaatcgtttggcgacgtccggtaggagcagtcctcgccgccactgccattacggctgctaaccggctccaggtccgccaatggaatgggttcggtcagcgagctctccatggaattttcgccggaatgattcgtgtaggacatggagctggtattactctccgtgtgcagcagcttggcggacgatacgcgcttctgttgggcggcagcgccgtgcataaatgtgttctccgggctggagctcagaattagcgactcctgcaccgagagttggtattagacttaagttgtgctgatacggggttagttattaaagggactaggtgggtgtagtcgtgaattgaagctttgggagctatattaaccatggaacaatctactttcaaatttacaaaatagctatagggtaaacgctaaaactctaaaacaactttaaaatgtataaattgtttatggcacgtgttttaattaacttgttggttctttttagttgtttagtgagggcggtggagtgtaaaacagtagctatttaattaaattgttttaggtttcatacaagtctcgaaagataacctgttttttttttactcaaattttaaatataacggaaaattacatcaaagacatttaagatatgggaattgaaaatagttttaagattaaattgacgaaaattttaaaatcttcgaagaaattttataatttgaatacataaagatagatctttttatccaaaaatacattaaaatacatctaacaaacaagctaagacaatgtatttcttttcggatactcaaaactttctaaaaacgaacacaatatatggatatatggcatcgcaaagctatgagagtgaccaaaaactactagaaaaataatatttcacaagcttccaacttgaaaaccagcaacaacaaagagatttccaaggatagccgagaggtgatacgcagtgtttgattgggtttaagcaaataatttacattagttatagaataaggccagcaacaaagtaagtgattagtagaaggaaggatgtatatattacaaataattgatatcaatttggtaaaagtgtgcgaatacgaaagtagggagaatatacagagtatgctagtacatttgagtaaataagagggaagcccacaaaccacgcagcaaacggcaactgttcatttaacatagtgtatttaatatatttagattaaacgcttgtaaagtgacaatcgagaagcagacggaggcggattcttggcggatctcgcattcgcaatcaaagacgacccgacgatatatcatacgagagtagcagcagtttcgccgctgaggagcaagctcgctatcctaggcaaggaaagttctgaagctctgaattttagaattcgatatggccccaaatagatggggcgtaaatctatgatattaaatacgtatatgttaatatagtttagaagccataccttgaagcaaaataggctgtggggcatgcactctctctttccaaagcaccggcttacctttccggcctcatctggcagcagttcgtgcacctggttgtccccgcttccgtttccgctgtaagtgcttacaataggattgtaattgctgttgctgttacattgcgacacatccgtgcccacctccgcctcgccttcgacatccaggcccgaaacgtgtccgttgcacaggactcgtgacgaggcgcggtggctggacgtctgcaaagtgctcagcgaggacagcgagtcctgggcgctcgtgatgagagctgaaagttcaaaagtgtagaaacacattcatctgctatatcattgggtggcttaccggaactgcgctgtatgtccttaagaccctgctcgatgtgcatgctaagccctgagttggatcgtgttcgcatactttgttccggcagctgatagacgtacagctccttggcactctgcgtccgcagtttctcgtcgtcgtttagcacctggcgtatttgtgagttccatagctcgcagacgagcattagatttggaggcagggagcacatggtggacaacttgtgtttcaggtgcgagtacttgcaatcggagttcagacgaaaaccatatttgattggaacgcttccatccaacagaataactacaaaaaagaaaagtattaataagtacaataataaacatagaagtattgggttcaactacgatttactcacccaagacctcaaagtagatataattctctaccggaagcggcaaactgagcagactaaacggatcgaatcgcaccgattcgtgtccacaacccagacagctgaccttggatttcaactggccgtagaacagatcaatgataattgactggtttcgggcgtggtgctgggaccaggcctcggcggccactattttgtctgggcgcccattcgagtccttcagctcgctgtacggtttctccatcacacggttaaggtcctcatgcagagcgtccaacagccactcgagcagctcctgggaatcgtgctgacctccaccggcgaactgcggcgcatacttgttgacacaaaagcgtagcttcagcggggccacagatctagtcgtggccgtccaaacctccttgagcagctccgcatagcgcatggctagctgaccctttgtgcccagtttgttggccgcgttcacctcgaagcgatgcatctcacgctgaaagtattgtgccagtggttgggtattaaacagcacctggagagcggcgttcatgaagcaggtgttgcccaggttgtgcaggcctgtagctccgggcgcatgtaccgacataattgaactgcgtgttaagcgacgccggtcccccggtgttcccgcaccctggccacattgagcggtggccaaggagccaagttcctccggccaggtcaaatctttgttgcggatttccagcaacagctggtcgttgtcccgaatgagcaactctttcaggcacatggcatcctcttctagcaatatggcaccgttgtccagctgtggaacgtgccatagccggatatcttctgacttaagacgcagttgctcgcacaaaaactcgcccacctgacgcaccgtggccagtcggctgaaggcagccgtgtaggccaagtatcgcttcggcggttggagtacactgcttacagcgatggcggcatatccgccaccggaggcaagcactccgtagccaccgctcaccgtggagccccaactaccaagttgagtgcctccgcctacgcctgtctgggatggctgcgcctggtggagcaggattcgcaggttcagcgggtatagctccagttccacatcggagttgggcggttggatgacctggaggaatacaaattaagttcataagtaaacgtttctgattattaaatagttttctttgcttacctgtcgtggcagtggaagattatcgccataccatcgattcaatgccttccacagtgacttgggcaccagttcaaagtcgtggttctgcaccaggggtgtgtcccgcttgaggtgaccaccctcgccggtgagagttcgaacattccggaacggattggcggtgatcagattgctgttgtcaataggccctggtcgcacgggtccgcaatgtcgtccagctgagatgccactactcgccgacccggaaccggaagccgatcccgtgccagaacccagggagtagctatcgtgctgttccaagctgtgggtgttaaagctctcatcgcagacgagcgcctcatcaacagcggtccgctggctggcggttcgcttgcaatagtcgcaggtgtgcgtcgtgtgctgagtgtattgcatccaactgagccaccagtcatgcgtgatcaagtaccaaaactgtccaacgcggtacggcctgcgctcctcccgtcgcaaccatccccggacgatatcgttctccatgtgcttgcactggggccacaggccaaagacgatgtggcacagctcgaagatgaggtccagcaagggctgcatgagtcttagatcacactgtacggtccacagcataaaatcctcagcggtcagcgagacattgtctcgggttagcttactaggcgttccatccggacttcttctctgtccaaactccagaagatcacttatcaccagctgtttggtcagatccttgtattgctgggactcctgattttccttggctactaatagcagaacattgatcatctgcagtgtttcatcgtggctaagaacgccatctcgatccacatcgaagattttgaagcaaactgtgggtaggcgtttgttactcaattgatcatagcggaatgataaaagtatttagtacttacatcgtgtcctttccacacccggtcctcggcaggcggcacttactccgcaacacagctccttaaagtcgatgtgtccgtcgcggttctcatcaaaggcgttgaatagacctgctagagcattctttggtatgggtggactgatcaggggtcccaggaactgcaagtcgatttggccattttgggaagtgtttttcaaacgccaaaactccttttccaaatcgccaatgtcctgcaaaagaattgaacggggtttcagtatgaactagtcaaacgtaagaacgcaaatgagaggcgattgaggtaaattgagtggcggataacaaaacagttgaggaaccaagcgaaaattatttataaattgcattttccacgaaatgattcgctcgcatatgtttacaaagctctatcagcctcagctgcagatgctcaccttctcctcaagatgcgtcactccagcgaggctctggtaaaacgttggcgtctccagctccgatgtgaggctaacacagttgtcggacagaagccatttggagaggacagtggcattgcgatgctttatgatccagtcctggaactgctcgaaattgacgcgttcgctttgagcgaatagggagacgctctcgaagggagccagattgacgttgcgcacatagtccgacttgatgatgaaggtgccggcatcgttgcagtacaggttccacaggaatctaaaacgaaagtaagtagttgggttacctaaaatcaattcagccttgcacattatggcacactcacttggttttctccgcttgggtaccacgagttatcaagaccagaccgcagagcaggtcgttaaaggagatgccacgctgggtgccaccacaggcggcatataacatgtccacgatctttggcggcactccctcgcacagcacatcctgctgaaaggcattccgactgaggaagttcctgcccacgcccgctgactttttgaaggcatctctcaggcggcgaagctctacgtcgcttactggaataaaaaatcggtgaatgagtaatgctgcgttagggattatcccatgtgcctttaattaatagccggtatgccgggtaaccccctcatttgatgcgatttacgacctcgatttcacactaaccgacgtgctgtcaataacaaactgattattgggaacacatgttccagtatggaaacccaattcaaatacattcgctctaattgtttaataatatacattataataatatcaataaacattatttccgagctcatttaccaattccattacatatggtattagattcgttgttacctaattaaccattatcagtaattgatttttcactaattacctgaagtgcaaaaaggttacccacaaaccaatagaaggtaacatgaatattatgttctttaacgataattattaattatattaattatattttaggactgttttcatatgatcaacaaataaaaaaaatttaactaatatttcttgccctaaaacgataaattatatataagttaaaaaatgaagagggtatcccgaagtccgccacacaaagttaattttatttgtttaataattgtgaatcatttcccgtggaatcaaagcagcataacatacgacagtttaaaatcgtttagcacttaagtcagaaaatgataagaaacgaaacaaaatgttcttgttaatatcgttgcgcattctcaatagtatgctaattcatgttacttcatcttaaatgtactacatgttccctatttaaccattttcattcatgccccgttcataacgttataattcataacgttgattatttaatgtcggaaataaaaggccacaagaagcgcaattaaattgacaataaataaaccattttaatttcaacgatcaggttgagaacccagagccaactgataaccgccaaaccgggcgtgaaaatacattcccaagttgattgggcaatattgcaggcgaattatgcgacgtcacggaaacggcatttta

SEQ ID NO: 41738 - DNA, 5586 bp, DROSOPHILA
taagcgacgtagagcttcgccgcctgagagatgccttcaaaaagtcagcgggcgtgggcaggaacttcctcagtcggaatgcctttcagcaggatgtgctgtgcgagggagtgccgccaaagatcgtggacatgttatatgccgcctgtggtggcacccagcgtggcatctcctttaacgacctgctctgcggtctggtcttgataactcgtggtacccaagcggagaaaaccaaattcctgtggaacctgtactgcaacgatgccggcaccttcatcatcaagtcggactatgtgcgcaacgtcaatctggctcccttcgagagcgtctccctattcgctcaaagcgaacgcgtcaatttcgagcagttccaggactggatcataaagcatcgcaatgccactgtcctctccaaatggcttctgtccgacaactgtgttagcctcacatcggagctggagacgccaacgttttaccagagcctcgctggagtgacgcatcttgaggagaaggacattggcgatttggaaaaggagttttggcgtttgaaaaacacttcccaaaatggccaaatcgacttgcagttcctgggacccctgatcagtccacccataccaaagaatgctctagcaggtctattcaacgcctttgatgagaaccgcgacggacacatcgactttaaggagctgtgttgcggagtaagtgccgcctgccgaggaccgggtgtggaaaggacacgattttgcttcaaaatcttcgatgtggatcgagatggcgttcttagccacgatgaaacactgcagatgatcaatgttctgctattagtagccaaggaaaatcaggagtcccagcaatacaaggatctgaccaaacagctggtgataagtgatcttctggagtttggacagagaagaagtccggatggaacgcctagtaagctaacccgagacaatgtctcgctgaccgctgaggattttatgctgtggaccgtacagtgtgatctaagactcatgcagcccttgctggacctcatcttcgagctgtgccacatcgtctttggcctgtggccccagtgcaagcacatggagaacgatatcgtccggggatggttgcgacgggaggagcgcaggccgtaccgcgttggacagttttggtacttgatcacgcatgactggtggctcagttggatgcaatacactcagcacacgacgcacacctgcgactattgcaagcgaaccgccagccagcggaccgctgttgatgaggcgctcgtctgcgatgagagctttaacacccacagcttggaacagcacgatagctactccctgggttctggcacgggatcggcttccggttccgggtcggcgagtagtggcatctcagctggacgacattgcggacccgtgcgaccagggcctattgacaacagcaatctgatcaccgccaatccgttccggaatgttcgaactctcaccggcgagggtggtcacctcaagcgggacacacccctggtgcagaaccacgactttgaactggtgcccaagtcactgtggaaggcattgaatcgatggtatggcgataatcttccactgccacgacaggtcatccaaccgcccaactccgatgtggaactggagctatacccgctgaacctgcgaatcctgctccaccaggcgcagccatcccagacaggcgtaggcggaggcactcaacttggtagttggggctccacggtgagcggtggctacggagtgcttgcctccggtggcggatatgccgccatcgctgtaagcagtgtactccaaccgccgaagcgatacttggcctacacggctgccttcagccgactggccacggtgcgtcaggtgggcgagtttttgtgcgagcaactgcgtcttaagtcagaagatatccggctatggcacgttccacagctggacaacggtgccatattgctagaagaggatgccatgtgcctgaaagagttgctcattcgggacaacgaccagctgttgctggaaatccgcaacaaagatttgacctggccggaggaacttggctccttggccaccgctcaatgtggccagggtgcgggaacaccgggggaccggcgtcgcttaacacgcagttcaattatgtcggtacatgcgcccggagctacaggcctgcacaacctgggcaacacctgcttcatgaacgccgctctccaggtgctgtttaatacccaaccactggcacaatactttcagcgtgagatgcatcgcttcgaggtgaacgcggccaacaaactgggcacaaagggtcagctagccatgcgctatgcggagctgctcaaggaggtttggacggccacgactagatctgtggccccgctgaagctacgcttttgtgtcaacaagtatgcgccgcagttcgccggtggaggtcagcacgattcccaggagctgctcgagtggctgttggacgctctgcatgaggaccttaaccgtgtgatggagaaaccgtacagcgagctgaaggactcgaatgggcgcccagacaaaatagtggccgccgaggcctggtcccagcaccacgcccgaaaccagtcaattatcattgatctgttctacggccagttgaaatccaaggtcagctgtctgggttgtggacacgaatcggtgcgattcgatccgtttagtctgctcagtttgccgcttccggtagagaattatatctactttgaggtcttggttattctgttggatggaagcgttccaatcaaatatggttttcgtctgaactccgattgcaagtactcgcacctgaaacacaagttgtccaccatgtgctccctgcctccaaatctaatgctcgtctgcgagctatggaactcacaaatacgccaggtgctaaacgacgacgagaaactgcggacgcagagtgccaaggagctgtacgtctatcagctgccggaacaaagtatgcgaacacgatccaactcagggcttagcatgcacatcgagcagggtcttaaggacatacagcgcagttccgctctcatcacgagcgcccaggactcgctgtcctcgctgagcactttgcagacgtccagccaccgcgcctcgtcacgagtcctgtgcaacggacacgtttcgggcctggatgtcgaaggcgaggcggaggtgggcacggatgtgtcgcaatgtaacagcaacagcaattacaatcctattgtaagcacttacagcggaaacggaagcggggacaaccaggtgcacgaactgctgccagatgaggccggaaaggatagcgagcttgctcctcagcggcgaaactgctgctactctcgtatgatatatcgtcgggtcgtctttgattgcgaatgcgagatccgccaagaatccgcctccgtctgcttctcgattgagtcgctaattctgagctccagcccggagaacacatttatgcacggcgctgccgcccaacagaagcgcgtatcgtccgccaagctgctgcacacggagagtaataccagctccatgtcctacacgaatcattccggcgaaaattccatggagagctcgctgaccgaacccattccattggcggacctggagccggttagcagccgtaatggcagtggcggcgaggactgctcctaccggacgtcgccaaacgattccagtggcctcagcacgggccacaccctgggcgccagtttggacgtggacgagcaggcggaagagggcaacgcggaggatcacgatcagccggatcagatcacaacctcgcagccggagaccagtagcggggtctactctcgtcgctcctcccagccgccgcacaaggcgggcaagtatttggtagccgtacatcgaaagataacgcggcatgacagctacttcctgtcctaccacaagacgagaccaagtctctttggcgttccgctgctcattccaaacagcgagggtggcacccacaaggatctttactgcgccgtgtggctgcaggtgagcaggctactcagcccattgcctgccaccacggaacaggcgaatcatgccgccgattgtgatgacagcctgggctacgatttccccttcacgttgcgtgccgtcaaggcagatggtctaacctgcgctatttgcccttggtcaagcttctgtcgcggatgcgagattcgatgcaacaatgattatgtactccagggagccctgccgcccatcaatgccgccgccagtaatacatcaacgccaaaaatgaatgctaaattcccatcgctaccaaatctggaggctaaacggacgccggaatataccgcctccttgtcgtacacaccgacaaccaaatactttgaagacttcaccattgccatcgactgggatccgaccgccctgcacttgcgctaccaaagcaccttggagcgtctgtgggtggatcacgagaccattgccataagtcggcgggagcaagtggagcccgtagacctgaatcattgcctgcgcgccttcacctcggaggagaaactggagcagtggtatcactgcagtcattgcaagggcaaaaaacccgccaccaagaagctccagatctggaagctacctccgatattgattgttcacttgaagcggtttaactgcgtcaacggcaaatgggtgaagtcacagaaagtggtccactttcctttcgatgacttcgatcctactccgtatctggcctcagtccctcaggagacgatactgcggcacaaggagctgctggagctaaagaatgatgcagaaatgacgatggcaactaacgaagttgttagcgaattggacgagattgatgcacccagtaaggaggttaaggaagaactacccaatcaaacggggtccacaaaggctacggcgtcgccaccgcccacagggaatattctgcgccagagcaagaccaaaaatgctgtccggcgacaacgcctcatctctacgagtctcacaaaaacgcctatcgttgatggcgagttcgaagactatcaccaacaccgacttaaaccagatgtggatcagttcgatcccagataccgactctatgctgttgtgtctcactcgggcatgctgaacggaggtcactacatttcctatgcttcgaatgcaactggttcctggtactgctataacgacagctcctgccgcgaaatatcccagaagccggtcatcgatccaagtgctgcatatctgctgttctacgaacgcaagggcctggactacgagccttacctaccgaacatcgagggacggacgctgcccaataccgccagtgtgccactcgaggtggacgagaccgagggagagctgaagaagctgtgctcaatttcctaactgatgtcgtggacatcgcggctatgaagatatatttttccattttatgcgttctgttctagagggtttgtgttttgtttcgaaccgcttatattttgttatttactattctaagcctattttgattttctgcaatagttgattaattatcccctaattagttttaggacgaattatttttctttgccgagaattgtgtaatgcatgtaatatacaatattcatatttagcttgtagatgatat

SEQ ID NO: 41739 - protein, 1779 aa, DROSOPHILA
SDVELRRLRDAFKKSAGVGRNFLSRNAFQQDVLCEGVPPKIVDMLYAACGGTQRGISFNDLLCGLVLITRGTQAEKTKFLWNLYCNDAGTFIIKSDYVRNVNLAPFESVSLFAQSERVNFEQFQDWIIKHRNATVLSKWLLSDNCVSLTSELETPTFYQSLAGVTHLEEKDIGDLEKEFWRLKNTSQNGQIDLQFLGPLISPPIPKNALAGLFNAFDENRDGHIDFKELCCGVSAACRGPGVERTRFCFKIFDVDRDGVLSHDETLQMINVLLLVAKENQESQQYKDLTKQLVISDLLEFGQRRSPDGTPSKLTRDNVSLTAEDFMLWTVQCDLRLMQPLLDLIFELCHIVFGLWPQCKHMENDIVRGWLRREERRPYRVGQFWYLITHDWWLSWMQYTQHTTHTCDYCKRTASQRTAVDEALVCDESFNTHSLEQHDSYSLGSGTGSASGSGSASSGISAGRHCGPVRPGPIDNSNLITANPFRNVRTLTGEGGHLKRDTPLVQNHDFELVPKSLWKALNRWYGDNLPLPRQVIQPPNSDVELELYPLNLRILLHQAQPSQTGVGGGTQLGSWGSTVSGGYGVLASGGGYAAIAVSSVLQPPKRYLAYTAAFSRLATVRQVGEFLCEQLRLKSEDIRLWHVPQLDNGAILLEEDAMCLKELLIRDNDQLLLEIRNKDLTWPEELGSLATAQCGQGAGTPGDRRRLTRSSIMSVHAPGATGLHNLGNTCFMNAALQVLFNTQPLAQYFQREMHRFEVNAANKLGTKGQLAMRYAELLKEVWTATTRSVAPLKLRFCVNKYAPQFAGGGQHDSQELLEWLLDALHEDLNRVMEKPYSELKDSNGRPDKIVAAEAWSQHHARNQSIIIDLFYGQLKSKVSCLGCGHESVRFDPFSLLSLPLPVENYIYFEVLVILLDGSVPIKYGFRLNSDCKYSHLKHKLSTMCSLPPNLMLVCELWNSQIRQVLNDDEKLRTQSAKELYVYQLPEQSMRTRSNSGLSMHIEQGLKDIQRSSALITSAQDSLSSLSTLQTSSHRASSRVLCNGHVSGLDVEGEAEVGTDVSQCNSNSNYNPIVSTYSGNGSGDNQVHELLPDEAGKDSELAPQRRNCCYSRMIYRRVVFDCECEIRQESASVCFSIESLILSSSPENTFMHGAAAQQKRVSSAKLLHTESNTSSMSYTNHSGENSMESSLTEPIPLADLEPVSSRNGSGGEDCSYRTSPNDSSGLSTGHTLGASLDVDEQAEEGNAEDHDQPDQITTSQPETSSGVYSRRSSQPPHKAGKYLVAVHRKITRHDSYFLSYHKTRPSLFGVPLLIPNSEGGTHKDLYCAVWLQVSRLLSPLPATTEQANHAADCDDSLGYDFPFTLRAVKADGLTCAICPWSSFCRGCEIRCNNDYVLQGALPPINAAASNTSTPKMNAKFPSLPNLEAKRTPEYTASLSYTPTTKYFEDFTIAIDWDPTALHLRYQSTLERLWVDHETIAISRREQVEPVDLNHCLRAFTSEEKLEQWYHCSHCKGKKPATKKLQIWKLPPILIVHLKRFNCVNGKWVKSQKVVHFPFDDFDPTPYLASVPQETILRHKELLELKNDAEMTMATNEVVSELDEIDAPSKEVKEELPNQTGSTKATASPPPTGNILRQSKTKNAVRRQRLISTSLTKTPIVDGEFEDYHQHRLKPDVDQFDPRYRLYAVVSHSGMLNGGHYISYASNATGSWYCYNDSSCREISQKPVIDPSAAYLLFYERKGLDYEPYLPNIEGRTLPNTASVPLEVDETEGELKKLCSIS

SEQ ID NO: 41740 - DNA, 17196 bp, DROSOPHILA
agtcaaaaattcaacttatttcacagtgtgtaaacagtttcttgacaaactgtaaataaaagatagttctgaaagaggggatgctgtctttgaaagatactgtcctactgtggcaagccccgccccctttataatttttcaccggcctaggtcccgttttatttaatgatgttctacgtccacctcttcctattaaactccatggtctacgaccattagtttgggctcctcctctttgttggttaccgttatgataaccttgatcatgatgactggcgccattgtcattgtcagccgcctggttaactttatgttgttgctgagttctatcgatcttgcatatacatatgtatgtttatgcttgcgagagcatgctgttgcgtgaaatttgcggagttgtgtcagtcagaattagcgcccaatttgcaaatccacaaggtggacttgtgtcaaagttctgcccgacactaaaacgcgttaagcgaccgcatgttccaagaacttggaaaatttccaagatatgcagctgataaaacagctgatagcgctgccaacttatcgcagtgggcgatcttgcgatcaacggtgcgatcggtgttgagttgcgaccgtttggcgcgaaattcaaatttaaattttttatttaatttgttactattaataataataaattaatacaatacgtgacgatgacgatggtgatgatcgtgcccaacggcagcagacccaattgtaaaaagttgtaatgcagaagcataagtctaagtacaggctccactagcactgtttcgcacttctgggccgtgatattaaaaaaattttactttattaactcgatatttttatgcatttaattatcaggaaagcatattaacacgttcttggatcagtttaattatttcaccgcacgcattgatctttcttggtatactgggtcgtattgttcatagaaacaatagctgtatgggaaatcctcataaccgcaaaaaatacaatcagttcaataagtaattttctattttattatttatatatgtattaaaaaccgtccacaaaatagctgcacgatattttgcttaagataaaaagaattgggtgacttaagtgtagatacaagtagattgtacgatacgaacatttagttaggaggagcacaacattcacacacggggacagccacggatttcggcttagaacaatggaaaaaagatgtggtaagtggtaagcgcctttagcttgaaatatttatgtataataagcacacgagctataactaggaggaattgcacgttgcggatcgagtgtgagcagcgggttacgactgcggcaggttctggtagtaggtggccaggatgcgccaagcctccggttccatgaagccatccggcggactggctcccgttttggccagggtgcgcatcttggttcccgagatgaactcaaactcatccttcctcttgggctcgaagaaggccattctactggcgctcttgtcataggcagcaacacggaagggcaggatctaaaaagaaaatatcgattttacattcggctagatttggccgattaggcagtggtacccttacctccatgctgtctagtccctgggccatcttaagcactcgcgcaccatgggtggcatcgtataggtttccatccggataagtttccttggccggatgcggcatgccagccggatcacggcctacaatgtagaagttcgcaccggcgttcatgcgcgcctttgcgtgccactgcacctccgtgggaccggcgtacatcattggcgaggggaagatggccagcactgtgtcctctcgtcgcaagacacctgcgtcgagcacggcctggtgctgcttcatgcgcacatccagcggcacatcgtcgtccttggtccagccacccagaggatgcagcagcagcactggctgcttgaagccgcgctccagcagctggcggcgagtgtcttgcatgagcagggcatggccgttgtggatgggattgcgcaactgaaaggcgaagatggcgtcggcattcagctccttaaagcggcgccttaactcgttgggagtcagcctgtactgatccagtccgtcctcccagcggatacgttcgatcactgccagatcgccaccgaccaaataatccccggactcgtagacctgcttactgtacgggtgattgggattgctggtgccgaactggcgggccagccgctcctccttacgctgaaagtagaactcgggacgccgcagaatggctaccgccttgccttggtatttgagagtcagcgaggagcagccgtccagacgatccttgtccgcctgcgtggcgctcaaaacaatgggcaccgagtggttctcgcgataggaaccgtccatgccgctctgaagtgtgttgaagtgcagcgtctgcaggtactcatcctcgcgcatgaagccgcgcagtggatatgcccatccctcggccagtacttgcacccactgcagctccacggtgctgatttcgatggcttgcagcgactcggcctcgtgacgcagtgcctccgtggcaatggattcgctgggataaagctccggcagcaggtctacgtcgcgcagcgagcgcggaataatgccctcctgttcgagcagcgtcaccagcttctgagtggactcgcgcaccgtgtagccgtgcgtgttgaccaccagctccggcatctggggtcgctcgtactcctgcgtaatgcccgtgaatcctttgattacgccctcgcgcgccttcttgtatagacccttcacgtcccgggtttcgcacacatccagcggtgtgtccacgaatatctcatagaacttcagacccgcatccttgtggatcttgcgcgccatctcacgatcgtcggcgaagggcgaaacgaagctgcagatggccaccactccgctgtcggcaaacaacttggccacctcgcccacgcggcgaatgttttcctcgcgatcggcgggcgtgaagcccaggttcttgttcagtccggtgcgaatgttgtcgccgtccaacccgtaggccggaatgccccgggataccaggtacgcctccagttcgaaggcaatcgaggtctttccagctccactgaggcctgcaaaggattgagtttattatatatgtatattaatgttcaaaagcgtaacagtgaaatttcataattcataaaacaaccaaattacaactaatttattttattattttggacaacaatcattctttgttcttatactttgtggtttttataatctaataatagaatcttagtattttacaaagcaaacatttgagagcaaagaaactttaattaaactatgactcttgttattagaaatatttacatatttttgaagccttaataaggcaatgatcttttcctgaattttactgccctcaggaggcactatatttcttaccagtcagccacaccgtgcatcctcggaatcctcgacagagtcccaaattcttgccgcgcgtctccctggtgacatggtgcttttgctcggtcacattcgtcgccacctgtaggcactgcaaacagaaatgtaatcgggtttagctttcgaaattaacataaattaatattcatgtcaagttgggctggcgatggatgccgcctcgggcgccttcttttcagattcttagccacggcgtccacaaaagttaaactcaaagaggctggagccaaaatcagaatcagaatcggaatccagtgccagaggcaagtcatcatcgaaatacttggctttgaccccggggcgatattcgtgctgagctccaacgttcagtttgttgaccttccgctggaactcgagtgtgcagaatcgcgaatgggcgaatggagttatgcgatatgggtatgcccatgggtattcaaaaagtgggcactcatttacattcgtggtagtctcctgtattgtgccaaataatgatttgcgctcagttattaactttaatttcgaaatgaaattccttatgcctccaaaaaagcacttttttttaacatatatcctattacataatgtttcggaagtaaacataagtatattgctaactaaactgagcaacagttttccattttatagctttcttatcagcttagccatattcgcagatggttaagaagtgggtcactgtgctagattttcatttatacgtttcactttaccctccgctgatcccagtcctccaaaagcccccatttgcctttttacgcttgctgttcacacatgaacacgaatatatttaaagacttacaattttgggctccgttcatatcttatgtaaatgaatcgagagcgataaattatatttaggattttgttatctaaggcgacatgggtgcattgctcaaaaacatgtaatttaagtgcacactacatgagtcagtcacttgagatcgttccccgcctcctaaaatagtcccttagtgggagaccacagataaggtcctcgccgctcaagataggcagatgtgccccgagcgtgggacctcgataaggcggggactatttacttaggccttctgcgtaggccatttactttaagatgcgattctcatgtcacctatttaaaccgaagatatttccaaataaaattagttttcttacaaaaactcaaccgagtaaagtcttcttatttgggattttacatttggtcaatcgagcctttaatcgactctgcagtttccccctaccaaaggtaaggaactcagagaaaggccagctcctttaagcatcttacagctaaaggtagcaaaaataagtgactcttgtttccccctaccaaaggtaaggaccagagtataaatataaaagcaaaaagatccaaaagaatcttttatgttttaaaacaagcaccttatagtctatagctaaaggttgctctgtgtaccattataaattgtggtaaggcgtgcttgaggccatacatcagcaattgtgaaattaaaaaggtgcataacaaaagtgccttataaatgctctaatagcattaaatcagctcataaatagagtgcagtgtatatgccataagagcataaattaaataaaaagtgcctgaaaacagtgccttataaatgctctaatagcattaaatcagctcataaaatagagtgcagtggtatatgccaaaagagcataaatgccgaaataaatggctaaaaaacaaaaaatctgactgggactacaaaaataataaaacggtgccaaaaaaaaaaaaaaaatcatctttaaacatcgccggagccttaaagaagagaaggaagtcaaattcaaaggagcctctaccagcagcagaagcagcaacaacagcagcagcagaagcagcaacagcagtagcaacagcagcaacaacagcagcaacagcagcagcaacaacaacgacatcagctaagtcaaaacaagaattttctgtttatccaaacacaccatatatatataaatacatataaaatacatataccaccgtcctatatatattaagaaattcaaaaaatttttcaaaatgatgtcagaaagactattcaattccttaagaagcagtccgaaattattttggaaattagaaagttggaagtaaaaccaacattacagatgtagaaattctaaaattaaatgagcttcaaaaaatgtttcattgctaatcatagcaatttgttaaagatcggcgtgtcgatcatgaatattttaacgcgaagcagtatgatttaataatgatggtgtagaaaaaattaaaaataaaaatgaaaaaattaaggggcgagtcggtagaaaacactttccttaaatcaaacactgtccttaaatcaaaccctccccctacattaaaccttgaaatgcgtggtcaccctgaaaaagagggtatagcacaaaacaacgctttaaaagtagagcaggcatttcgtaataatgttggccatttcgagtatatctagaagatacgtctaaactaatagacagtagtccagatttccttaaaataaggaaaaataaaattgaatttttatggcataaaatagataacctgatgaacaggtgaatagtcattttgagagttcgctattcgaagaagaaattagcgaacttgaatttgacaaacaaaatattcttacagccattaatagtcgactcagtggcacaataaataaagtgaaatgtcgcggttgttaaggcggaggagttaccaaccctgcctaaaatacagattcccaccttctttggtgattccaaagaatggggatctttttaatgaactctttacagagctcatacatgtgagagaggatctcagtccttctctcaaatttaattatctaaagtcagcattaaaaggagaagccagaaatgtggttactcatttactgctcggctctggagaaaattatgaagccacttgggagtttttgaccaagcgatatgagaataaaagaaacatattctcagatcatatgaataggcttatggatatgccaaatttaaatttagaatccaataagcaaataaagacatttattgacccgattaaccgagtcaatttatattataaaattaaaggcacaattaccagaagatgtggatgcaattttcgctcacataattcttcggaaattcaataaagaatcactcaatttatatgaaagccatgttaaaagacaaagaaatcaggcactttctgatgtcatggactttttagagcaaaggctcaattctatatcatcattctacaggaagtaaaacctgtaaagaaaatgattaataataacaagaataaaaattatagtgacaattgtgcatattgcaaactaccagggcattatttaattcaatgccataaatttaaaataatgaatccagcagacggtctgactgggtaagaaaaaatgggatttgcctaagatgtctgaggcatccgtttggtaaaaaatgtataagcgagcagctttgttcgacttgtcgtaaacctcaccacacagttacttcactttgcaggtcataatccagaaaaagtgaataccgtgtagaacaacaggtcaagccttgttggccacggccttgattcaagtaaagtcgaggtatggaggctttgaacaattaagagcattgattgatagtggctctcaaagcacaattatttcagaagagtctgcacagattctaaaatttgaaaaaatttcggtctcatactgaaataagtggagtatcttccacagggaacgtgcatctccaagcacaaagcggttatttcgataagaaattctccgaaaaatttagaaattgaagcaattattctcccaaaacttatgaaggcaccttccagtcaacacgattaatgttgatcagaaaaaatggaagaactttaaattagccgaccccgattttaataaaccgggtcgcattgatttaatcattggagcagacggtatatactcccattctgcaaaatggagttataaaaatagacggtctccttgggcaaaaaactgatttcgggtggatagtttctggatgtaaaaaatccaaaggaaaagaaaccattgtagccacaacaatagaaataaaagagttagatcgctactggggaagtggaagaagaagaaaaagatgatatccgagtctgaaatctgtgaaaataaatttatcaaaaccgacaaaaaaagattcagatgggcgatacattgtgtcaattccattcaaggaggatgtcaccttaggagattcaaagaaacaagcgatagctcgttacatgaatctggagaaaaaactaaaaagaaatgaaaaacttaaggttgactacactaaattcatgaatgaatacatggatttaggacacatgattgaagtgagtgatgaaggcaaatattttttaccgcaccaggcagtgattagagattcaagccttacgaccaaattgagagtagtttttgatgcttcagcaaaaactacgaataacaaaagttttgaacgacataattgtgggttgggccacgagttcaaaaagatatttttgacattattattaaatggagaaaatgggaatttgttgtttcggcagacattgaaaagatgtaccgacaaattaaaatagataataatgatcaaaaatatcaatatattttatggagaaattctccaaaagaaaaaattaaaacatataaattaaccacagtcacttacggaactgcatctgcaccatatttggctaccagggttctggtagatattgcagataaatgtaaaaaccaagttattagtgcagtaattaggaatgatttctatatggatgacctaatgactgggagctgattcggtagaagaagctaataaattaataacattaattccccatgaattgcagaaagttggattcaacttaaggaaatggatttccaacaattccaaaatattaaccactgtggaggacacaggggacaataaggttctcaatattatcgaaaatgaatgtgttaaaactttaggactaaaatgggaacctcaaaaggatttatttaagttcagcgtaaattgtaatgatgaatcaaaaaatataaataagcgcgttgtgttatcaacgctagcaaaaatatttgatccgttaggatggttggcaccagtcacggtttcaggaaaactttttattcaaaaactttggataaataaaagtgaatgggatcaggaattatccatagaagataaaaattattgggaaaaatataaagaaaatttattattgttagagaatattcgaatcccaaggtggattaattcaaacagttcttcagtcattcagattcacggatttgcgggacgcttccgaaaaagcatatgctgcagtagtctatgctaagtagaacctcatgttaatataatagctagcaaaagtagagtcaaccctataaaaaataggaagacaattcccaaactcgagcctgtgtgcagctcacctgcttagtgaataatccaaagactaaaaggatcaattgacaatataatgggagatctatgcttgggagtgattccacgattaccttagcatggattaacagtggtcaaagtaagatcaaatttataaaaagaagaacggatgacattcggaaattaaaaaatactgatggatcatgttaagtcagaggataatccagcagatttagcatccaggggagtggattctaaccagttgatcaactgtgatttttggtggaaaggtccgaaatggctagcagacccaaaagaactttggcctcggcagcagtctgtagaagaacctgtcttaataaatacggtattaaatgacaaaatagatgatcctatttacgaattaatagaaaggtattccagtatagaaaaacttatacgtataatagcatacataaatagattcgtgcagatgaaaacaagaaataagcctattcatcaattattttcagtaaaggagataagaatagcggaaacagtttgttattaagaaacaacaagaataccagtttaggcaagagataaagtgccttaaaatcaaaaaggaaatcaagacaaataataaaatattgtcattgaatccatttttggacaaggatggggttctaagagttggaggaagattgcaaaattccaatgcagaatttaatgttaaacatccaatcattttagaaaaatgccacctaacaagcttattaataaaaaatgctcataaggaaacattgcatggagggataaacctaatgcgaaactatatccaaagaaagtattggattttcgggttgaaaattcgttaaaaagtatttaagagaatgtgtaaccgtgtgcaaggtataaacaaaatacagctcagcaaataatgggtaaccttgccaaaatatagagtgaccgatgacattcccgtttcttaatactggaatagattaccgcaggtccttattatgttaaatgttcaaaaaatcgtggccaaaaaacatttaaaggatacgttgctgtattcgtttgcatggccaccaaagccatacacttagaaatggtaagcgatctaacttcagacgcatttttagcagcactcagaagatttattgctagacggggaaaatgttccaatatctattcagacaacggaacaaattttgtaggagctgcaagaaaattagatcaagagttatttaatgcaatacaagaaaatataacgattgcagcgcagcttgaaaaggacaggattgattggcattttattcccccggcaggacctcacttcggaggtatttgggaagctggagttaagtcaatgaaataccatttaaagcgtataatcggcgacactattttgacttatgaagaaatgtcaactcttttatgtcaaatagaagcatgcttaaattcaaggccattatacactatagttagtgagaaggaccaccaagaagttttaacaccaggtcattttttaattggaagaccacctttagaaatagtcgaaccaatggaagatgaaaaaatcggaaatttggataggtggagacttatccaaaaaatgaagaaagatttctgggttaagtggaaaagtgaatatttgcataccgctccagcaaaggaataaatggaaaaaggaaattcctaatatagaagaagggcaaatagttttattaaaggatgagaattgtcatcctgcaagatggcctttaggaaaggtggaaaaggtgcataaggggaatgatgataaggtccgagtggctaaagtaaagatgcaggaaggatatatcacctagacccattactaaaatttgtcccttggaaggaataaagtctgttgacaaaaatgaggctgaccaagagccaaaaagacgaactagagcgacatcgggaatgtccaagatcggaatcattatggcaatgttggtggttgtgttaagttgtcaagtttctagcgcattacctaaagatatagcaccaagatattctatagacaaaaataaataaaacctcagcaatatatctagacccgctaggagatgttgagattgtgagtacttcttggaatttggttatctattataaaatggatccatattttaaaatgttaacaaagggtaatgcgcttatacaaagtatgaggaaagtttgcgaaagacttcatagctttgaagagcaatgtagtctagtcttagataatatgcaaagtcagttatcggaacttgaagaaaacaataaattgtttatgatacagtctagatctagaagcaagccgtgctcctttcgaatttatgggttccttgtatcatattttatttggtataatggatgaagatgatagagagcaattagaagaaaatatgaagaatttgttagataaccagaacaaccttgataaactaattcaaaaacaaacatctgtggttgattcaacttctaatctattaaagagaacaacagaagatgttaactccaattttagaagtatgcaaataagaattgagaacatgacagaagttcttaaagaaaattattatgtttataaggaatcaataaaattctttatgattacgaaacagctacactcattgattgaagaaggcgaaaaaattcaagcaggcattataagcctgttgattgatattaatcacgggaggctaaatacaaatattctcaggccaaatcagcttaaaaaagaaattgccaaaattcagcagagtctttcggagaacctagtaattccaggaaaacggtcaggtacggaacttaaggaggtgtatacaacgtccgaatatttaatttataattttgagatagattcctatcacataatgacggaagccacattaaatcaatgtcagaaatggcaacctaaataagagaatatgcaaaggaagttggccctggaattcagcgaatgataattgcatgtgagattcagcctctaaagccagataaagcggcgaactgcatctataaaacagtagtcgactctaaaagttactgggtagagttagaaaagaaaagtagttggttgtttaaggttcctgcgaattcaaaagtccgtctgcaatgtactgggctctcaaattgaattgtttgatttgcctcagcaaggagttttaagcattgcgccatattgtacggcaagaaccgacgataaaattctagttgcccaccataacattcagtcccgaaagtgaagaattattatcaacaccttatatagggagaagttagtgaagcgcccgaagattattttgggatccgctgaaactatcaatattaaatcatactgaggaatttgaacgattgaataatgaaattaatttatgaaagagaccatcaaaaattgaaagatttacatttccatcatatttccggacatgctggattaattattgctttaatactaatgatagtttaataatatatttcatacggaaatgtgctgtgcaacaaagaatgcaagcaataacctttgcaggtccggtgccagtactataaatatcaatagtaaataaacaataaaataatataacaaataaaaatatacagtccactatatagaaaatgtacttctacatagaaaaagcaaaatgtttaaaataagttaattgagtacaaattgttgaattaaaaataatataaaccataattgtaatccaataaaattaaaagccagaaaaactaggcccattgaaatcttagttgcaaaataaatgaacatatatcaaataaatacagcccactactgttataaatgcaactaatatactaatgtacatctcagctttgctggccctttggcagaatgttcacacatgaacacgaatatatttaaagacttacaattttgggctccgttcatatcttatgtaaatgaatcgagagcgataaattatatttaggattttgttatctaaggcgacatgggtgcattgctcaaaaacatgtaatttaagtgcacactacatgagtcagtcacttgagatcgttccccgcctcctaaaatagtcccttagtgggagaccacagataaggtcctcgccgctcaagataggcagatgtgccccgagcgtgggacctcgataaggcggggactatttacttaggcctctgcgtaggccatttactttaagatgcgattctcatgtcaccctatttaaaccgaagatatttccaaataaaatcagtttcttacaaaaactcaacgagtaaagtcttcttatttgggattttacacttgctgagccagataattaagatttcatataagtgacgcttcgttttaaacaaaatgtctgtcagtctgttcttctatctgtttttaactctgggggaaatctatatttagctcaagttatattttctaatcttttaattcgcccttttggtcttacccttcttttgatatggggataaaatccaattggcggattcggcattgttattatattttatttcgcactcaaatccagtcaaagtaattccgaagtaaagctctccttaatggtttaattactttacattgagcactgatagcgatgcggattcgactcagattgcgcgaaaaccgagctcgagttggatggatttcgtcatagacacgcgacgaacgtcgaaagcgaactgaaagttttcaataatatttatggtattatatgggccgctctgccatcaaaagtgcccgagaatggagctcaaagagagtgtgagagtcagagagatgtccattagtatatcgtatactatctcgccctgatccacgcacgcatcatttagattccccggttccagttccatatggagaaaatgtttgcacagtctgtccaccgcttgtttgcttactaatcccattctttcttggccttctgctgctgccttattataagcttccctgcttctgggccctaatgtggcaaaaggtcaaatggaacggaaatggaacaatccaataaataaagaaaaggtactgggttagttttaaaagtgctcctggtctaccttaattgaagcacctcttcatacttgatgtttgtacatttttgcccaagtggtatttagttgtatgccgcctatctgcaaacttttgtttatctgataaaagcaaaacacttcatagccgtcggggaaaagaaacagaactctcctacccgagataccatctaaagatgcatcatccgaatggaacttaccgcatcttcaggcttttccacactcggaaggcagcttcttttcggggaagcggcacagcaagcgctgttgttattgttaatattattatggtagaggccaagcgaattggcacatcgggtaaacattttccaacaaaaacgaaacgaaacgttgggcaggtgaaaagaaagcgggaatcggacaatgtgcgctctttgataattaaacaagtgagagttccgcagttgaaaagccaagttaaccaaccgccgaaaacgctgaactttctcgccgaagctccaaactgcaactgaaattccacaggctgcaggcgagaggaaaaccaaacttggcaacgatccactgggtggagcagtgcgatatccactggtggtccacataggaacccgtttatggaggtgcttaccagataaacttaaatttgctttgtttttatggcagacaaacagtcgtttaaacagctaagtacacaagccaatgtatgtatgtgcataatacttttcgggcaatagttaaagttaaatgtagaacatgcaagagaccttagactcccgaaagtgtatcatatcttgtatagatcttcttacacagtctattctattctattattattattatgcattggatgttgaaagtaaattaaatattgcaccaaccatgccctttctttgtgcattcaaattgtttaagtcattcaattgggtaatcgcaactaacgattaatgtagtatccataaaactaccgcgtaatgcaatgacacataaaagcaataaccattaagcccaaatgttgctatatggaaatcaaattactggccgtaaaaaagcttagaaagcaagctgcgcgaaataaacaatgaaaccaaaaactattagtaccttggctttattaagccaaaaaatgtaactaaaagtgaaaatgaatttaagtatttccctaatagaaactatttatttaatacttgtattcattttgttgattgtggttcagctaagggaatttgattaataaattaaaaacaatgccacaaaaaaaggccgcaagctgcaagttatctctgcggtcattcaacctgcaagtgaagccggtgaagcaaaccaagtttcaactacttttggccaactgcgaccacaaagtagcccattcgagttgatgtctccgacttgacacctttactgcaactaccactttagttggctcgcaagactttcttcctaatttgaacctgttttagccatagcaacaacattcgctgtggcaaccagttgttatcaaggaaatagttgcctgttgcataagttattcattgttttacctcatgttgagatggtttgtaattgaagaagaggacttttcttcggaacaagttaatgccggaattccaaacctatctcaaaaatttatttatattttttcaagtattaaaaacgattgtttttaatcagactgctggaaaaaattaaatgcaagtcttgcggttttatttgcatgtgtacaaaatatttctgccgaatcaacatttctcgacaaatacattttaaatatttctatacattgtagtataattaaaaaatgtatggtgaagtcagtcttatcaactgcaagcatgcaatagatgctttttggaagtcaagtgcgaattttaatgtggggtaaacgtcatttccatggcgtaagataagattaggccgggaattctggtgttacgtgtccggcgacccatatggagagaatattaaccgggagatggaaacaatgcgtttgggagaacatgggaaagagatctggggatctgaagatacatatgtatattcaaacaactcaggctgatcaaatagattgataaattcaaacatattccacagctgtaggtgaattttttcggcccacttgttctaatagagttagagaaattgggtttgctcagcttttttgggcacagggccacatatgtacatatctaatactcaccgtcttttgacgctttttgctgctctccggaacttcactcatttctcgaggggaactgtgctcgcctattatgacccaccaaagtagcacgtcctcctgccaagcaattccaaacaaaactgcgaaaagtagtacttcgagtcggaattcggtgcaatcgatgaatgaagtgcgccacggaagtaaccgttggctggcttactgttttccaaataggtgtagcactcgcagcagctggactattgcactaaatagcttaaagtctagttatatcgcaagcaaacgtttaaatttgggatacgagaactgtattattactaattcacatgcacacaaacacccacgcacaccaacgcagccatcggcgctcagctgattagaggtggcccaagtgtacgatggttaaacgatagcccactacattgctaatgtaaaaacaaatttattaatttaattaatattttaactaaactatcgcatagttgtaagaaaaattccaattgcaaattaaattaaagtcaatactacttttttataaccgctttttagtaacccattgaaacataacttatgttccaatggatgaaaaaatagacaaaaaaagttgaaactttattaaaatgtagctgctaaatatttaatatttttgtaatatcccaaatcaaatttgtatgaaaaacaaagttcgttctgaatgtacgtttattgcaaattcatctgataaataaaggattaggactaggcttacgattaagaagtgtcttcgatctagtacggtggtggttgatactgctgctggcccatcatgttctgccgctggagctgagccaccagattcggcgtttgttgctggttcatgctctgctgctgcggcaccattccgcctccggcgccaccgccaacggcgccacccccctgctgaggcccggctcccatgccgccgcctgccccaccacccataccctgcaactgcatcatttggtgcctcagctgctgttgttgctgttgctgctgctggaactgctgctgggtgttgaggacgccgggtttgcctcc

SEQ ID NO: 41741 - DNA, 2463 bp, DROSOPHILA
gttcccctcgagaaatgagtgaagttccggagagcagcaaaaagcgtcaaaagacgttcgctttcgacgttcgtcgcgtgtctatgacgaaatccatccaactcgagctcggttttcgcgcaatctgagtcgaatccgcatcgctatcagtgctcaatgtaaagtaattaaaccattaaggagagctttacttcggaattactttgactggatttgagtgcgaaataaaatataataacaatgccgaatccgccaattggattttatccccatatcaaaagaaggcatttctgtttgcagtgcctacaggtggcgacgaatgtgaccgagcaaaagcaccatgtcaccagggagacgcgcggcaagaatttgggactctgtcgaggattccgaggatgcacggtgtggctgactggcctcagtggagctggaaagacctcgattgccttcgaactggaggcgtacctggtatcccggggcattccggcctacgggttggacggcgacaacattcgcaccggactgaacaagaacctgggcttcacgcccgccgatcgcgaggaaaacattcgccgcgtgggcgaggtggccaagttgtttgccgacagcggagtggtggccatctgcagcttcgtttcgcccttcgccgacgatcgtgagatggcgcgcaagatccacaaggatgcgggtctgaagttctatgagatattcgtggacacaccgctggatgtgtgcgaaacccgggacgtgaagggtctatacaagaaggcgcgcgagggcgtaatcaaaggattcacgggcattacgcaggagtacgagcgaccccagatgccggagctggtggtcaacacgcacggctacacggtgcgcgagtccactcagaagctggtgacgctgctcgaacaggagggcattattccgcgctcgctgcgcgacgtagacctgctgccggagctttatcccagcgaatccattgccacggaggcactgcgtcacgaggccgagtcgctgcaagccatcgaaatcagcaccgtggagctgcagtgggtgcaagtactggccgagggatgggcatatccactgcgcggcttcatgcgcgaggatgagtacctgcagacgctgcacttcaacacacttcagagcggcatggacggttcctatcgcgagaaccactcggtgcccattgttttgagcgccacgcaggcggacaaggatcgtctggacggctgctcctcgctgactctcaaataccaaggcaaggcggtagccattctgcggcgtcccgagttctactttcagcgtaaggaggagcggctggcccgccagttcggcaccagcaatcccaatcacccgtacagtaagcaggtctacgagtccggggattatttggtcggtggcgatctggcagtgatcgaacgtatccgctgggaggacggactggatcagtacaggctgactcccaacgagttaaggcgccgctttaaggagctgaatgccgacgccatcttcgcctttcagttgcgcaatcccatccacaacggccatgccctgctcatgcaagacactcgccgccagctgctggagcgcggcttcaagcagccagtgctgctgctgcatcctctgggtggctggaccaaggacgacgatgtgccgctggatgtgcgcatgaagcagcaccaggccgtgctcgacgcaggtgtcttgcgacgagaggacacagtgctggccatcttcccctcgccaatgatgtacgccggtcccacggaggtgcagtggcacgcaaaggcgcgcatgaacgccggtgcgaacttctacattgtaggccgtgatccggctggcatgccgcatccggccaaggaaacttatccggatggaaacctatacgatgccacccatggtgcgcgagtgcttaagatggcccagggactagacagcatggagatcctgcccttccgtgttgctgcctatgacaagagcgccagtagaatggccttcttcgagcccaagaggaaggatgagtttgagttcatctcgggaaccaagatgcgcaccctggccaaaacgggagccagtccgccggatggcttcatggaaccggaggcttggcgcatcctggccacctactaccagaacctgccgcagtcgtaacccgctgctcacactcgatccgcaacgtgcaattcctcctagttatagctcgtgtgcttattatacataaatatttcaagctaaaggcgcttaccacttaccacatcttttttccattgttctaagccgaaatccgtggctgtccccgtgtgtgaatgttgtgctcctcctaactaaatgttcgtatcgtacaatctacttgtatctacacttaagtcacccaattctttttatcttaagcaaaatatcgtgcagctattttgtggacggtttttaatacatatataaataataaaatagaaaattacttattga

SEQ ID NO: 41742 - protein, 635 aa, DROSOPHILA
MPNPPIGFYPHIKRRHFCLQCLQVATNVTEQKHHVTRETRGKNLGLCRGFRGCTVWLTGLSGAGKTSIAFELEAYLVSRGIPAYGLDGDNIRTGLNKNLGFTPADREENIRRVGEVAKLFADSGVVAICSFVSPFADDREMARKIHKDAGLKFYEIFVDTPLDVCETRDVKGLYKKAREGVIKGFTGITQEYERPQMPELVVNTHGYTVRESTQKLVTLLEQEGIIPRSLRDVDLLPELYPSESIATEALRHEAESLQAIEISTVELQWVQVLAEGWAYPLRGFMREDEYLQTLHFNTLQSGMDGSYRENHSVPIVLSATQADKDRLDGCSSLTLKYQGKAVAILRRPEFYFQRKEERLARQFGTSNPNHPYSKQVYESGDYLVGGDLAVIERIRWEDGLDQYRLTPNELRRRFKELNADAIFAFQLRNPIHNGHALLMQDTRRQLLERGFKQPVLLLHPLGGWTKDDDVPLDVRMKQHQAVLDAGVLRREDTVLAIFPSPMMYAGPTEVQWHAKARMNAGANFYIVGRDPAGMPHPAKETYPDGNLYDATHGARVLKMAQGLDSMEILPFRVAAYDKSASRMAFFEPKRKDEFEFISGTKMRTLAKTGASPPDGFMEPEAWRILATYYQNLPQS

SEQ ID NO: 41743 - DNA, 5006 bp, DROSOPHILA
caaataaagagaatctatatgtgtaaaactagacaaacgaaattcctccgccgtaatattccaggcgtgtctgaggctggacaaatgccaaccaatcggaggcgtgggtggggaggagccccatgctctggcacttgtagagggccaaagccacgtttgctaggttgcccaggaagtagacgatgcgctggccagttccctgggccccctccgccattttggaagtcacctgggtggtgaagatggccttgataggccggatcagcatcatgccgaccatcatgatgggaaaaatggaaatcgagtttcctgacatgtacatgatgaatagattcatgggaatctgagggaatccaaaggttaagcacgggtctttccaaagggctgctactcacgttcttaagaggtcccagggcaaggtcccacgacttcttgatgaccaggcgctggtcgcgcaccacttcactctggttcaccaaagcagatggattgtagcccagcggcgaaggaatatcagcatttttgctgcaggaaaaagcaaaagtggtaagaacttgagtcaccgcgcaggctagcaatccttacctcccgttaaagtccagcgcccactttaacttttttgggttttgcttggcggacatgctgtgctttcttttatttaatcttttgccaatttataaaacaaaatgacgattttttctgacaattggtcgctgagtgttgttcaacgttaaattccgaaattattgtagtgtagacaattcgataggcaactgatgtgtatggcaccagggtatcgataggcagttacgattttgcgcggactttttgaaacgcatgtgcaaaaatcgaacagcgcagtagttttcattaatatttaaattttatttcaaattaccttttaagtagtactttcctttttaatatggtcttatatatatgcgtgatttttaatggattttgcgtgaccaagcgacaacaagaaacagaagggttaaaaattaaaatggtatttgttgtatttttaaagagcaattacaattacagttttttctcattaatattactttaatattataaaattaaaaagaaatatatattttgatgaggggtagggagaggacaaaaataacttaaaaaagacatttttataccatatactatagtttcctttcttgtgtgattggttgggcttttcttttactcgatttgcttttaaacatccaataattatgtatacgaatttaaattatattatagcgttctttatatgctgcttgaaaggttatgtttttgcaattcaataaacaatttcagtttcttgtttggaaatacggacatgcggagccctttaagttatgcgaagatctgctgctcttgttgttggtgttggtgccgctgctgctgttttgtgaaaattccttctgatgtcgatttccaccgtttaccgctggatgttggatgtccttcagccgctctttctatggttctggttgctggttaactgcttcggctcgcttgaaatcagagttagttgtattcatattgttgctttaattttagtgtttaattagcgattagcgttcttcaattggttggacagccagtcgagtccctcgtacagcccatcaccgctagttgcacacgtcgcctggatgtaccagttgcggtttctgagtgagtgcaagccgagcttgtcggtgatttcggccgcgttcattgcatttggcagatcctaaaatgatcccagaaaagagcgaggtgcaatattagtatgacaatataaggaccgagcaactggctactgataacgacaacctttgcttggacctacctgtttgtttgcgaagattagtaagactgcatccctcagctcgtcctctgccagcatgcgcatcaactcctctctcgcctcaccgatacgctctcggtcattgctgtccacgacgaagataagaccctgtaacgattcaaatgaaaactttattccaattgtcctggcttgaatcgtaggagatagatctctaagataatatagtcagtcccgtcttgaaacaaaataaacttgaataatcacaatgcataatcattacaagctgttaacatcatatagaattttctggaatctgtggaaaagctgaaatcacacttacttgtgtattctggaagtagtgcctccacaggggacgaattttgtcttggccacccacatcccacactgtaaagctaatattcttgtattctacagtctccacattgaaacctagggggacaaccattagatattagatttggacaagatacattaaaggtgctaataagatacttaccaatggtaggtatcgttgtaacaatttcgcctaatttgagtttgtacagaattgtggttttaccagcggcatccaaaccgaccatcaatatcctcatttcctttttgccgaataggcctttgaataagttcgcgaatacgtttcccatggctgctgtttgtctttcggatgctcggtagtcgtaggaagttggatctctggttggcctgctcgctgtctgctggctggaattatgacaagttcaaatccgagttgctataccgatcagaatatgcaaactgcacacttgtgtgcatggagtgggagaatctgtgaagagtccaaaaatagacagttgtaggcgagaatttttcgtggtaggaagagctatcacaaaggacggatgcgccgaagctcctctggtgtttgtttcacttatgatcgcgcttacgtgttgaatggcgcttacccactctgagtcatacaaaaaccggaagagcggaaaaaccggaaaaagaaacgaaattcgtttttgtttattgtaataaggacgtcttcaatgcgtcagcatgagaaaaacagaaaatttgtttatgtaattaattccacacttaaatacaacgcgaaatggaggatgtatgaaacacgagtcgcttgcttttagtgtttgccccgctagcggctgctgataagatatcgatttttagtatagaaccatgacggctgtcggcgctcagcgcctcccttccaacgtcctccacccactttacacagagtacgcaagaaacgtgcgggctgagaagtgcgtgaatgataaggccaggtaacttgcagttttcggcgaacttgctgggcggaggggaagctcccaaactctacagtgagtcaccgctgccgccttttgagccctgcaaccgagcaggctgcaaccgatggctaagcaattcatgttaaaatggaggaacgcaatgagcaagcccgtttcgcacgaacacaaaaagaaaaaaggttgccagcgaaacatacggaaacctttcgtttgacagcaatcggatatccaaaaacctaagtttgttacagggaactaacaccccagagacttcttctccggaccggtagtgcgcaaagataggtgctccacgttactgagaagatgctgatgccagctgacgatagttggcttggaagcagccgaaatcgaaaactacacgtagcagcttttaatttagcgctgagggaagcgaggcagcccaccaccgcacactcacgcatacacccgcaggcgccagggttgccaactgcgttgagccgccctgcctttgctgcctttaatgcgtttaaatagaagctccaggcggagggcgtcactgctcgaagatgaacgcttcgccagcccacgccccatgttcagacatttcgcaactaagcccactttcggatcgggatcagacaactttgaactttatacgtggttgcctgcgtctgtgtgagtgacgtacgctgtttttcttatgggttggtgaaatgcggctgccgccgtcccttgtttttacaagaatacagagaccggtccgaagttacttggacttcttttaactgagatccttttagctcagtgacactttacacgtccatttaccgattattctgccttttttcgtggacttttctttgattgaattttctatgctgccaaacacaccacacaccgaattgcgaatagaaagataatggagagaaatgtatcgatagcatccgctaccgatagtcgatgagcacaagtcactattgtctgccgaacagagattgtaaaatgttcccaattatataatttagctatcacttttgtaattaaaggagagcttgtccttgtctcctgttacgataatgctataaacaaagcaccgacgattaattcgtgcggcttccaatactaatacttccactattcaccacagccgcgtacgttgcgcgagtgttcgtggatagcccacactaaacactcacacgaacatctacattactgcggaacttcttaaaatcaagaaaagtatctctgccttgacataccaccccctttttcgactgaaaacgcatacgcaccaactaattgaatcaaatgcacacggctaggagcggaaattttaaaaacttctgcttggaaatgtctaaaatcacagagcaaaataaaacttgaccgagaatacacttgctgttgaaaaaactgcaaactcaccaacataaacgttgccgatagagatgggcgcagcgcatgagctagagcgggatgccgatgttgtgtagtcccgtggtgaaaactcgggaaatgctgccacgtctcttctccgccacctcggctagagttgccaacgatttggattaatcgattcatcattgtcgcacaatgctcactcgataaagttcactatccaggtgatttgaactaagttaaatgttaatatgttttacccaaaaacaccatttttggtgaacccgttgctggaagccgatatccttaaagtgaatgtatgtactttcaatgtgcacaaatacgtatttacaacaaaaactggcttgcaaattttattaactgttaattcctggttttgtcaagtctgctgcacttgctccgctgttggaatggctgtgccttactcccaaagtcaccacttacagggtgaacactcttaggtgttc

SEQ ID NO: 41744 - DNA, 1478 bp, DROSOPHILA
tttggcagcatagaaaattcaatcaaagaaaagtccacgaaaaaaggcagaataatcggtaaatggacgtgtaaagtgtcactgagctaaaaggatctcagttaaaagaagtccaagtaacttcggaccggtctctgtattcttgtaaaaacaagggacggcggcagccgcatttcaccaacccataagaaaaacagcattctcccactccatgcacacaagtgtgcagtttgcatattctgatcggtatagcaactcggatttgaacttgtcataattccagccagcagacagcgagcaggccaaccagagatccaacttcctacgactaccgagcatccgaaagacaaacagcagccatgggaaacgtattcgcgaacttattcaaaggcctattcggcaaaaaggaaatgaggatattgatggtcggtttggatgccgctggtaaaaccacaattctgtacaaactcaaattaggcgaaattgttacaacgatacctaccattggtttcaatgtggagactgtagaatacaagaatattagctttacagtgtgggatgtgggtggccaagacaaaattcgtcccctgtggaggcactacttccagaatacacaaggtcttatcttcgtcgtggacagcaatgaccgagagcgtatcggtgaggcgagagaggagttgatgcgcatgctggcagaggacgagctgagggatgcagtcttactaatcttcgcaaacaaacaggatctgccaaatgcaatgaacgcggccgaaatcaccgacaagctcggcttgcactcactcagaaaccgcaactggtacatccaggcgacgtgtgcaactagcggtgatgggctgtacgagggactcgactggctgtccaaccaattgaagaacgctaatcgctaattaaacactaaaattaaagcaacaatatgaatacaactaactctgatttcaagcgagccgaagcagttaaccagcaaccagaaccatagaaagagcggctgaaggacatccaacatccagcggtaaacggtggaaatcgacatcagaaggaattttcacaaaacagcagcagcggcaccaacaccaacaacaagagcagcagatcttcgcataacttaaagggctccgcatgtccgtatttccaaacaagaaactgaaattgtttattgaattgcaaaaacataacctttcaagcagcatataaagaacgctataatataatttaaattcgtatacataattattggatgtttaaaagcaaatcgagtaaaagaaaagcccaaccaatcacacaagaaaggaaactatagtatatggtataaaaatgtcttttttaagttatttttgtcctctccctacccctcatcaaaatatatatttctttttaattttataatattaaagtaatattaatgagaaaaaactgtaattgtaattgctctttaaaaatacaacaaataccattttaat

SEQ ID NO: 41745 - protein, 182 aa, DROSOPHILA; identical to SEQ ID NO: 23463

SEQ ID NO: 41746 - DNA, 4861 bp, DROSOPHILA
accatgaagtccctgccgccggatttagccgcagagggcaagtcgaaaatcatgcagctcgtttgtagcttggagcttcgagccatgcagagaaatgcgacaactccaaccccagctacagtttctgcttcctcgaaatggccttcttcaactacggtgaccccagttaaaactcctcctgctcctatttcagctccccttgcttctgtcgatgcagatttgcattcctcggttgtcacaacaccgcatgaatacaataatgggcagaacaataataacgacaaggaaaccgtaccgaaagagccagttaccggggcttcctctgcccaagtgaccatcaatgggagcgccaaagacctgccagagaatatacgccgtatcttaacttccaaccaaacgcaagtgaccaaccgcctcgagacggattccgtgcgttgtgtacctcttgacaaactaacaacacagagtcggaccaacgtgaacggacgactcagtcaaggtggcacttcggaagcaccatccaccccacaggcggaccttagcaatggtaacacgttggccatgatcaggcagatacgggttaacaataacaacagttccaagatcaccgttactaatacgcctcagatgcaacagccgcagcaggcacaggcaagcataacgtcctcgactccaataatgcgtggtggtcccagcagcaacggttgtcaaatcacaacatttcggacaatggtgaaccataaccgcaggccatagagctcctaggaaatatgaatcaaacgtaacttaagactttatcactgtcattatttaaattcgactcaatcagatatactttacgttaatgatgaatacttgcaagcaattgttcaaaatttagaatacacaaacgatggagcttcttccaagatatcacatagaacactactccttcaacgaactacgaacctgttgcttccgaaacttgcatgttttgaagacgatttgtttcgaaaccattccaatacccgaaaaatttttatttttcatggagaaaattacaaactatggacttattcaagtccaaaatatagtaaactttatgtcttttaattataatccttactaattccggtttatccactttgtggctgctctgtttaagtctaaattcagtttcagtcgttaggagtggaccttacgatcaactcgattcgtttcgatgccgttgctgaggctccgcagctggcaatccgttttgcaccaccgcgtttccaggtttctcatcgctcgttatcgtggacagctcgatttcacgcagttccccgaggagccgtcgcatcgagctgtgcataaaggcgttctcaggcatctgatagccaccagtcgcagagagagcagccggtgcgttagcgggagtggaggaagccgttggctttggcggtttgctgacagtgtttagctgcttctgctcgttggcctccagagcctggtcgatgggcgccgatcgctggtgcagcgggaacatgaatttaacgtccagaaagctgcatagctcttcaatcccgtccagtgtccgaccgagttcttcgctaccattcgcctgctttcccacatgatggcgcacagtgctcaggtagctctgcaacttgcttcgcgctatcttgattacagtttgggcattcttcagctccaatcggagtagctctggactctgcaagggccaatacaaatatttcttaggaacaggtctttgtaataaaatcatgaaagtaaatgttacgttataaattttaaagtatttaagaattgactcactaaaaccctacttagaaaatatgtacaaaagattggcttagatttaagtagttttgttttgttataattaaatataatttaataaacggttaaatatggtaacagaaacacgtatacgacattcatatattaaagcacactcacattctccaagtatccatccattgcaactcgatgggtatcttgcaatttggccagagcagaagaatccgccgcattgcgctcctgcatgaaggtgatctgccgatcgatctggctaccactagtggccatcgaagagttttctgaattggtgcgcgggcgttgtcccgcaggagggggcacatccttgtccgcggaactgttggcaaaggacacacacgtgaaggcgtttggcggatactcaaactgcttgggattgagcatgaatagggcatgtctcagcaccagatggacatcaacattgtttgggtagcgcattagatatgtcaacgatgtggtgtagtcactaagaagcactgatatcgacattagttaggccattatttaggaactaaggcaccaggcgggagtacccacgtttatcacggatgtgcaccaacattgccactagaatgtagttgggcaggtcgaagcggtcgctatctgcgaagatggcatcccagagtagcaacaggtccagcagcataaactcccgtccaaagagaagtcttagccatcgactataataaggaaatatataatttgattaatttcaatattcatttttaagatatctttatattgtttgtggaattcccttatcgaaaagcattactagtaactaaaaccccccattttcattgccaactcacatgccgaatatgtgcagtgggatttccatcttttggagatagtggtgcaagtgctggtcctgcttggcgagtattttgtcccgtatgaagttcagctggccgataacctccgcctcggtcgacgtctcattgtccccggggctctgaaagaggaatgggtagcgataagggctgcttgctgcacccgcaaactgcgacgcacctcggctcgctgttcgatgtggccaccgggtgtggagaccagattcgagacgcgatagtacgactccacggaggccatgaggcgggagaacaaagagctgcgaggagcgcattgatttaagataaaaagatttcatgttacttgaactacgtactaggtatccgcttccagataggcgggatccagcacgtccagcagtgtgggattaatatccgttttggccagttcgctgaagtgaagcagggactggtgatcgctgtagacaacgaatataatgggagccaggatctcgtgcatgccctgccggtagcacatatacggatgctccctggcgtagtagaacagtatgttgaccattgcattctgcaccaatggcttacggaagaagtccacacccgggaaagtgcgcaccacatcctgccggatgacggcgaataggtcctggtcgctaaagtactgattccacacgctttgcgtcgactgcgacagcggatcatcgttgcagtccacggccagttggtgcggattgcggacgtagtctgcccggaacttgtcgtacctaactcgctgctgaagtcgctggctagtccaactgcggtgctccgacgtcaggacgcgcagtaggagggcccagtgaacgctgcggaatttggacatcttgagatcgccggcaaatgccgactgccggagactttccgggtccgcatcgaggttttcaagcagcacctgccactcctgacggtagcgctccacggagttcatggctcccgcctctggtatcacccgaattgcaccgtttcccggaaggtgctccaaactttcccttgccgacgatccgttcagtgtgatggcttctattccccaaacagtcatcgctcgtcgctggctagaaactaagtgcaggcggttatccgctccgcagccatgtcaacactgaattccggacgatgaaggaggtgattccaaattaaataatacacaatgggttctccaaagaaagcggattgaatcccaatcccaagatagcagtgcaccagtgtgaccgttgagtcccgattagaatataccgcacagtctcgcgctaatatactagaaccaatgttagccctataaaatatcgaaaataacggattttcaatatttaatttattcaaattttgaattacatggtctaacgtttttcgttaaatcaattacaaaatatatattcttggctattaaattaaattgcattaaattttgcataacacagatcgtaaaatatttaatgttattcaattttaaaagaaaatcagtttgcatttaaagatttaagacaccaattattaaacaaccaaggatttaaaaagaccaaacctttttttcataattttcattcgatttcaaaatttttattgtaagctcgtatcaattagttgagacctagccagagcgctataatatgaaatcaatgtgaacacatcattaataaaaatttgcgccgactccttgaatcaaaaatgtagctctgagtatttctagagatttaataaatgaatgtgcaaccaccagtcaacaataaaattgtttatacactcaagcctcataagctccagcttccaagttccaaaacactctgctctctggccacaaatgatggttccagctaaagaaaattgaatcggctctagtttgccaatccgcttctaatgagcacaaaatgtatatgaatccattagagaaaaaaatccaataaaagttattggctttaagttcgcatctacttacgcgttctgcttcacgtatgtagtgtttatcaaatctctctattgaggtcaatgcttgtcgctataatatgcaacaattaattcatgataatgccaaatagtcggcagcgaagcggatccaaccaggaaatagaagacaataacgaaatgcgaagatttcggatcggatcggttttttttttcttcgactggcagaagtttggcccctcttgccatgccaaatattgctaataaaccatcaaaatctctgctaatgtccctaa

SEQ ID NO: 41747 - DNA, 2304 bp, DROSOPHILA
ctgctatcttgggattgggattcaatccgctttctttggagaacccattgtgtattatttaatttggaatcacctccttcatcgtccggaattcagtgttgacatggctgcggagcggataaccgcctgcacttagtttctagccagcgacgagcgatgactgtttggggaatagaagccatcacactgaacggatcgtcggcaagggaaagtttggagcaccttccgggaaacggtgcaattcgggtgataccagaggcgggagccatgaactccgtggagcgctaccgtcaggagtggcaggtgctgcttgaaaacctcgatgcggacccggaaagtctccggcagtcggcatttgccggcgatctcaagatgtccaaattccgcagcgttcactgggccctcctactgcgcgtcctgacgtcggagcaccgcagttggactagccagcgacttcagcagcgagttaggtacgacaagttccgggcagactacgtccgcaatccgcaccaactggccgtggactgcaacgatgatccgctgtcgcagtcgacgcaaagcgtgtggaatcagtactttagcgaccaggacctattcgccgtcatccggcaggatgtggtgcgcactttcccgggtgtggacttcttccgtaagccattggtgcagaatgcaatggtcaacatactgttctactacgccagggagcatccgtatatgtgctaccggcagggcatgcacgagatcctggctcccattatattcgttgtctacagcgatcaccagtccctgcttcacttcagcgaactggccaaaacggatattaatcccacactgctggacgtgctggatcccgcctatctggaagcggatacctactctttgttctcccgcctcatggcctccgtggagtcgtactatcgcgtctcgaatctggtctccacacccggtggccacatcgaacagcgagccgagagccccggggacaatgagacgtcgaccgaggcggaggttatcggccagctgaacttcatacgggacaaaatactcgccaagcaggaccagcacttgcaccactatctccaaaagatggaaatcccactgcacatattcggcattcgatggctaagacttctctttggacgggagtttatgctgctggacctgttgctactctgggatgccatcttcgcagatagcgaccgcttcgacctgcccaactacattctagtggcaatgttggtgcacatccgtgataaactgcttcttagtgactacaccacatcgttgacatatctaatgcgctacccaaacaatgttgatgtccatctggtgctgagacatgccctattcatgctcaatcccaagcagtttgagtatccgccaaacgccttcacgtgtgtgtcctttgccaacagttccgcggacaaggatgtgccccctcctgcgggacaacgcccgcgcaccaattcagaaaactcttcgatggccactagtggtagccagatcgatcggcagatcaccttcatgcaggagcgcaatgcggcggattcttctgctctggccaaattgcaagatacccatcgagttgcaatggatggatacttggagaatagtccagagctactccgattggagctgaagaatgcccaaactgtaatcaagatagcgcgaagcaagttgcagagctacctgagcactgtgcgccatcatgtgggaaagcaggcgaatggtagcgaagaactcggtcggacactggacgggattgaagagctatgcagctttctggacgttaaattcatgttcccgctgcaccagcgatcggcgcccatcgaccaggctctggaggccaacgagcagaagcagctaaacactgtcagcaaaccgccaaagccaacggcttcctccactcccgctaacgcaccggctgctctctctgcgactggtggctatcagatgcctgagaacgcctttatgcacagctcgatgcgacggctcctcggggaactgcgtgaaatcgagctgtccacgataacgagcgatgagaaacctggaaacgcggtggtgcaaaacggattgccagctgcggagcctcagcaacggcatcgaaacgaatcgagttgatcgtaaggtccactcctaacgactgaaactgaatttagacttaaacagagcagccacaaagtggataaaccggaattagtaaggattataattaaaagacataaagtttactatattttggacttgaataagtccatagtttgtaattttctccatgaaaaataaaaatttttcgggtattgg

SEQ ID NO: 41748 - protein, 654 aa, DROSOPHILA
MTVWGIEAITLNGSSARESLEHLPGNGAIRVIPEAGAMNSVERYRQEWQVLLENLDADPESLRQSAFAGDLKMSKFRSVHWALLLRVLTSEHRSWTSQRLQQRVRYDKFRADYVRNPHQLAVDCNDDPLSQSTQSVWNQYFSDQDLFAVIRQDVVRTFPGVDFFRKPLVQNAMVNILFYYAREHPYMCYRQGMHEILAPIIFVVYSDHQSLLHFSELAKTDINPTLLDVLDPAYLEADTYSLFSRLMASVESYYRVSNLVSTPGGHIEQRAESPGDNETSTEAEVIGQLNFIRDKILAKQDQHLHHYLQKMEIPLHIFGIRWLRLLFGREFMLLDLLLLWDAIFADSDRFDLPNYILVAMLVHIRDKLLLSDYTTSLTYLMRYPNNVDVHLVLRHALFMLNPKQFEYPPNAFTCVSFANSSADKDVPPPAGQRPRTNSENSSMATSGSQIDRQITFMQERNAADSSALAKLQDTHRVAMDGYLENSPELLRLELKNAQTVIKIARSKLQSYLSTVRHHVGKQANGSEELGRTLDGIEELCSFLDVKFMFPLHQRSAPIDQALEANEQKQLNTVSKPPKPTASSTPANAPAALSATGGYQMPENAFMHSSMRRLLGELREIELSTITSDEKPGNAVVQNGLPAAEPQQRHRNESS

SEQ ID NO: 41749 - DNA, 2930 bp, DROSOPHILA
ccgaaacggatcagcccgatcctgcgccggaggacgagacaatacagcggtacaatgtgggtcctggactgaacgtcagtctggacatgagcaacgatatagtgcatgtgaaactggatggcgagaatctcaaggagatcattggagctcgctggttaaccttagataatagtgaagaaggtgagttctactgctatcttcatatttgaaaacattactttactgtttataatttcatcaggtcgcggcaagaagtacgacatgatcaccaaagtcttaccactcttcattctccccttcctcatccaatcggccattgttccatttctggtcaccaagctgaaactgctcctggtcaaatcgattcttgtgggcaagctggccatcttcctgctgatcatctcggccatcaagaatggcaacaagatggtccagagctacgaagtgccctcctactgggccggcgaaccaagtcggagatcggagttggccgccgctgcttcctcggcagctgccgcatacaatggctatcgggtggagggtaagccaaccacctggatcagctaggcggtctcacatggctataagtttcggttctaggcttttagtgtttccaaataaacatatacacaaatcgggttgatgaccatactttttcttttagttcatatgacaatactcttacccaacaacaaaaaaaggaatagtagaaaactaaaaagaactctaaaatccgtaattattaaaccacctgtagctaaaaccggtgatttaaagtctgctttagaatccataaatatcagagatccataaacccgaaaaaaagtgattgcaaaatcgtgtgcatgatatatgttaaataacgtatttattgatagcatttgttgtggtaataaattagaggtggaatcaaataaattaacttaaatgtaggtaaacagttttcgtgggactcgaccagcgccccaatcctggattccatttccagtggagcatccatttagtagcaggagtactgcctttccagctggacgcacacatcgcactggagtcggaatccccagaccagcttgcaattgcacctcctctcggttctcacgtgctgggatctcactcggtatccgcacacgcggcacaactgctggcaggagaggcgttcctccagagaaccactgccatccttggagcactggcgaccccgtgttcctttccacaatccggtggcatcgcgttcgcagtagttgggcgagtcctgcatgaagaccagcgagtctaggggaatgttctgccacataatctttagattgctactggctccttctagttggatggcatcgtcgtacatttggaggagatcctgggcaatggcttcgaatggctttagtaccgccacacactcctcctcctggcattcaccctgcacagctcctggttgcttgcaccggcattcctgttccagtgatctttgtagtagagctcccaccacccgtcgattgtgaccgatggctcctgatcccgatccgaaatgcttctcgtactgctccagtgccttggtgggttcgtgggcacagggtacattcagagcattttccgtgcatccgcatccggcgattactccattggcacagtccttggtcagagtatggactatggctgccatggaaatggccgccacatagacatcctcccgatttggtgagttttcctccggcttggaattcttctgcacgaaatcctggctcggacagttccatcgctgccactggaaactctgttggcagctgtcgagggcctgtttcagccccttgccggttatatcctcccaggagagtggtgcctggaactgggtgtactggtagtagctcatgggctccaaaactgctgccagagtgctcgtaatacccatgaagaatgtgatggcaaaaatcatgttgtctgtttatattgttgttatggtgctatctctgcgatgtcgttagatcgactgaatgatgatgaaccgggtcagcacacttatatagcctgcaaatcccaagccagggcgccctcctggggccggcccgtgggaatttcgggcctgctcaaaaaaccggaaatttgccgttttccacttggaaattttgcatgggcagggggtaggaactcccggcaatggacgggtacaaaaacccactggcagcccgagacgcaattgcggagcagcccagtttcctggttgactacctgctctcgtcctgcgccggcggaggtgaaggatccgccttgctgcgagcaagtttcccacgcttaggcaggtagagccgtaaacggcacccgacgtgctcatgaatgaagcccagtcgagtccattcaatacggccggattttcccggactcacactgcacaacatcaatgcccgatacggggacgggtttgtttgggttttggactggtcaagccaattatataacaaaacatatgaccaacagtatatacacgtataatctgggaaattaattgtcctttgtggtgagccggcgggaactgccagtattgttgctatattatttaaaagttaatacccaggattatggtgttaagcaccattaggaacagatatccagatattggtaacggatttttttgggatttttttcagatgaaaatttgtgcatgcctaaaaacaatacctcagaaatgataagagttaagcaatattagctacagcatttaattatagtactcgaaaataaaaggtaaacacttatattcagtttcatttgaccatgaatataatctctttaaaataatggcttgttgtcacttcaaagataatgcaattagtaaaagttaaacatctgattattgaccatcaaaaatgcgatacaaagggcttataatcatcaagtggccatacttgtgttgtaaatacatctataatattttttat

SEQ ID NO: 41750 - DNA, 930 bp, DROSOPHILA
atgatttttgccatcacattcttcatgggtattacgagcactctggcagcagttttggagcccatgagctactaccagtacacccagttccaggcaccactctcctgggaggatataaccggcaaggggctgaaacaggccctcgacagctgccaacagagtttccagtggcagcgatggaactgtccgagccaggatttcgtgcagaagaattccaagccggaggaaaactcaccaaatcgggaggatgtctatgtggcggccatttccatggcagccatagtccatactctgaccaaggactgtgccaatggagtaatcgccggatgcggatgcacggaaaatgctctgaatgtaccctgtgcccacgaacccaccaaggcactggagcagtacgagaagcatttcggatcgggatcaggagccatcggtcacaatcgacgggtggtgggagctctactacaaagatcactggaacaggaatgccggtgcaagcaaccaggagctgtgcagggtgaatgccaggaggaggagtgtgtggcggtactaaagccattcgaagccattgcccaggatctcctccaaatgtacgacgatgccatccaactagaaggagccagtagcaatctaaagattatgtggcagaacattcccctagactcgctggtcttcatgcaggactcgcccaactactgcgaacgcgatgccaccggattgtggaaaggaacacggggtcgccagtgctccaaggatggcagtggttctctggaggaacgcctctcctgccagcagttgtgccgcgtgtgcggataccgagtgagatcccagcacgtgagaaccgagaggaggtgcaattgcaagctggtctggggattccgactccagtgcgatgtgtgcgtccagctggaaaggcagtactcctgctactaa

SEQ ID NO: 41751 - protein, 309 aa, DROSOPHILA
MIFAITFFMGITSTLAAVLEPMSYYQYTQFQAPLSWEDITGKGLKQALDSCQQSFQWQRWNCPSQDFVQKNSKPEENSPNREDVYVAAISMAAIVHTLTKDCANGVIAGCGCTENALNVPCAHEPTKALEQYEKHFGSGSGAIGHNRRVVGALLQRSLEQECRCKQPGAVQGECQEEECVAVLKPFEAIAQDLLQMYDDAIQLEGASSNLKIMWQNIPLDSLVFMQDSPNYCERDATGLWKGTRGRQCSKDGSGSLEERLSCQQLCRVCGYRVRSQHVRTERRCNCKLVWGFRLQCDVCVQLERQYSCY

SEQ ID NO: 41752 - DNA, 2847 bp, DROSOPHILA
gttccatttaatggcatcataatagaacatacttaagccaaacgtatctattatctggggatcgtctgcccgccgtttcagaaaaggtcaaagcgcggaagttcagcgaaacccgaacgggatcgcgatgaatagattggcatcagatataatccgagtgtgagaggtgcttggacccgaattacactgtgagaaatgtgtatggtatgtaaagcattcaaatttgcaaggtatggccctaatacaacatacaataagggtttaataaacttcgtactgcattttatagatttttttttttttgaaactaaaaaaattatttagaatctttctttttcctagttttttttttagtgattgcaaatagtttttcggcagggtaggggaagtacggaagtcttgcgatgtttacgccaatgttatgaaaggcttaatctgattaaacttaacctgctcaaaaaactcatttaagtcaccaaaaaattccaatgaacataataaattttgatcctatctttaaacatttgaacatggtcgttaaaagaactaaaaaaaataaaacagcttaaacgtcaggaatttttttccatatgtcactgatgaagcttcttgaaaacttttaccgaaccatctacgtcattaaagttcctaattacgaattcgtttgaaaaaccataattcagaaaacctttaacgtcatcacagtttccaagtaccccttttcctagggtaggatgaaaagcaaaagcgctaaatttcataattcttaattagcttggaaactgaactagaagtcgtgagtcgcgagaaacttgtttgtacaatccgatcggttatgctggaatgacaaattatgcataatcagcctgccacactaagatgtagtttcacagagagattcacacaattaacgaacagatttatatattttttttctttcaaacgagaccagggagtacaacaaaagcaatgatctatgcatatggatgaggtagtaaaactatgcagatggatggattggatgagttattgttgaggcctccagatccttttcgcttagcaagattttaatatccttctctacgaatgattgctcttggaatctactgatcacgtccaatagaaccagtcctcccaccaagcaaaatccggctacatataggtagaaaataggactattgggaaaggagtacttatcatgccacgatctcctgagtccctcccgcttgaggtcaaccaaggtcattggcagccatttgctgactatctttcccttgaagatggtgggctttacgcccccaaatcgccgggaacctctacccatctgcttgctccggacagcggactgatactgtgaccaaaccgtatagactcgtctgccggtaaacgtggattcttgcggagatttgttttggttctgcatccggagtctggagtcgtagatctgccgggagtttacccgatggagcgtctgataggcctcacagatcttcatgaagacctcagagtccctggtctgactatttgcatccggatggtacttcttggacaactcgatgaaggctcgcttaatctcccggtcgctggagcccacgggcacgttcagcacctggtagtggttctcggcgcggagctgcgacatcggttggctctggtacgtgaatctggagccgaaggtggccaggcagcgcaccggttggccagctccggtctggatggtcctcaacattcacgtaaattttgcgggtcccaaatcgtaaatgagaaatttttaaaactctcgttctcgcatgaaaaaaaataacaatgtattcgggttaaaaatttatttgactgttcaacagctgccaaccgatctgatatggatgtgtagcgagtgttgaatgaacagagctattaaattaaacaaatcaatgcgttaatactttccttgcagctatggttattttataacaaaaacaaaactatcttaacgacgaacaaaaaattggctcaaaaccacactgttcgaagtcaaggataatcatgcataagttataagatagttataattcatcaccaaaggaaaaggattaagcaacattatagttcacttctcttagaaaatttctataattatctgtacgattagtgagttgaagaccattcaaatttggaatctcaaaaccaaaaactgagtcagcgtgttaaataacccatatttggcacaggttgacaaactactatactaacggcccagatcgataaaagatcgaccctgggctatataagcgaccccatggccaattctgtaaacagatgcacaattgtggtatgatttgtgggccattatctgtctgtcctgaccttccggaagtgccaacgaacttggcaatgaatcttctacgcttggagcgacgcgtgtaccctggatttggccatgttggtaacccgatatgctatgttacacagctaagttaaatatttggcacgtgtgggtggtgttttcgaggcaagtgggtcatttctctcggcaccggagacataaacaattccattgaacttggttttcgcacactgcgtcagcgtttgggccttagattacgtcgaaggtggctaaaaatatttgcacaagacattactataattgtttttgatggcgcattatacgccatcgaatcacaatgtttgcccaacgacgagtcattcattcacctgcgaattagtgtggccataaacgatcttaaaaatagagatgctgccgtttatttattgttaccccatgaaaagcaccatgaaaaaatattttctttgaattagacaaaaatttggcattacacttatagaaaaccattagaaacaacttcc

SEQ ID NO: 41753 - DNA, 847 bp, DROSOPHILA
cagctgttgaacagtcaaataaatttttaacccgaatacattgttattttttttcatgcgagaacgagagttttaaaaatttctcatttacgatttgggacccgcaaaatttacgtgaatgttgaggaccatccagaccggagctggccaaccggtgcgctgcctggccaccttcggctccagattcacgtaccagagccaaccgatgtcgcagctccgcgccgagaaccactaccaggtgctgaacgtgcccgtgggctccagcgaccgggagattaagcgagccttcatcgagttgtccaagaagtaccatccggatgcaaatagtcagaccagggactctgaggtcttcatgaagatctgtgaggcctatcagacgctccatcgggtaaactcccggcagatctacgactccagactccggatgcagaaccaaaacaaatctccgcaagaatccacgtttaccggcagacgagtctatacggtttggtcacagtatcagtccgctgtccggagcaagcagatgggtagaggttcccggcgatttgggggcgtaaagcccaccatcttcaagggaaagatagtcagcaaatggctgccaatgaccttggttgacctcaagcgggagggactcaggagatcgtggcatgataagtactcctttcccaatagtcctattttctacctatatgtagccggattttgcttggtgggaggactggttctattggacgtgatcagtagattccaagagcaatcattcgtagagaaggatattaaaatcttgctaagcgaaaaggatctggaggcctcaacaataactcatccaatccatccatctgcatag

SEQ ID NO: 41754 - protein, 242 aa, DROSOPHILA
MLRTIQTGAGQPVRCLATFGSRFTYQSQPMSQLRAENHYQVLNVPVGSSDREIKRAFIELSKKYHPDANSQTRDSEVFMKICEAYQTLHRVNSRQIYDSRLRMQNQNKSPQESTFTGRRVYTVWSQYQSAVRSKQMGRGSRRFGGVKPTIFKGKIVSKWLPMTLVDLKREGLRRSWHDKYSFPNSPIFYLYVAGFCLVGGLVLLDVISRFQEQSFVEKDIKILLSEKDLEASTITHPIHPSA

SEQ ID NO: 41755 - DNA, 4008 bp, DROSOPHILA
gagctgtcacagcagctggaacagtggcagatggacatgcacgagctgatcgacgagcagatgcgctccaagttgatcaacaaccggcgagcgatggccgccgagtcctccgccccatcgccacccagcagtgctgccgccaatctggccaagcgcgtgaccagctacaagctttggagtttatttcagcgataattggagtaacctaacgacccgctggaaggtctacgccacccttctgttcttgatgtaggacgggaatctatatatttttaatatttatatttatacacaacaaacaacacacacaaatcggagagcctaggcatcataggtattgtacttaattgttatttgtatacgggaagcattgcccttcttctgttcgtagtgaaatctatctaattacgctttattaattttaaacacttaccgcatattcgatatgattattgtacctattgtaattactgtaatgaaaccgtactcgtacctatgtttaaacacaaatcgtctctattctctctttatttagtttatccttaattgattttaaattccgatatggaccccacaactaattcgaatcgagagataaatgtttttaaggcatgcggtgttacttgttgggtccgttttggtcaaaactgttaactgataatcaaaaaaaaaaaaaaaaacaaggaaacatatcgcacctttatgttggcggcttaaaaagcccccatatctcgggagaaactgttgcgattcatcaaaatcaaaaataaaatcaaaatcaaaatcaaaatctgtacgtaagcaaatattatgtgtaagcaaggcatttatgttatagcaaatagaaatattcatcagctggcaatcggaagggcgcaggattagttggaaactgtgcaacagacaaaacttgccttaatgaacggacaatgaaattttagattgtttaaataacataacttaccaataaacttacgattataccacaacaatgatttttggtaacatcagattgttcaaatttaatgatttccttacacgaagtctgtagttatatctacttaacacttattataactaatggtcttatgctggggctacaggataatcttatattatttctttaggttgtgaagtcgcaagtgcttttttaagctcttctgggagaaaaatccctctggacattgcgggcatgggtggggtcgaatcttgtggcttgtgatatgcttatccagggtcttttttaaagcaaacctgacgtcgcagtgcgggcattggtgcagcgtttttggctcatccgggtttttgtgcgtcttctcgtgaccccgtaagctctgctgagtgtcataggctttgggacactgagaacatttaaatggccgatcattattgtccacgtgccaaagggtatgcttcatcagtgactgattcgcactgaaacccttgccgcactggtcgcacttgtagggcttttcgcctgtatggatgcgtagatgactcttaaggtgatggttgtgggaaaaggcttggccgcactcctcacatttaaatggctttatacccgaatgggttcgctgatgtttcatcatgttcgatttctcgaagaacgacttgtcgcagtcggggcacttgaactggcgatccccgttgtggacccgcaaatgggtaatcaaatgctggttctgtacgaatcccttgccgcagagctcacatttaaagggtcgctcttccttgtgcagacggctatgcaacttaaggccagagtttttggcaaaggtttgtgggcagtcgggacacttatagggtcgttcgccagtgtgcctctgtatatgggccctaagattgcctctcgtgtaaaaggttttgtcgcactgtggacatttgtgacccttttcctcgtcgtgggtgtgcatatgcgacttcagagtcggaccgtgcgtataagctttcgggcagagggggcatttaaaaggacgctctccagtatgacggcgtctatgggtcgttagctgggcattggtacgaaatccccgaccgcagaaatcgcagaggtgcggcttttgtgtatcaccttgctccttgtgcttggcaacgtgccttgccaacgccttttgagtcgagtaactcactccacactctgtgcacagaagcgattgattattgccgccaaccgtttggcgccctccgccgccgggaatccagggttcatcttggtcttcagtcgagcccactgtccattggtctgaatcctccctttcgctatcagtattgttattatcattttcttcatcaaaggcatcttcaaatgtctcctgaatggatacttcatcttccgttttaatatcgttcattgttactaaaaaataaatttaaattttagcatataacgggcaagtctagaatagattttagcagtacaatggaagttcttgtgaaagtggatgacatcgaatagacctactttcaaaaacttcttgcaatggttcactctcctgaccattagttgcctttccatcggttggctcatcgatatcagtttttacatcaggccgattagcgtccaatttggttacatttgtgtccaatggatcctcgcaaccaactatctcgaagggtattaatgggttcatagtacctcttctgcaatgggatctactcagatttgagtttgatttatcgagctggaggagctgggaaaagaactgaaaactctgctcacacttgtgacggaagtgaaaggcattttgagcggccaccaggcaggtaggacagatcttttgtggcatttcatcccgtttcacgcgacagatctccggcagaattgagttcaacatttcccaaatggggggatcagagatctccttggagaaaaggtccaccagtatggatgagtgttcggcgcaggctcggcagttctttcccatgctggcgtccactgatctttccatttttcccgatgatctcccaaccatagaggccggaatttcaaaagaatcaacaaatgttgggcacttgctctcctgccaagtagtcaatgtgaacgtattcgcacagagttgtcagctgcatccgatgattactcgatagtcgataaggtttcatatgccatctccattaacgtcgtgaggttaactgtgactgggaacaaatctgcggcattcaaaacaatggtgtcgataggtaggattccaatcatatttaaatcaaaatgtatgtaaatctatattaaaggcattaacaatgaaaataagaatattagagataattttaattttaataaataatttacaaatcaagtaaagttacaaatcagtctgtattataaaaacgtttaattaacatataatctttaacaagcgtgcatgcaatgatttaggtattaaaggttatcattttaatatttatcttcatatttaagttgaaatttgctaactttgccaacagctgcaataattactttcactttcgctttcacagtcacaagattgactcatcggcttaaaaataccagtgactcgccacggaatcgcggatatcgctcatctctatcagctttgagcaaaattagtatcttgtattggccaaacagacaagcgagcgaaggcctttttgttgtcgtttctggcaatgatttaggtcttcatcaagtgttattaagctaggcataaagttttacccatcgctggacatggatatcctggacatcgatgaggcactaaaggatgattcatatatgtgagtgaaaccactcctgttgtttttgttcctgttgttgttgctgctgcagctgctgctactgctgctggcacttcacaggcagaggcatcgatgctataaatactcatatgcctggtactccttggcagatttctggcggataagacccacgacgatgtctccaacatattgcagcagtggaagacgaacaatcagccgccgttgcagcaattgcacttgcagtacaacaacgagggtaagccttttccacacataccgatgcacccgatc

SEQ ID NO: 41756 - DNA, 1903 bp, DROSOPHILA
ccaacatttgttgattcttttgaaattccggcctctatggttgggagatcatcgggaaaaatggaaagatcagtggacgccagcatgggaaagaactgccgagcctgcgccgaacactcatccatactggtggaccttttctccaaggagatctctgatccccccatttgggaaatgttgaactcaattctgccggagatctgtcgcgtgaaacgggatgaaatgccacaaaagatctgtcctacctgcctggtggccgctcaaaatgcctttcacttccgtcacaagtgtgagcagagttttcagttcttttcccagctcctccagctcgataaatcaaactcaaatctgagtagatcccattgcagaagaggtactatgaacccattaatacccttcgagatagttggttgcgaggatccattggacacaaatgtaaccaaattggacgctaatcggcctgatgtaaaaactgatatcgatgagccaaccgatggaaaggcaactaatggtcaggagagtgaaccattgcaagaagtttttgaaataacaatgaacgatattaaaacggaagatgaagtatccattcaggagacatttgaagatgcctttgatgaagaaaatgataataacaatactgatagcgaaagggaggattcagaccaatggacagtgggctcgactgaagaccaagatgaaccctggattcccggcggcggagggcgccaaacggttggcggcaataatcaatcgcttctgtgcacagagtgtggagtgagttactcgactcaaaaggcgttggcaaggcacgttgccaagcacaaggagcaaggtgatacacaaaagccgcacctctgcgatttctgcggtcggggatttcgtaccaatgcccagctaacgacccatagacgccgtcatactggagagcgtccttttaaatgccccctctgcccgaaagcttatacgcacggtccgactctgaagtcgcatatgcacacccacgacgaggaaaagggtcacaaatgtccacagtgcgacaaaaccttttacacgagaggcaatcttagggcccatatacagaggcacactggcgaacgaccctataagtgtcccgactgcccacaaacctttgccaaaaactctggccttaagttgcatagccgtctgcacaaggaagagcgaccctttaaatgtgagctctgcggcaagggattcgtacagaaccagcatttgattacccatttgcgggtccacaacggggatcgccagttcaagtgccccgactgcgacaagtcgttcttcgagaaatcgaacatgatgaaacatcagcgaacccattcgggtataaagccatttaaatgtgaggagtgcggccaagccttttcccacaaccatcaccttaagagtcatctacgcatccatacaggcgaaaagccctacaagtgcgaccagtgcggcaagggtttcagtgcgaatcagtcactgatgaagcataccctttggcacgtggacaataatgatcggccatttaaatgttctcagtgtcccaaagcctatgacactcagcagagcttacggggtcacgagaagacgcacaaaaacccggatgagccaaaaacgctgcaccaatgcccgcactgcgacgtcaggtttgctttaaaaaagaccctggataagcatatcacaagccacaagattcgaccccacccatgcccgcaatgtccagagggatttttctcccagaagagcttaaaaaagcacttgcgacttcacaacctaaagaaataatataagattatcctgtagccccagcataagaccattagttataataagtgttaagtagatataactacagacttcgtgtaaggaaatcattaaatttgaacaatctgatgttacc

SEQ ID NO: 41757 - protein, 583 aa, DROSOPHILA
MVGRSSGKMERSVDASMGKNCRACAEHSSILVDLFSKEISDPPIWEMLNSILPEICRVKRDEMPQKICPTCLVAAQNAFHFRHKCEQSFQFFSQLLQLDKSNSNLSRSHCRRGTMNPLIPFEIVGCEDPLDTNVTKLDANRPDVKTDIDEPTDGKATNGQESEPLQEVFEITMNDIKTEDEVSIQETFEDAFDEENDNNNTDSEREDSDQWTVGSTEDQDEPWIPGGGGRQTVGGNNQSLLCTECGVSYSTQKALARHVAKHKEQGDTQKPHLCDFCGRGFRTNAQLTTHRRRHTGERPFKCPLCPKAYTHGPTLKSHMHTHDEEKGHKCPQCDKTFYTRGNLRAHIQRHTGERPYKCPDCPQTFAKNSGLKLHSRLHKEERPFKCELCGKGFVQNQHLITHLRVHNGDRQFKCPDCDKSFFEKSNMMKHQRTHSGIKPFKCEECGQAFSHNHHLKSHLRIHTGEKPYKCDQCGKGFSANQSLMKHTLWHVDNNDRPFKCSQCPKAYDTQQSLRGHEKTHKNPDEPKTLHQCPHCDVRFALKKTLDKHITSHKIRPHPCPQCPEGFFSQKSLKKHLRLHNLKK

SEQ ID NO: 41758 - DNA, 7309 bp, DROSOPHILA
aaatggactgctatctggtggaaactttctgctgtgcaggcgaacaaagtgggtgactgggtggcttggcgagagacacctggacgaccttgaacaggtgcaaggttcccaaaattctgcgcagcactcactcgaacacccacaaacacaaacacagcaagccaaattggccaaaaacccttgaactcgatacatttcccattacagctcattagctcattgttgctttgctcttttcatatccggctttaatttgagttggcattgttgcatttaacgcattagccagaagggggttactgtttcccctcaatttcgtgaattttcctaagtagcatctcttcaattcagcgtaatttccaacctaatacgcgtgcgctctcttagcctttgctcttagctgatttatattcaaatgcaagttctcttcttttcgaaaataaagttcgagtgtaaaatcagcaaagctttgtcacttcgcttaacaccaattcaaacagcttttgtcaggcacagtttgggaacataaacatctaaaggtatagaaaatttgatttgatgaaatttagagctcgaagtaaaacaaattacagcattaatttacaaatcaatattcttgttttattaaacacaatactacaactagctgatcgatgttgaatgccgattggttggttttaacaggatgacagttttggtgggtggcaaacatttgatacaaatattcgtctgtggcatgaatcgtccgccgccagcacttcttctatgttctggcaccaacaagccggaattccaaagaagtgaaactacttcagctcatatggcaaattgttggggtatttaaataggatttgctaggggtttcacggcgatggacagaaggtgttagagatgacgatggatcctggtggttggctaatggcactacatagtagctattaatggcctaatacattgagcggcattttagattggcaaatggattggcaagatttaaagctcaaccacgccaggttagaaggctccatccacgactgggtttcttggtgctcgagggctctggctgctgctgctgctgatcctgttccttctgttgttgctgctgctgctgatcctgcctctgttgattctgctctatataggtgcgtagtatggtatgcttgtgtacggacttctcgaactcggccgcacttggccgatacgcctcgagcttgtgcttatagcggcctgccgactgcgatgggtccgtggtgtaggcgtggctgccgcccctcgaggcgctgccaaacgaactgccgccgaaggtcgacgctgatggtaccgctgcctgtgggttgaatggggagggatttggattgatggtttggacgggcttgggtcttggttggttatagctgaactggctcttgttaatgttgttagtcggcggattgttattggcggtttgactggaagggctgctgttgtagccgtactcatacgtttcaattgtgtttgctccgtaaacgctgttggccgctggcgaggatccgggagcggcgcagagtccttggtagcgggacgaaggcttcatgccgtatgtggagcacgatggctttccaacctcatagggattgtagcccaccacattgccactgcaagaaggaagagaaaaatcattagatcctgctatgcatgtttaaatatttaatgatatcagaagagctaaaagtgaatcccctaatacaattatgatatattgagagacttggaatatgatgttaacgtttttaatattaattagttagttattagttattatttagttatatattgtaattgaattatttcaatatacagccggaaaagaattttagggtatattcactgaattaattaataattaacataattactaacatctatgaaacttacccaggcccataattgcagacgtagagcttgttgtacttgctggtatccttgtactccgcatatccacagcccaccaagctggtctcaccccaaaccagttgggaatagtgtccagttttgggggaccaggcgtccccgaaggagtacttctgcacctcgttaaaccaactctggatgcgagaggggaaatcaccgtcatcggcatccaaaggcgccgtactccagatgatggccagattctggcccatcgtaaagcgatctgttaatagattgatgtcgcatattagacttaatttgatttacaaaaatattgggtggtggaatataaaattatggggatgcaggtgcggttactaatagtgccaagttagtcttattgttttagaagcttttcgtgcaggcagaaaatgggaaatatgatcttaaaaaatagttgcatttgggtggcctttaaataattattattaattggaaaaacatatttacacaaggagcttattagattaatgattcgaaaatattgtgaccacgaatcatgtctatatgagtcattttttaaaacaaagctctcaaaaaggtgtttccaggtgattgattgatgaaattcgtttaagtggcagtgaaaggtgccgtaaaatatttgaatatataatagactttggatttgatacattctctaaaaataacgatgtttaatcaaggaaattcagactttataggtttaatgaccaccctaattagccaataccgtatcatttaaaaaaaaaatgcgctgatgggctccaaattcttggttcacatgtgagtatgaatcggaataacttacttattgtacggtgcggatcgtgacggaactggcagttgtcagcccatttctgagctctggcggccagctcatcgtcccagacgatctcccgcatattctcggcacccggctggcctggatagcgacccgtggccacgatctgccggaggcgattgtgctcctgcaagatgattgatctctcttccgccgtgatgcccgatgctgaaatgattaggtcgagatttgcataaattaaaaagagtctccaaaagatggggaattaatgggggaatatgtatgagccacgcagctggagaattttatcatttctatttttatttgcattaaaatgcttgcttttttcgaatattgcttcgggctggtgtttctcctttgacatggagatggaaacggacgccaacaacaagtgtctacccaagggagccggtttctagcgagctaatatttgtcgaaatctcagtgtctatggctctgcctcacggaaaccccaagtggggctacgcatttttattggtctttgttttacatatattttaattatttacccggctacacaatattcaacacttgcgtatgctccaaattgtcggcgattagtgttttatgtaaccagccggttgggcgaatcacaagacatctgtgtcactttccttaagcgatttagctccccaaagtcaaccggtttggttcgataagatttggccattaaaatggaacacagaacaaaacgaattggaataaaaaatcaaatgaaatccaaaatgctagcggcgcgtgctgctcaaaggcgtcaattagccaaatttgtttcgaatttatcccaaaatcatggtcctatgacgcctgactcacgagagtttggtttgaagtgtgtcagccaatcagttacgaaaagtggtcgcagtttaagccgaattgccccggggtgttaattactccgagatcgggtcgaaacagtgaaaagaagctgagacggaagtggatccttggggagtgccccatttcatttaaataattacgcgcgcttaataatttttaataattataataatggagcaggcgatgggcgctgattgcccatcgcgacgtgatagcatttaagcaaggcttccaacttgaccatggcttttgccggccggtcaagtgccgggacgtgtctgtcggaatcagatttaaagtcagacaacttgacgcgccccaagttgatcgtctctgggtaaataaattggcagcttcgccaacagtctggcacaaatatatgggtctagatgtcaatactgaagcggcggcggcgggcgcaaaccaaaaccgagaatactaagcacggcgtttgcctcgacttaatcttaaaacatatgctgctcaaggctgggactaaaaatagcacatgagccatcgatcagaatcgaatagctaaagctcaaaagcgcagagaccaaccgcagctgtcaaattatgctacatttgtatcaatgcgaaaaccggtaggcgaaagccaaaaaccaggcccagagctgtgtgtttaagtcggcagcggacatcaatcatccggcaaagccttacatttccctagtattctgtatggatgctgcggttgttgcaatccagcaggcgctatgcaaatttgtgaactaccttcgctgacaaattgcacatatagctgtcgatcagtttccgcttgcgcacaaaacaaaccgctgagataatgttgacaacggaacgtcaacagctcgctcgaaacgaaacgaaagactcaagcaacgaacttgctcgttggcagtctgaccgctcagccaaatgccgacaatatgttaacaagtgcttaactgcaccgcatcttggccaggcgttgacttcaccttgaacaaaacagaaaaaacaacaacaaagtactgggagtaaaatgcccaacggaagggggctcagtggcaaggactacaagacgttgaaaaataaccgacgcatttagcgcgagttaattttcatagttatgctttatgtttcgtttcattttcatttatcatttactgattatcactacaactagccttgtgcccaacatatttaattacattattagcacgacggtcttttgattgatgccgcagcaaaatgatgcggcttaacagccatgatacctgtgacatgcgattaaattggagtgccgtcccctccgaaggaaacacaccatttaatcgagctgatatcgaagacaaggcataaaagcaatcatcaatcagcaacgcacacgcgcactataaaaatctttttgttttcatttcgcttttttatggcaaattgggattttttgggtgtttagcgccgcgtgtgcagaacaaagaacattaaagctttcggtatttctatttctaaccgaatctcataagcgtggccaagatccgctcaatgacccattaaaaatcgagtgatttgccagcgcatttgtgacgcctggtaacttaatttgtttacaaatttcatcttggcgcctcggtggggcaattaaaaagtcaaactcagttcaatgagctccttttgcacgcctgattattaggcgccactaatcgagctcaagggttctacgaggctcctgctctgatctcattgaattttaaggggatttaaggggatacagccttttggctgtatgagcggctgacagttgataggtcagccacctaaaataattttaattcgtttgggcactggcaaatattatataaattatataaaccagatattttttaaccggttcccatcccgctcgacgcttaagtaatatttcgcctgtatttgttgcttttctaaactatttattatgcaatatacacactgtttaaaactggaaaattaagaaaggtgactcggatgtgccaatccgagtctatttttggtgggaccggccaaactggcaaattaagaggcatttacatattgttcaatatattctcgatctaccctcgctgaaataagcagatcgcagcttaaacagaatatttttcacttgcaaatatttgcacttcactgtattcatttacacaccaaatagctgaaacgtgtgtccaaaatgaactagaaaaaactcaataaccatgctagacatgccctgaaattctattttcgatagaaacacccaaaattcgtgagacgcatacagattttttgggaccttggtgtgattttcttgaataacttaccaattatctttccattgcaggcgaatgccacttcgcaggagatgatcataattgtggttagtaataccgcacttggctgcatcattttggttatataaaattgggttttaaacaacacgttgatttcttctttttttttattgatttaagcactttgttaatttttcaaatataaccttttcataaatgacagagttatatctggtattccatacactatagatttgcaattttgctaggattttttgtatcacaattttgaacggtgggcgtggtggatgaaatgtggaaaaccgaaaaaaagagcgccacgaaaaaaagccgacgactccaactccactctcgtgtacgtgcagctagacttgaaggcgtcgcctgtttgattaaccgctcggcggcgccaacgtttttataccgccgatcgccggcagcggcagcggcagaagcggcagcaacaggtaaagaagctaccgatcgcccagcggaatccgaatcggaatccccaggccagaaatgtgagcaaagcgagagagcgacgcaaataacgctgcgcagtcgcagttacgcgctagcaacttgttgccaacgcgccagcaacatgctgcttcgggtacggctgttagtaagatacaatgctcagttttgtgtttttttagccggcgtaattgaagattgaactttatattaatcatcctgctggttcggcaacaatcactcgccttcgccgggggcgtggcagctggccgggtcgctgggaaaactgcgaaacccgcgaaatcgacgagcaggtgccctgcgggcaggcagtcgaagcttcgatcatttcgcgtatcattaaaaaccaataaaaacacccaattaaatgcacagtcgccgcgcacaagaacaaatgccacttgatcctttcaccatcatcgctagtggggcagtcatgtatgtatgtgcgaatatctgtatctgtgtctgcccattgaactgaccctgttcgcttttgctccgcgcatttccgcttcgcgcaggccggcttcttgccaaaataattacgcgtacaaagccattaacaagtacaaacgattgcgccggcccagaatcgcagagcagagcctttttttaaaccaaaggagccctattcatgcactgcgaataattagattgcggtcttatttgaacatattataggaaacagagtatgatgttaacgccggttttcgcattgacaaattaattttacaatatatatatacaacatttaagaaatataaaaatatgatttttaaacaaaaaattcataaggtaattatgatcgttgtttttccaagtgtggccactgttaactggttctgtttatttcacctcgttttagtgccgccga

SEQ ID NO: 41759 - DNA, 1466 bp, DROSOPHILA
acgccttcaagtctagctgcacgtacacgagagtggagttggagtcgtcggctttttttcgtggcgctctttttttcggttttccacatttcatccaccacgcccaccgttcaaaattgtgatacaaaaaatcctagcaaaattgcaaatctatagtgtatggaataccagatataactctgtcatttatgaaaaggttatatttgaaaaattaacaaagtgcttaaatcaataaaaaaaaagaagaaatcaacgtgttgtttaaaacccaattttatataaccaaaatgatgcagccaagtgcggtattactaaccacaattatgatcatctcctgcgaagtggcattcgcctgcaatggaaagataattgcatcgggcatcacggcggaagagagatcaatcatcttgcaggagcacaatcgcctccggcagatcgtggccacgggtcgctatccaggccagccgggtgccgagaatatgcgggagatcgtctgggacgatgagctggccgccagagctcagaaatgggctgacaactgccagttccgtcacgatccgcaccgtacaataaatcgctttacgatgggccagaatctggccatcatctggagtacggcgcctttggatgccgatgacggtgatttcccctctcgcatccagagttggtttaacgaggtgcagaagtactccttcggggacgcctggtcccccaaaactggacactattcccaactggtttggggtgagaccagcttggtgggctgtggatatgcggagtacaaggataccagcaagtacaacaagctctacgtctgcaattatgggcctggtggcaatgtggtgggctacaatccctatgaggttggaaagccatcgtgctccacatacggcatgaagccttcgtcccgctaccaaggactctgcgccgctcccggatcctcgccagcggccaacagcgtttacggagcaaacacaattgaaacgtatgagtacggctacaacagcagcccttccagtcaaaccgccaataacaatccgccgactaacaacattaacaagagccagttcagctataaccaaccaagacccaagcccgtccaaaccatcaatccaaatccctccccattcaacccacaggcagcggtaccatcagcgtcgaccttcggcggcagttcgtttggcagcgcctcgaggggcggcagccacgcctacaccacggacccatcgcagtcggcaggccgctataagcacaagctcgaggcgtatcggccaagtgcggccgagttcgagaagtccgtacacaagcataccatactacgcacctatatagagcagaatcaacagaggcaggatcagcagcagcagcaacaacagaaggaacaggatcagcagcagcagcagccagagccctcgagcaccaagaaacccagtcgtggatggagccttctaacctggcgtggttga

SEQ ID NO: 41760 - protein, 380 aa, DROSOPHILA
MIISCEVAFACNGKIIASGITAEERSIILQEHNRLRQIVATGRYPGQPGAENMREIVWDDELAARAQKWADNCQFRHDPHRTINRFTMGQNLAIIWSTAPLDADDGDFPSRIQSWFNEVQKYSFGDAWSPKTGHYSQLVWGETSLVGCGYAEYKDTSKYNKLYVCNYGPGGNVVGYNPYEVGKPSCSTYGMKPSSRYQGLCAAPGSSPAANSVYGANTIETYEYGYNSSPSSQTANNNPPTNNINKSQFSYNQPRPKPVQTINPNPSPFNPQAAVPSASTFGGSSFGSASRGGSHAYTTDPSQSAGRYKHKLEAYRPSAAEFEKSVHKHTILRTYIEQNQQRQDQQQQQQQKEQDQQQQQPEPSSTKKPSRGWSLLTWRG

SEQ ID NO: 41761 - DNA, 10187 bp, DROSOPHILA
ccgggagatggaaacaatgcgtttgggagaacatgggaaagagatctggggatctgaagatacatatgtatattcaaacaactcaggctgatcaaatagattgataaattcaaacatattccacagctgtaggtgaattttttcggcccacttgttctaatagagttagagaaattgggtttgctcagcttttttgggcacagggccacatatgtacatatctaatactcaccgtcttttgacgctttttgctgctctccggaacttcactcatttctcgaggggaactgtgctcgcctattatgacccaccaaagtagcacgtcctcctgccaagcaattccaaacaaaactgcgaaaagtagtacttcgagtcggaattcggtgcaatcgatgaatgaagtgcgccacggaagtaaccgttggctggcttactgttttccaaataggtgtagcactcgcagcagctggactattgcactaaatagcttaaagtctagttatatcgcaagcaaacgtttaaatttgggatacgagaactgtattattactaattcacatgcacacaaacacccacgcacaccaacgcagccatcggcgctcagctgattagaggtggcccaagtgtacgatggttaaacgatagcccactacattgctaatgtaaaaacaaatttattaatttaattaatattttaactaaactatcgcatagttgtaagaaaaattccaattgcaaattaaattaaagtcaatactacttttttataaccgctttttagtaacccattgaaacataacttatgttccaatggatgaaaaaatagacaaaaaaagttgaaactttattaaaatgtagctgctaaatatttaatatttttgtaatatcccaaatcaaatttgtatgaaaaacaaagttcgttctgaatgtacgtttattgcaaattcatctgataaataaaggattaggactaggcttacgattaagaagtgtcttcgatctagtacggtggtggttgatactgctgctggcccatcatgttctgccgctggagctgagccaccagattcggcgtttgttgctggttcatgctctgctgctgcggcaccattccgcctccggcgccaccgccaacggcgccacccccctgctgaggcccggctcccatgccgccgcctgccccaccacccataccctgcaactgcatcatttggtgcctcagctgctgttgttgctgttgctgctgctggaactgctgctgggtgttgaggacgccgggtttgcctcctcccgccgactgctgacgggcgtacggaggcacctggccgacgacgccacccggccccggacccatcatggtggacatggttacgttgggcgcctggttcatgtactggttccggttgccggccatcattcctccgggaacaacgcgctgttgctgttgttgttgttgctgctgctgggcaaccgctgcggcggccataaagtcgggattgttgcgattcccctgctgcatctgcggattgaagttgcccatcatgttggcctgctgctgttgctgctgattgggcgccatgccgacgcccactccaacgcctgctccaccgccctgttgctgcatgccctgctgttgctgctgctggtactgattctggaagttctggaactgcacctgctgctgcggctgttgctgcggctgctgttgtatcatgccttgctgaggcatgcctcccatgcccatgttgggattgttgccggcaccgccaacgccgacgccaacaccaacgcccacaccgttgcctccctgagctccaccgctctgcatcatttggttggcattcgggttgaccatgcccaccatattctgtgggatttgttgctgcatcatcggattctgcgacatgccttgacctcccatgttcatctgattcatctggttgggcgccatgccgggtcgcatgttgccgccgcgcatgaactgctgctgttgctgctggttgggattcatctgttgctgctgggcgttctgctgcggctgctgctgcatggcgttgaatgcagcgacagactgaggattttgctggggattcatttgctgctggcgcatttggttggggttcatctgctgctgaggaccgggctgttgttgcgaagcctgtggttgttgctgcatcggattgaaaccaccccccggaccctgttgcgcttgctgctggaatggttgtcgttgtcgtagcatctgtgatagcgcctgcttggagttggcattcaacggcgggcgctcgatgcgatttgctgcaatggtaagtgacacggattacaatctttaaccgtatataatatcaaacactcgacttacactgcatgttctgctgatgcggagcgtattggttgtggtacggttgtggcggctgctgctgctgcggcgcattgtgccactgttgctgctggccaggcataccctgcggtccggctccaccgccccctggtccctgctgcatgaagttcatctggggatttggctgcccgttcccaccgcccacattcagctgctgctgcatcgggttgttgcccatttgctgcatctgctgctgctgctgctgttgtaacatggcattctgctgcatcatgttgttcggattgggtgcaaactgctgcatgttcatctgtggaaaaaatttatatgagttataatttaaactcgaaggtaacagaagaatggtttagcaccgaaaaaggttaagaaaatctggattacaagtttacaactttcgaatttttctgccatcatgttgctttaagaggcttgcttcgattccttcataaaccaaatctaagaatttaactattaacgaaaacaattttattaccggcatgttcattggcatctggcccatttggttgggctgcatctgctgctgttgcatgtgctgctgctgcatgtgctgctgttgttgctgctgctgttgcaactgctgttgctgcacattctgcggctgttgaggctgctgtgccagctgaggctgctgttgctgagtattgaccaccggtggcgttttcgggttcttcggcttgcgtttccgcgtggtcgttcccttgccgcgacctcttcccgtgccgccaaccacagcgcttggcgactgatccaccgacgagggcgtgtccgccttcatttcatccttctacgaaatagaaacaatgcatttagaaaggggcaaagggaaatgcaaaaggaaatacaaaatggacttactatgcaaatcttctcgggaacaggctcaatgtcttcaggtggcagtggcaacggttcatagtaataactactgggcttgaccagactgtgcgtgtgatacttcaggttgcggtgagcctcctcgtaagtaaggggcttgcgctccagcttgactgcaccaaaccacacccaggacaaaggagccgggttcttgtgaccctcaaggatgtcccacacgctgatacgctgtttgtccgaaatgcgtagttgttttttgtctatatcgcagatcttgttgcccttggtgtccattccagagtgttcgcacgcaatcacctaaagggagaaataccactcagtttccaagctcgttcagttttgggtcatctactcacctcagtaggctgcttgtaaagtggaagaagctgccgaataacccgaatggaggcgttgttcttctctccgatttccttctttagcttcttcatcaggttcatgtagtgcctctcgtcatcagagaccagcgttgagtgcaccaatgtggccaacatgtccacaacggtggtgaacagctcacgattgcagctgagatctaccacgccctggcaaaccaattgggccagaagaatagcccagtctgtggtgggggtactgttcttttggatagcctcgaacatgccgcccaccagcgaaaagcgcaactgcagcgcatcgaggatctcctcgcgcgcctgcggctcatcaatgccaccgattgtgtccagctaaaaggagtcatgttactagtaagtttaactttaaggatagaaagtaaacactcacctcagcaaaggattgcagacattgtgataactgggcatagagcgaaaccagtaagttttccttgtactcgtcctggcctttcaggcaagttaggatgagacccaggaaaggctgataatcaagcggcatcttcttgttgcgtgcgggcacgccgcccagtccatagctattgctactgtgacaactgttgctcttctcgcgctcgtcaccactgcccgagctattgcaatcggacttggacaccttggagaaatagttcatgctctcaagaacctgaccagccactcgaagtatcctgccctgcaccgctggtgttagtttagcgatgagtggagccactagccaggtggacggtttgggtttgtgggtcgccttcacggcacccggcaggacaacttcctccatgtggaagacgtcgattgccgcgcgtgccactgtgtcgagccaaacattaagctccgcgttgttgctcagcgattggcggtacataagctgaagatccagccacgagatacgcagtgtccactgtccgagattctctagtatgcgtacgatcattgagcgctgatccagttcggagatgatgttaaactcaggctccggatagcagatcatgtgcagaacccgctgtgcctgtttcgcggtcagcatttcgtcgattatcatgtcgcagagttgctctgcgttctttaggcatctttccagaacgtgttcctgggcgcagatctgcttgagcaccgcctgggcgaactccaacagcgagatctgctccattcctccgaccgatggctgttgcagggcttcgggttcgcttgtcaaactgctgcccaattgtaaatcgctggtgcccaggatctggctgagatcggccggtcgttgttcgttgctcttgggtgtgcttcccggatggaccggtgtattgaagccactacgcttgccgcttccaaaagctccgcccaatccgccagaggaggtgccgctgccggaagccaatggtgttttaagcgccgcattgtccacaacaatgagaatggccttgagcacggcaagcactgcggcaatgggaatggtcttatgggcacccaccagaagatgacgatcgcagctcagccgaatgctaaagtcgtttcccacagcgtgcagtggattcggggaagtgcttaccgagtacatgccaggttgaggaatctccaaggtcttaaacagcttcagcaccaagtgacatgtaagacgagcacctgcctctgcatctacactcagttcggctccaccagcgcttaccgatcgggccaatgtaggcagggcgaacttacttacaaagtcggctagtgagaagcaatgtctggccaccagaatgcatacgaacacggccagggcgttgtgagtcttaagttgtccaatgtcgacctgtccgcccaggtgcggataacgcggactcttactgccgctgcacagactctgcagtgcgtatatccactcctcagacaagacgttgcagctggcggtcagttcggcacatgcgagggccacatcgttcagccgctcgttgtccgtctctcggcagacggctattaatgcgttagacacgaaactgtatacattggccggcgactcgtgcagggttcccagccagtgaggatccagtttaccaccgcgtcgaggggccatgaaaagctcctgcaacaacagtgggttgtaaccctgaggtggtaggctaaataaaaaatggtaatatttgttaatattatatattatattattggggaagaacttgcgatctaaactcactcaagctgctctggagtgttgaatatgtccttgaaccgcttgatgcactgcagctgctggtagtactccgtggattgttcctttccctggagcaaaacacacgactcgtgtaggtcgctcaggtaggcaataatgcagcgctccgccgaagtgcactcactcggattcgatacgtgccgaatggtacgacagactccctcaaaaacagacagcgtctgctccggtgaaagaagaaggcagctgtggtagcgccgcaggatgctgacgatgtagagggcaagtgaagtggtgtaactgcgcactaggtttgacttctttagctgcaactggtgctccacctcaggcaactccttcaacagactatcgcacagttccaaaagactgtagatattaagagccagctccatcagatcaaagaggaacgccacgtgctcctgtaccggcaggtagttgttgttccctaacgcgaatccgttcagctgctccaggacattggccgcacattgggctgtgaccacatgctggtcgaaataagccatctgctggcacttggacgtggtagcttcgaagttaaactcgttgcgcgagtgcttcttcacatgaccggccgccgccacatctatgctaaacttttttgtgaaaagctttccaatttccttagacatcttcttgacagcatgcttcttctcgtccctctctttgccgactccgaagagcaggatgtatcgctggttgctttcactgctgtagctgctcatgctgggatcatcctgggggatggggaagtgcttggtgtacacgtaatgccgcgatatgctaccgccaggattggtttctccatcgcctggaggaccaatcttgggactgtctggagcttcgtgctgttgtcctttctccttaatattttgcaccagtttgtccaaatcgtcgtccacattggaatcatcaaattcgttgtgtttgaagtccaggcccccgccgaatccgtcatcatcgaaaccgtgcgtcgtcgttggtggtggagctggaggtggcggcgatgttttcgtggccgttgttcctgatttgatcaccagcaccgactccaggagcagatctcctcgtgaaattagagtgtgcatgtacgcgttgtgcgaaaagacatcgtggcgaatcaatgcactgaacagctgaacaaggttggtaaattccgtgcgctgctgtggactgctcacgtgctcatcgaggacgggagcatcgtggtcaaggaagtgcattaacacgtgctgaaacacaggcaggccatcaattaagccggcgcccgaagctagcgagtccttgtcatccttatcactggattgttgatccgccggcgtgcttgtcacgtcgatctggcgcttgtcaagtagaatggccaccaccatggctctgtgttctccccaacgctgccccgacacagcccactcgcacagaatgcgtaccgtgtccttgtcttgtttgggttcataaggcggacgaggttccacctgatcctcctcccgcctgcgactgacagttgggctgggaaatatttgtgcgtatagggtatcgatactattattgtgttccatgcgatcgaagcagtgcgtgtccaagtggtccagtgtagccagcacactggtgtattgattcttgccggcactcagccacttggctgcaaaccagcgctgctctgcatgctgagtgcgcaatacgatgtccgactcggcggcccgcaattgacgtcgaatctcgtgattggttcgcggacagcgtgtgggcatcggcaagactgagggcgccaaaggcaaatggtccagcggactacccaacaacgaggagggtgctcggtgagctgctatcccactccagaccagagctgtggggcactcgattgtgatgatctgtaggatcgtgcttaaatacagcactatatcccgatgatggggacaactcatttgttcctgaagcgccagctcatagggatcttgttgcaacttcggctcgtccaactctttgatggtctgctgttctacgacagtgttcagcaactgggccagttttttggacactatgtaggccatctttctgcaaagacgctccgactggacgaagtcgtgcatgtactgaagggcaaagctgagcaccaatttcttcaacggttcgtcgaagcttgcctgcgtacgcatcttgtccaaaaggtcgaggatccagtttagaaattcctgtcggtccaaaagtgattcctcgtacatgtacttgctcaattggtggcagtatttccaatacttaagcgcattgcgactatcttcgaactggcttccaattccagaaattgtagagcctggtggaactgcagctcctgcacccgctgcgcctcctaccacagaagaccccggcccaccgactactccgccaaggcttcccgtcgtcggcatgacactgccggcattcactcctccgccaggagctgcctgttggccattagctgggctatgaatcggtggcagtggactggccatgctgggtaccgggattacgttcgtggaagcactgctaccggtgacggagttaatagagctggtgccagtggagccattgctggcaggaccattaccggcggcggtcaggcttccggaagtggtgccattcgaagaggacttgtcgtggtctaaaatcaagaagttgaataagggagttgatagattatagaacttaaggactgtactcactctgctgataatactcttggagcttgggaagcagctctttcatgaacttgatcatgttgccggtccactcggcagccgggtcgtaaatggatcgctttttgttcttagactcggtgaagctaagcgtataggcggcgctcagcttgatgaaccaggtggcgcgttgcatgttcacctggttctcgcacagagtaatgaagatctcctccttcttgttgaacgatggagcccgtttggctaggctaagtaggggtttgttaccggcgaggtccttaaaccaggcgtccaccgtacacttgcgacgcggcgaaacgggccagaagttgtccttgcagttgatctgctgcttcttgcgccccgtgtccggcagggtcatcagctcctccttcttggccaggacgccgctaaagaatgcgctcactttgctggcgttcacattcgagttgtgggccgtaccgaattcatcggacagcggtggcgtcgtcgtgaatccgtgcttcacattcgtgggcgtcagctcgtcctctcgctgcttcgcgtcctgcggatagatgtccggcggacccagacgggtgcgcttcagcggacgcttctcctgcagcatggacagcatcttcgcggccctctagttgcgttttataaacagattttcttagcgaattcccgatttcctctgttcgccaacccaacaacaaatcaaaatatcagtggtggggcgaaaaaatgcgatgagccatcgatagttcgataacatcccgcgaacaatctagcggatgcaatcgaatttaagctaagtgttaaatggttgtaaatattacaaatgtaatcttatcatgttcagccacacatccccaatcaacctgatacagtactttaaatatgacgtaattttttaattatgcagtgaaaaagttacatcgttgtgcactaacaaaagaaataccactcaaagtggtaagatcacgaataaagctgcgtataaatattaaataatttacgttgtatttttggtaatgattgaagaaacattcgttgttaaacgaataaggcctcacaaggcttggcgatcgaattccggctcatcggcataaaagtgtccgccgcttgtcattccatcgctgcactcgaagttcaaacagagcattttcaggggaaattcgtgcggtagctgcaaacgaagcacaaagtgtcacattaacataaggactttcgaatatatgtatgtgctttaaatattactcacccgttccatgatgtcatgcctaatgtcagtggccgcggcaaatagctctagggtttgatgagctgagcgtttcgataagctggccagcgtgtccaagacgaaggcgtctgtgatgcccaggcaatagcaaatgttcagataccgaaggcgctcattgttggccaccaaaagggagagctgcgtttctccaatctcacgagcggactgtatggaaaggcactctaatcgactcaacttcgccaagtggtgaacacacagatcgtcacgaggcttgcagaccagccaccggagacacttcaaagcactgatgtactgcgcctgctcctcgtcaatccagcgtttgcggtgcaggatgaggtattccaactga

SEQ ID NO: 41762 - DNA, 7535 bp, DROSOPHILA
atgctgtccatgctgcaggagaagcgtccgctgaagcgcacccgtctgggtccgccggacatctatccgcaggacgcgaagcagcgagaggacgagctgacgcccacgaatgtgaagcacggattcacgacgacgccaccgctgtccgatgaattcggtacggcccacaactcgaatgtgaacgccagcaaagtgagcgcattctttagcggcgtcctggccaagaaggaggagctgatgaccctgccggacacggggcgcaagaagcagcagatcaactgcaaggacaacttctggcccgtttcgccgcgtcgcaagtgtacggtggacgcctggtttaaggacctcgccggtaacaaacccctacttagcctagccaaacgggctccatcgttcaacaagaaggaggagatcttcattactctgtgcgagaaccaggtgaacatgcaacgcgccacctggttcatcaagctgagcgccgcctatacgcttagcttcaccgagtctaagaacaaaaagcgatccatttacgacccggctgccgagtggaccggcaacatgatcaagttcatgaaagagctgcttcccaagctccaagagtattatcagcagaaccacgacaagtcctcttcgaatggcaccacttccggaagcctgaccgccgccggtaatggtcctgccagcaatggctccactggcaccagctctattaactccgtcaccggtagcagtgcttccacgaacgtaatcccggtacccagcatggccagtccactgccaccgattcatagcccagctaatggccaacaggcagctcctggcggaggagtgaatgccggcagtgtcatgccgacgacgggaagccttggcggagtagtcggtgggccggggtcttctgtggtaggaggcgcagcgggtgcaggagctgcagttccaccaggctctacaatttctggaattggaagccagttcgaagatagtcgcaatgcgcttaagtattggaaatactgccaccaattgagcaagtacatgtacgaggaatcacttttggaccgacaggaatttctaaactggatcctcgaccttttggacaagatgcgtacgcaggcaagcttcgacgaaccgttgaagaaattggtgctcagctttgcccttcagtacatgcacgacttcgtccagtcggagcgtctttgcagaaagatggcctacatagtgtccaaaaaactggcccagttgctgaacactgtcgtagaacagcagaccatcaaagagttggacgagccgaagttgcaacaagatccctatgagctggcgcttcaggaacaaatgagttgtccccatcatcgggatatagtgctgtatttaagcacgatcctacagatcatcacaatcgagtgccccacagctctggtctggagtgggatagcagctcaccgagcaccctcctcgttgttgggtagtccgctggaccatttgcctttggcgccctcagtcttgccgatgcccacacgctgtccgcgaaccaatcacgagattcgacgtcaattgcgggccgccgagtcggacatcgtattgcgcactcagcatgcagagcagcgctggtttgcagccaagtggctgagtgccggcaagaatcaatacaccagtgtgctggctacactggaccacttggacacgcactgcttcgatcgcatggaacacaataatagtatcgataccctatacgcacaaatatttcccagcccaactgtcagtcgcaggcgggaggaggatcaggtggaacctcgtccgccttatgaacccaaacaagacaaggacacggtacgcattctgtgcgagtgggctgtgtcggggcagcgttggggagaacacagagccatggtggtggccattctacttgacaagcgccagatcgacgtgacaagcacgccggcggatcaacaatccagtgataaggatgacaaggactcgctagcttcgggcgccggcttaattgatggcctgcctgtgtttcagcacgtgttaatgcacttccttgaccacgatgctcccgtcctcgatgagcacgtgagcagtccacagcagcgcacggaatttaccaaccttgttcagctgttcagtgcattgattcgccacgatgtcttttcgcacaacgcgtacatgcacactctaatttcacgaggagatctgctcctggagtcggtgctggtgatcaaatcaggaacaacggccacgaaaacatcgccgccacctccagctccaccaccaacgacgacgcacggtttcgatgatgacggattcggcgggggcctggacttcaaacacaacgaatttgatgattccaatgtggacgacgatttggacaaactggtgcaaaatattaaggagaaaggacaacagcacgaagctccagacagtcccaagattggtcctccaggcgatggagaaaccaatcctggcggtagcatatcgcggcattacgtgtacaccaagcacttccccatcccccaggatgatcccagcatgagcagctacagcagtgaaagcaaccagcgatacatcctgctcttcggagtcggcaaagagagggacgagaagaagcatgctgtcaagaagatgtctaaggaaattggaaagcttttcacaaaaaagtttagcatagatgtggcggcggccggtcatgtgaagaagcactcgcgcaacgagtttaacttcgaagctaccacgtccaagtgccagcagatggcttatttcgaccagcatgtggtcacagcccaatgtgcggccaatgtcctggagcagctgaacggattcgcgttagggaacaacaactacctgccggtacaggagcacgtggcgttcctctttgatctgatggagctggctcttaatatctacagtcttttggaactgtgcgatagtctgttgaaggagttgcctgaggtggagcaccagttgcagctaaagaagtcaaacctagtgcgcagttacaccacttcacttgccctctacatcgtcagcatcctgcggcgctaccacagctgccttcttctttcaccggagcagacgctgtctgtttttgagggagtctgtcgtaccattcggcacgtatcgaatccgagtgagtgcacttcggcggagcgctgcattattgcctacctgagcgacctacacgagtcgtgtgttttgctccagggaaaggaacaatccacggagtactaccagcagctgcagtgcatcaagcggttcaaggacatattcaacactccagagcagcttgacctaccacctcagggttacaacccactgttgttgcaggagcttttcatggcccctcgacgcggtggtaaactggatcctcactggctgggaaccctgcacgagtcgccggccaatgtatacagtttcgtgtctaacgcattaatagccgtctgccgagagacggacaacgagcggctgaacgatgtggccctcgcatgtgccgaactgaccgccagctgcaacgtcttgtctgaggagtggatatacgcactgcagagtctgtgcagcggcagtaagagtccgcgttatccgcacctgggcggacaggtcgacattggacaacttaagactcacaacgccctggccgtgttcgtatgcattctggtggccagacattgcttctcactagccgactttgtaagtaagttcgccctgcctacattggcccgatcggtaagcgctggtggagccgaactgagtgtagatgcagaggcaggtgctcgtcttacatgtcacttggtgctgaagctgtttaagaccttggagattcctcaacctggcatgtactcggtaagcacttccccgaatccactgcacgctgtgggaaacgactttagcattcggctgagctgcgatcgtcatcttctggtgggtgcccataagaccattcccattgccgcagtgcttgccgtgctcaaggccattctcattgttgtggacaatgcggcgcttaaaacaccattggcttccggcagcggcacctcctctggcggattgggcggagcttttggaagcggcaagcgtagtggcttcaatacaccggtccatccgggaagcacacccaagagcaacgaacaacgaccggccgatctcagccagatcctgggcaccagcgatttacaattgggcagcagtttgacaagcgaacccgaagccctgcaacagccatcggtcggaggaatggagcagatctcgctgttggagttcgcccaggcggtgctcaagcagatctgcgcccaggaacacgttctggaaagatgcctaaagaacgcagagcaactctgcgacatgataatcgacgaaatgctgaccgcgaaacaggcacagcgggttctgcacatgatctgctatccggagcctgagtttaacatcatctccgaactggatcagcgctcaatgatcgtacgcatactagagaatctcggacagtggacactgcgtatctcgtggctggatcttcagcttatgtaccgccaatcgctgagcaacaacgcggagcttaatgtttggctcgacacagtggcacgcgcggcaatcgacgtcttccacatggaggaagttgtcctgccgggtgccgtgaaggcgacccacaaacccaaaccgtccacctggctagtggctccactcatcgctaaactaacaccagcggtgcagggcaggatacttcgagtggctggtcaggttcttgagagcatgaactatttctccaaggtgtccaagtccgattgcaatagctcgggcagtggtgacgagcgcgagaagagcaacagttgtcacagtagcaatagctatggactgggcggcgtgcccgcacgcaacaagaagatgccgcttgattatcagcctttcctgggtctcatcctaacttgcctgaaaggccaggacgagtacaaggaaaacttactggtttcgctctatgcccagttatcacaatgtctgcaatcctttgctgagctggacacaatcggtggcattgatgagccgcaggcgcgcgaggagatcctcgatgcgctgcagttgcgcttttcgctggtgggcggcatgttcgaggctatccaaaagaacagtacccccaccacagactgggctattcttctggcccaattggtttgccagggcgtggtagatctcagctgcaatcgtgagctgttcaccaccgttgtggacatgttggccacattggtgcactcaacgctggtctctgatgacgagaggcactacatgaacctgatgaagaagctaaagaaggaaatcggagagaagaacaacgcctccattcgggttattcggcagcttcttccactttacaagcagcctactgaggtgattgcgtgcgaacactctggaatggacaccaagggcaacaagatctgcgatatagacaaaaaacaactacgcatttcggacaaacagcgtatcagcgtgtgggacatccttgagggtcacaagaacccggctcctttgtcctgggtgtggtttggtgcagtcaagctggagcgcaagccccttacttacgaggaggctcaccgcaacctgaagtatcacacgcacagtctggtcaagcccagtagttattactatgaaccgttgccactgccacctgaagacattgagcctgttcccgagaagatttgcataaaggatgaaatgaaggcggacacgccctcgtcggtggatcagtcgccaagcgctgtggttggcggcacgggaagaggtcgcggcaagggaacgaccacgcggaaacgcaagccgaagaacccgaaaacgccaccggtggtcaatactcagcaacagcagcctcagctggcacagcagcctcaacagccgcagaatgtgcagcaacagcagttgcaacagcagcagcaacaacagcagcacatgcagcagcagcacatgcaacagcagcagatgcagcccaaccaaatgggccagatgccaatgaacatgccgatgaacatgcagcagtttgcacccaatccgaacaacatgatgcagcagaatgccatgttacaacagcagcagcagcagcagatgcagcaaatgggcaacaacccgatgcagcagcagctgaatgtgggcggtgggaacgggcagccaaatccccagatgaacttcatgcagcagggaccagggggcggtggagccggaccgcagggtatgcctggccagcagcaacagtggcacaatgcgccgcagcagcagcagccgccacaaccgtaccacaaccaatacgctccgcatcagcagaacatgcagtcaaatcgcatcgagcgcccgccgttgaatgccaactccaagcaggcgctatcacagatgctacgacaacgacaaccattccagcagcaagcgcaacagggtccggggggtggtttcaatccgatgcagcaacaaccacaggcttcgcaacaacagcccggtcctcagcagcagatgaaccccaaccaaatgcgccagcagcaaatgaatccccagcaaaatcctcagtctgtcgctgcattcaacgccatgcagcagcagccgcagcagaacgcccagcagcaacagatgaatcccaaccagcagcaacagcagcagttcatgcgcggcggcaacatgcgacccggcatggcgcccaaccagatgaatcagatgaacatgggaggtcaaggcatgtcgcagaatccgatgatgcagcaacaaatcccacagaatatggtgggcatggtcaacccgaatgccaaccaaatgatgcagagcggtggagctcagggaggcaacggtgtgggcgttggtgttggcgtcggcgttggcggtgccggcaacaatcccaacatgggcatgggaggcatgcctcagcaaggcatgatacaacagcagccgcagcaacagccgcagcagcagagggcggtggagcaggcgttggagtgggcgtcggcatggcgcccaatcagcagcaacagcagcaggccaacatgatgggcaacttcaatccgcagatgcagcaggggaatcgcaacaatcccgactttatggccgccgcagcggttgcccagcagcagcaacaacaacaacagcaacagcgcgttgttcccggaggaatgatggccggcaaccggaaccagtacatgaaccaggcgcccaacgtaaccatgtccaccatgatgggtccggggccgggtggcgtcgtcggccaggtgcctccgtacgcccgtcagcagtcggcgggaggaggcaaacccggcgtcctcaacacccagcagcagttccagcagcagcaacagcaacaacagcagctgaggcaccaaatgatgcagttgcagggtatgggtggtggggcaggcggcggcatgggagccgggcctcagcaggggggtggcgccgttggcggtggcgccggaggcggaatggtgccgcagcagcagagcatgaaccagcaacaaacgccgaatctggtggctcagctccagcggcagaacatgatgggccagcagcagtatcaaccaccaccgtactag

SEQ ID NO: 41763 - protein, 2328 aa, DROSOPHILA
MLQEKRPLKRTRLGPPDIYPQDAKQREDELTPTNVKHGFTTTPPLSDEFGTAHNSNVNASKVSAFFSGVLAKKEELMTLPDTGRKKQQINCKDNFWPVSPRRKCTVDAWFKDLAGNKPLLSLAKRAPSFNKKEEIFITLCENQVNMQRATWFIKLSAAYTLSFTESKNKKRSIYDPAAEWTGNMIKFMKELLPKLQEYYQQNHDKSSSNGTTSGSLTAAGNGPASNGSTGTSSINSVTGSSASTNVIPVPSMASPLPPIHSPANGQQAAPGGGVNAGSVMPTTGSLGGVVGGPGSSVVGGAAGAGAAVPPGSTISGIGSQFEDSRNALKYWKYCHQLSKYMYEESLLDRQEFLNWILDLLDKMRTQASFDEPLKKLVLSFALQYMHDFVQSERLCRKMAYIVSKKLAQLLNTVVEQQTIKELDEPKLQQDPYELALQEQMSCPHHRDIVLYLSTILQIITIECPTALVWSGIAAHRAPSSLLGSPLDHLPLAPSVLPMPTRCPRTNHEIRRQLRAAESDIVLRTQHAEQRWFAAKWLSAGKNQYTSVLATLDHLDTHCFDRMEHNNSIDTLYAQIFPSPTVSRRREEDQVEPRPPYEPKQDKDTVRILCEWAVSGQRWGEHRAMVVAILLDKRQIDVTSTPADQQSSDKDDKDSLASGAGLIDGLPVFQHVLMHFLDHDAPVLDEHVSSPQQRTEFTNLVQLFSALIRHDVFSHNAYMHTLISRGDLLLESVLVIKSGTTATKTSPPPPAPPPTTTHGFDDDGFGGGLDFKHNEFDDSNVDDDLDKLVQNIKEKGQQHEAPDSPKIGPPGDGETNPGGSISRHYVYTKHFPIPQDDPSMSSYSSESNQRYILLFGVGKERDEKKHAVKKMSKEIGKLFTKKFSIDVAAAGHVKKHSRNEFNFEATTSKCQQMAYFDQHVVTAQCAANVLEQLNGFALGNNNYLPVQEHVAFLFDLMELALNIYSLLELCDSLLKELPEVEHQLQLKKSNLVRSYTTSLALYIVSILRRYHSCLLLSPEQTLSVFEGVCRTIRHVSNPSECTSAERCIIAYLSDLHESCVLLQGKEQSTEYYQQLQCIKRFKDIFNTPEQLDLPPQGYNPLLLQELFMAPRRGGKLDPHWLGTLHESPANVYSFVSNALIAVCRETDNERLNDVALACAELTASCNVLSEEWIYALQSLCSGSKSPRYPHLGGQVDIGQLKTHNALAVFVCILVARHCFSLADFVSKFALPTLARSVSAGGAELSVDAEAGARLTCHLVLKLFKTLEIPQPGMYSVSTSPNPLHAVGNDFSIRLSCDRHLLVGAHKTIPIAAVLAVLKAILIVVDNAALKTPLASGSGTSSGGLGGAFGSGKRSGFNTPVHPGSTPKSNEQRPADLSQILGTSDLQLGSSLTSEPEALQQPSVGGMEQISLLEFAQAVLKQICAQEHVLERCLKNAEQLCDMIIDEMLTAKQAQRVLHMICYPEPEFNIISELDQRSMIVRILENLGQWTLRISWLDLQLMYRQSLSNNAELNVWLDTVARAAIDVFHMEEVVLPGAVKATHKPKPSTWLVAPLIAKLTPAVQGRILRVAGQVLESMNYFSKVSKSDCNSSGSGDEREKSNSCHSSNSYGLGGVPARNKKMPLDYQPFLGLILTCLKGQDEYKENLLVSLYAQLSQCLQSFAELDTIGGIDEPQAREEILDALQLRFSLVGGMFEAIQKNSTPTTDWAILLAQLVCQGVVDLSCNRELFTTVVDMLATLVHSTLVSDDERHYMNLMKKLKKEIGEKNNASIRVIRQLLPLYKQPTEVIACEHSGMDTKGNKICDIDKKQLRISDKQRISVWDILEGHKNPAPLSWVWFGAVKLERKPLTYEEAHRNLKYHTHSLVKPSSYYYEPLPLPPEDIEPVPEKICIKDEMKADTPSSVDQSPSAVVGGTGRGRGKGTTTRKRKPKNPKTPPVVNTQQQQPQLAQQPQQPQNVQQQQLQQQQQQQQHMQQQHMQQQQMQPNQMGQMPMNMPMNMQQFAPNPNNMMQQNAMLQQQQQQQMQQMGNNPMQQQLNVGGGNGQPNPQMNFMQQGPGGGGAGPQGMPGQQQQWHNAPQQQQPPQPYHNQYAPHQQNMQSNRIERPPLNANSKQALSQMLRQRQPFQQQAQQGPGGGFNPMQQQPQASQQQPGPQQQMNPNQMRQQQMNPQQNPQSVAAFNAMQQQPQQNAQQQQMNPNQQQQQQFMRGGNMRPGMAPNQMNQMNMGGQGMSQNPMMQQQIPQNMVGMVNPNANQMMQSGGAQGGNGVGVGVGVGVGGAGNNPNMGMGGMPQQGMIQQQPQQQPQQQRAVEQALEWASAWRPISSNSSRPT

SEQ ID NO: 41764 - DNA, 2832 bp, DROSOPHILA
attcgaagggaagctgccactgtcaataaggaaacttcattataaattacccaactgacagttgcaggcagacgccggagaataataataatggcagtcccggcgaaagttaaaagccaaagaaaaccctcctcccccctttgtccatgagggctataagctcttacccagcccggagattgtttcaatctgcttaagcgaccaagtcgatgtcggaatcgaaggacctagctttttggcccccaggcaatcaggcatgcaaccagatctccgccagatcccagctcgaccccttctgccgtccgattgttgtgcttaaaattgctgaataattgtgcggaagttggtagttgttgcattctgcgatgaaaatggaaaaaaatgaacataaagtgagggtggtccatgaatcacataaaaaacaaatgtcgcgtcgttaggctaaaagctttatgcaaattttccattgcttcttatcatattctctttgccgtgctgcaagctgaatggaaattgtattgaacaggggatgagattgcattgcgggctggtcgatatgtatatatatatatataagtccgatatcggggggttaattgggtggacggtcattgttatgcagcttaggtcaagtgtctgcaattaggtgcaattgtttgagaggaagtgccatttagttaagcatttgaacatgtaggctacttaccaaccccttttaagagcattattattactgcaacagcaattcgaacgcttattgaatcggttagattgggtctactaaattaaatcacattacttacgtttaggaaatgggaatgcttacacgaaaaaaagttgtaaatactgtagcattattttagcttgtacataatttcataaaatatttataatttaagacaaagatttagttaacgagaggcacctaacttggaaagctagttacaaattttgttgttctaaatgatttccttgatggcgttaaaaagcaagatgatctttatacctctaaatcctctaggacgtcctgaagctcggtagctacccccagatcgtcgtcgtgatctgattttcccgagtcctcagccgatttatccacattgccacccaccaatcgatcagtatcaataccaaacttgagttcaaagggaaaactcagcttgggcacctcgaaagtgtgcatgtggtagtcgtagttggtctgctcttctggcggagccgggcaagcgtgtttagcttgaggatttctatctaaaccagtctgatgcccctcttgttcgggatgcatatagatggtgtgtcccgctcccgtcgcattgtaggcgtcattttcggtgatacgctttgtggaagtatcaggagttatttcggtatcgtcaatgagtatgtttatatcaatgggcacgagcatgtaggtttctccagtactttcatcggtttgaatttggcttaactgctcgtagtcctcgtctgaaatgcaatccaaatttattacatggtcagatttccagcgagcaatttccttggcgtctgcgcgttgaaacttatccgattccgaagatccagtagctactccatttgaggtaatcttaaatttgtataatagcggttctttgagctggacaaaagcctctggcttaccagcctccacataaacttgcactttatccagtgcattggctatgaaatcatcgtttgatagctcattccgctcctgctggctttcgtcctctatttcctgtgccagcaactgctgaagcttgatcatttgctccttggtcagattgagatcctttagactcatcgttgccctgtacggatttagggataatatatattagtaatgtacacaaaaaaaatatgatgatattcggagtgataataataagattgcgataatgactagaaaataaagatcactagatatggaagctgtgtataaaagtttagttatcataatttccttttgattttataaagatactgtatgtcttggttgcccaaaattaccaaaaaccctattgtatctcattaagtatataatatttaagaatttttggcgaacatacatgtcaaactagtttgccagtgcactggtttcaagatatgaattgctcttctgggcttctattctattgtttggagaacgtacttaaattcaattattgtttaaacacatcgagagacttaccatcgtaatctgagacaaacagttgctgattgccctgagggcaggggtacaattaaacagccttgtccgcacattaccgctcacgttttatggctgccgtttaaaaatattgaaaaaagcagggcaggcacgaaattgaaatgcctgccagcgggcgcagctttattggcacccgtcgaccaggagccggggcattatcctgcagatggctgcggtcactggacattaggcgctggaggacaaccggtgtccgtcgacaaggccaggatcatggcagaacggatacgggcattgtacatgagatggcgtcattaaatacacattaccctgccggcgcaggacgaactcaggagcaggagcaggagtaggcgacggtggagtggaggcagtccggcgataaaggcacaacaaccgccgagcaacagtcggccagcaggagaatggctattaaaaagcagcccgggccgaagatagacatggtcggctacagtggcagacataacaaattacaccatttcgacaggcggttcacaacaggaaggcagtgctgttgaaatagactttccttagctattagctaagaatatcaaggatattatgtatagagattagaagccaaatatatttgtaagacatttacc

SEQ ID NO: 41765 - DNA, 832 bp, DROSOPHILA
attatccctaaatccgtacagggcaacgatgagtctaaaggatctcaatctgaccaaggagcaaatgatcaagcttcagcagttgctggcacaggaaatagaggacgaaagccagcaggagcggaatgagctatcaaacgatgatttcatagccaatgcactggataaagtgcaagtttatgtggaggctggtaagccagaggcttttgtccagctcaaagaaccgctattatacaaatttaagattacctcaaatggagtagctactggatcttcggaatcggataagtttcaacgcgcagacgccaaggaaattgctcgctggaaatctgaccatgtaataaatttggattgcatttcagacgaggactacgagcagttaagccaaattcaaaccgatgaaagtactggagaaacctacatgctcgtgcccattgatataaacatactcattgacgataccgaaataactcctgatacttccacaaagcgtatcaccgaaaatgacgcctacaatgcgacgggagcgggacacaccatctatatgcatcccgaacaagaggggcatcagactggtttagatagaaatcctcaagctaaacacgcttgcccggctccgccagaagagcagaccaactacgactaccacatgcacactttcgaggtgcccaagctgagttttccctttgaactcaagtttggtattgatactgatcgattggtgggtggcaatgtggataaatcggctgaggactcgggaaaatcagatcacgacgacgatctgggggtagctaccgagcttcaggacgtcctagaggatttagaggtataa

SEQ ID NO: 41766 - protein, 267 aa, DROSOPHILA
MSLKDLNLTKEQMIKLQQLLAQEIEDESQQERNELSNDDFIANALDKVQVYVEAGKPEAFVQLKEPLLYKFKITSNGVATGSSESDKFQRADAKEIARWKSDHVINLDCISDEDYEQLSQIQTDESTGETYMLVPIDINILIDDTEITPDTSTKRITENDAYNATGAGHTIYMHPEQEGHQTGLDRNPQAKHACPAPPEEQTNYDYHMHTFEVPKLSFPFELKFGIDTDRLVGGNVDKSAEDSGKSDHDDDLGVATELQDVLEDLEV

SEQ ID NO: 41767 - DNA, 7043 bp, DROSOPHILA
tacaaaattgctataacctaaatcatctgagattgggaaaacattggaagatgcctatcgaggatgtaaatcaatttttggacaatgtggctgatgcaggagcggatcggaaagaccggcttttgctaacgctcgatttcattaagacaccggatactcggaaaaaggtataatttaatggatacacaattatttggaacaaccaaaatttaccaaaaacccttcagttcacagataagttcaggaatgataaacacttgcaagtgagttttgatggagccacatgtcatcactgtcagcgggatacctactctaagtgtgatactatctttgactagttttactttagcaaaagactcacctcacagtgcgacctttcgatggcaacagtcagtctaagagtccaatcgttgtaggggattcccttcccctcgaactcatcctcctttattttgtaatcataaacatcttgatcggaacgattggcccatctgtgccagtccatgattattaatggcattggatgaaccgtttccagacgaaaatcaaacgccgggtgccaaaaaatacaagtggcatgcgagtccgcgaagaactgctgagctaactatattttttaaaaggttgtccatgctgaacaaaaggacaacataccaaaaaaactaagcacagtgctaaagtaatatgactctaccagcaagttttccatttcacagattttttcccttgaagtgtgcctgaggaatttatattattttctgtgtgtattattattatacatatacattctgtttttgtatatatatatatagtgcttggtagctcaccctgtgatgcacccgactaacaaaactccgccgacgcaaaatgaccgacgcgaatggaagaatatttcattttatataaggaaaaagattgcatacgctactaatacgttttccatgaattatgtacatatttaacaaattaggagcatgcaccggtaaccaataaaaggccttgtaaatctgttaaaatatttattgttataaatacgtttaacaagtacggtaaataataaacaaataaaatgtccatattaaataattttaaaattacaatctaagcataaccgggcgtggaaaacagaggaatagcgtaattataaagacctaggcatttgtaattcttttgaatagcaaacgggtattcatttgctgaaaatccacaccacgttcgtgccacttattatgtacttcactactatcctaagccttcacgctgccaatgccgttgcccagcgacttcatcagctggtagcactccttgagctttcgcttgtcgcccaccttctccagggtcttggccgcctcggctaacatgccagcacgttcacccggggagctgagcagcgcaggcgggagatacttgcaggccacgtacatggccgaagcccgttcccgctctccgcccacgaagttctgctgccgccgatccttgctgccgcagaagatggacgagtgggcgttgcgtgatcgcagactcctgtccaagagctgttgcgttggacacggtgaggctccagccatcaggcgacaaactgcctcgtacaaatatatgcgcgattgggcgttctgtaatggcaaaagtttacacaagctcaggttacggaacagacatattggaagggtaaggatttgcatataccggtatattctccacaatgttgcgcaacgagttcaaatcggtctggaacttctcgagcacttcacctggcacttggtagaagccatcgtcctccatattcatgtgttccagttcccacagagcagtcctagtttcgagcagccaatcgcaggtaagcaactggaaaagctgcatagaagaaataatgattagtgcgctcttaaaacttggcgacttttgccagagacattcggcgttgtatgtgaaatgcacagagcttgcactgaagttgtattgcctgaagcaattgggacagacaatgcgactacaatgcaccttcgtgtcatctccagaggaagagtctggtggcactcagtcgccaaaaactgattgttcggggtgcacacattcttaccagctttatacccttggcgtcggtgatccggttgacagtcaagcactcttggagctccacactcgactcatcgcagaggatgtttaccaattgcttgagacttttgtccagtgcgttgccattgtttctgcaaaggtgtgcgatgattagttttgttcttttcattagttgttctagttttactcactttagtaagatcatcttagctcgcagcacagcatgcagcgccttgggcagatgatcgttttcgccgcactgttgcagctgcgtgggcatttgcttgatcctgccgtacaattgctcggccagcgtgtcttcaccaaggagccagtgcactgcggtctccaaaacatcggcccaccacaccacgtttgtatcccgctcatcctcatcagcccagagagtgtccttaaggagggacgtgtacttaagaacattgctgacaatggtgccgctgtgctgctgttgctgcaactgttccgcctctccgctgacagaagatgtgggcaggcctcccgatttgtggcccgctcctaccagacactgaatggctttaaacagcaaatgctctcgatattgctgattattggaaaagaaacaattagttttgaattgtgtgcgatacactagaaattcagtccaacttaccttaatgacgtgggcagcgggatcacatggattcctaagacgtgtgaagaatccatcctgctcgccggagtcgctcagatcgtacgtgaagacgtgcgtggcgcagtagcgatatccataggctgtgaatgcccaacgtagctcctgcgtttgctcggtggccctagtgagaccgcactcttgacgagcccggctcatgtagtatcgggcgaagagctgttgcaaccattttggggcactgcgcttcattcgcaacgctgtcattacgtggatgcagatggtctcgcgcggtgtcagtagattgtgcgccacttcagccatgttgcttgcgaatagtgccatcataatgccgttcatgtcaccgcggcttccatttccagtcagttgcaattgattcagtcggttgaagagcagggccagttcgcgtgcagatgccagcgcctgtttcctgctggcggcgttgctaaacagcccaccggaccgccgtgacagcacccgacccagccagaggcgatggaaaagaaaacgaaggaactgccacgtggtctgcaagtaacactccaagcgcgacgccggtagacttaatccaaacatatgcagacagttgaggtaaccggcgtaggcctgagacgactgtccttggctaaaatagaagtcagcccgctgcctgtgctggcagtaggcgtccgtttgcgcgtccagctgcggatcaccgtaaaccagcaatttcaccaagcatccaagcatcagtgtgaagttcaatagccatatccaggaactctgctgccagacagcaaaaccttcacctaaatcaaggagaaacccattagcaatatttaacaacatctggatgctaggctagctaccttccacgtcgtaagagagaatgcgtctttgaccgctcatgtcgccaagatcgtcattactgtcatagtggccgcgctggagaaaggtcttgaagggattgacggccaggatggcgaacataaacatgcagagtccgaggcgagagtgggtggccatgccgcgcatagagctgggcaccaccagtggttcttcattgctgctgctgctgccactgctacagctggcggtggatccaccatagggtgatggcggcaacgagatgtccgagtgcatgggcgagagcgaaggatccgattcatcgctgcgtggcggcgtcagtccggcatccgtggtaaaggtctgcgagctctcgcggcgcttcttggatgctctaccaggccgagtgcccagctgaagtaaatccttcaccttggagccgtcgcgtgccattagctccctctgcaggcgctgcaactctgccttcagatcgtgattctggcgttgcagatcccgaatcttgtctatggatttccgcaacactgcggacttgttcagcttggcctgctctcccactaccaagttcttcaactcgttaatcttgtcgttgattgaggtgcgatagcgccgctcgatggcgttgtgggccgagcgctttacttccttcaccttgggttgaacccggttgataggtaccttgccctggacttccatagcggcaggtgacggagccagtggtgccactcgcaccttgctggcccgactacctgtgcttgtcggtggtggagccacaggtggagatggggttggactggctaccgtgggctgcaagaggaagtacatggcttcatcggaagtcattccggccttagagttgtacgtaatgaagggttgcggatacgactgctggggcaaaggagcagaagcgggagcaggagttgcagcaacgggctgcatgacattgacattctggttcgcagactccaccggcgacgtgggcggggacatggactggtagacaaagctactgcccagagatgggggatacaccgccgtgttcggcggcatccgctgggcgtccatgtgatgtatggtggctgttggttgggcggccttcaaaaggcccgtcggctgttgctggggacaattgtagcttgtggctatgaggggatctggtttgtagacgagaagcggcgactgttgttgctgctgatgcagttcctccttgatgtgcactggcgaagagtgctcgcttttcacgtgcggctgttgctcgacggattgcggctgctgatccacggactgcgtctgctgggtatgcgttcgaggctcgtccagcagcatgttgtacatctgcgtcggcgccaggtccatgtcgttgaggatgatgtccagcatgtccgagtgcaggtcggcgtcgaacggttcgaagacatcctccgctttgaacaaatccatggactcgtccagcggagcgtctattaagttcatcagtgtcgtgtccattgcgaatgctgctgatgaaagggacaaaaacggttcgtaattaaatactggcgggcccacgtatgtgcatatttatgtatgtatgtttgtacatttgaggattgtttattaaagttctatgcggcgcaataacaacagtgggacaagtatgttggtgccggaaaaaacaaatattaatatgtttataatcacattaattcatttaattaccctttttccacagtggccacttgcagctttaataacagattaaaaggggtttttataattaaatttgtaatatacgtaacaaagttaaaataaatcttttaattgtactcaaacctaaagtgaatcacagtcggacctgaaaatggcatatgtgttaacttgtttttgtttgtttgttgtttgctcgtagttaaaataggaacaaaatataatatcttgagatcattttggctatatcaagttttgctagactaatgcaaattgcaatagaggcgaatatttttaaacggtctaagcttttacttcgcttttggcccactgtgcactgcacacacacatacgcgaccgggaaagcatgcgtaagcgctttcaaccaatcagagggctcgaccggatcatacgatgtttttagtgacgccacttggcctttgggagctccaacagggcattttcccaggctccactggtttcccgatctgatttccgcgaaaattaatctattagacactatctacattattagcagaaaaagaaacgcacctttaccaccttctatctgttttcttagttcacgtgtgcttttgtttttccataactggttaatgtcaacgcactttgctttaaactagcgactagttagtaatagttgcaacacttgttgttcatggttgttttgatttttttcacgagtatatttgcagcttaataaacaattgctttcgattgcagtaaactttgttcttcagggatgacgagcagtagttcgggcctaaggaactggttcaggtcttgactccctggcatcaagaaacagctgtattacttacaatgcctgtatagaaatatatatatttaatagtttatgatgtattttataaaactgccataaaatatcaacgctgattctgacacgcagagtaaggaaataaattcaacatgtataagtgtaatttaaaatatgcggttgtcctcgctgagcgtggtggatgtcaccgctacctacattcaagagaataattaagagagcgccagagccgtgtgaccgcgctagaattacttaaaaataccaaggaatgttgaagacaaaaagttccggtaaattggcacaacgcactggccacactgctacatcacatattcaaaatcgggtaggtagtcgcgacggaaaacgggaaacgcggacgaatcgcggagccagagaagcggtaaattcgaaataaccgtttggaaagagcaacatgatgaggttctttattcgtttttagtaaaatggtacaaagtgaatatgtgatttaattgataaccagcatgggcgccgtcagtgttaattgcgttctgaattgctctttcgaaaacgcagacacaaatgcacacacacaaagtagcggcacccacacgatcgcaatggcaaaagtgctgcagtgataaaacaaatgcacagccataaaggcaaagtcggaaaagtttcacaatgcactggcggcccatgcataaaaatgtacaatttggcgctctttgcacttgtcacgtcgttggaaaagcaaaaaaacctaccaaccaacaacaataggaacataaactgaaacaaaaagaaaaccatttttgcttcgcgcttttgtttttgtttggaccgccgctcacgcactttcgcgctcacacgcagaaactttttgcatttgttttcttcacccgttgcattatcacaacaactgatctcctctgccctctctctgatgctcttgctcacacttgttcg

SEQ ID NO: 41768 - DNA, 3831 bp, DROSOPHILA
ctcgtcatccctgaagaacaaagtttactgcaatcgaaagcaattgtttattaagctgcaaatatactcgtgaaaaaaatcaaaacaaccatgaacaacaagtgttgcaactattactaactagtcgctagtttaaagcaaagtgcgttgacattaaccagttatggaaaaacaaaagcacacgtgaactaagaaaacagatagaaggtggtaaagctgcaagtggccactgtggaaaaaggatggacacgacactgatgaacttaatagacgctccgctggacgagtccatggatttgttcaaagcggaggatgtcttcgaaccgttcgacgccgacctgcactcggacatgctggacatcatcctcaacgacatggacctggcgccgacgcagatgtacaacatgctgctggacgagcctcgaacgcatacccagcagacgcagtccgtggatcagcagccgcaatccgtcgagcaacagccgcacgtgaaaagcgagcactcttcgccagtgcacatcaaggaggaactgcatcagcagcaacaacagtcgccgcttctcgtctacaaaccagatcccctcatagccacaagctacaattgtccccagcaacagccgacgggccttttgaaggccgcccaaccaacagccaccatacatcacatggacgcccagcggatgccgccgaacacggcggtgtatcccccatctctgggcagtagctttgtctaccagtccatgtccccgcccacgtcgccggtggagtctgcgaaccagaatgtcaatgtcatgcagcccgttgctgcaactcctgctcccgcttctgctcctttgccccagcagtcgtatccgcaacccttcattacgtacaactctaaggccggaatgacttccgatgaagccatgtacttcctcttgcagcccacggtagccagtccaaccccatctccacctgtggctccaccaccgacaagcacaggtagtcgggccagcaaggtgcgagtggcaccactggctccgtcacctgccgctatggaagtccagggcaaggtacctatcaaccgggttcaacccaaggtgaaggaagtaaagcgctcggcccacaacgccatcgagcggcgctatcgcacctcaatcaacgacaagattaacgagttgaagaacttggtagtgggagagcaggccaagctgaacaagtccgcagtgttgcggaaatccatagacaagattcgggatctgcaacgccagaatcacgatctgaaggcagagttgcagcgcctgcagagggagctaatggcacgcgacggctccaaggtgaaggatttacttcagctgggcactcggcctggtagagcatccaagaagcgccgcgagagctcgcagacctttaccacggatgccggactgacgccgccacgcagcgatgaatcggatccttcgctctcgcccatgcactcggacatctcgttgccgccatcaccctatggtggatccaccgccagctgtagcagtggcagcagcagcagcaatgaagaaccactggtggtgcccagctctatgcgcggcatggccacccactctcgcctcggactctgcatgtttatgttcgccatcctggccgtcaatcccttcaagacctttctccagcgcggccactatgacagtaatgacgatcttggcgacatgagcggtcaaagacgcattctctcttacgacgtggaaggtgaaggttttgctgtctggcagcagagttcctggatatggctattgaacttcacactgatgcttggatgcttggtgaaattgctggtttacggtgatccgcagctggacgcgcaaacggacgcctactgccagcacaggcagcgggctgacttctattttagccaaggacagtcgtctcaggcctacgccggttacctcaactgtctgcatatgtttggattaagtctaccggcgtcgcgcttggagtgttacttgcagaccacgtggcagttccttcgttttcttttccatcgcctctggctgggtcgggtgctgtcacggcggtccggtgggctgtttagcaacgccgccagcaggaaacaggcgctggcatctgcacgcgaactggccctgctcttcaaccgactgaatcaattgcaactgactggaaatggaagccgcggtgacatgaacggcattatgatggcactattcgcaagcaacatggctgaagtggcgcacaatctactgacaccgcgcgagaccatctgcatccacgtaatgacagcgttgcgaatgaagcgcagtgccccaaaatggttgcaacagctcttcgcccgatactacatgagccgggctcgtcaagagtgcggtctcactagggccaccgagcaaacgcaggagctacgttgggcattcacagcctatggatatcgctactgcgccacgcacgtcttcacgtacgatctgagcgactccggcgagcaggatggattcttcacacgtcttaggaatccatgtgatcccgctgcccacgtcattaagcaatatcgagagcatttgctgtttaaagccattcagtgtctggtaggagcgggccacaaatcgggaggcctgcccacatcttctgtcagcggagaggcggaacagttgcagcaacagcagcacagcggcaccattgtcagcaatgttcttaagtacacgtccctccttaaggacactctctgggctgatgaggatgagcgggatacaaacgtggtgtggtgggccgatgttttggagaccgcagtgcactggctccttggtgaagacacgctggccgagcaattgtacggcaggatcaagcaaatgcccacgcagctgcaacagtgcggcgaaaacgatcatctgcccaaggcgctgcatgctgtgctgcgagctaagatgatcttactaaaaaacaatggcaacgcactggacaaaagtctcaagcaattggtaaacatcctctgcgatgagtcgagtgtggagctccaagagtgcttgactgtcaaccggatcaccgacgccaagggtataaagctgcttttccagttgcttacctgcgattggctgctcgaaactaggactgctctgtgggaactggaacacatgaatatggaggacgatggcttctaccaagtgccaggtgaagtgctcgagaagttccagaccgatttgaactcgttgcgcaacattgtggagaatataccgaacgcccaatcgcgcatatatttgtacgaggcagtttgtcgcctgatggctggagcctcaccgtgtccaacgcaacagctcttggacaggagtctgcgatcacgcaacgcccactcgtccatcttctgcggcagcaaggatcggcggcagcagaacttcgtgggcggagagcgggaacgggcttcggccatgtacgtggcctgcaagtatctcccgcctgcgctgctcagctccccgggtgaacgtgctggcatgttagccgaggcggccaagaccctggagaaggtgggcgacaagcgaaagctcaaggagtgctaccagctgatgaagtcgctgggcaacggcattggcagcgtgaaggcttaggatagtagtgaagtacataataagtggcacgaacgtggtgtggattttcagcaaatgaatacccgtttgctattcaaaagaattacaaatgcctaggtctttataattacgctattcctctgttttccacgcccggttatgcttagattgtaattttaaaattatttaatatggacattttatttgtttattatttaccgtacttgttaaacgtatttataacaataaatattttaacagatttaca

SEQ ID NO: 41769 - protein, 1113 aa, DROSOPHILA
MDTTLMNLIDAPLDESMDLFKAEDVFEPFDADLHSDMLDIILNDMDLAPTQMYNMLLDEPRTHTQQTQSVDQQPQSVEQQPHVKSEHSSPVHIKEELHQQQQQSPLLVYKPDPLIATSYNCPQQQPTGLLKAAQPTATIHHMDAQRMPPNTAVYPPSLGSSFVYQSMSPPTSPVESANQNVNVMQPVAATPAPASAPLPQQSYPQPFITYNSKAGMTSDEAMYFLLQPTVASPTPSPPVAPPPTSTGSRASKVRVAPLAPSPAAMEVQGKVPINRVQPKVKEVKRSAHNAIERRYRTSINDKINELKNLVVGEQAKLNKSAVLRKSIDKIRDLQRQNHDLKAELQRLQRELMARDGSKVKDLLQLGTRPGRASKKRRESSQTFTTDAGLTPPRSDESDPSLSPMHSDISLPPSPYGGSTASCSSGSSSSNEEPLVVPSSMRGMATHSRLGLCMFMFAILAVNPFKTFLQRGHYDSNDDLGDMSGQRRILSYDVEGEGFAVWQQSSWIWLLNFTLMLGCLVKLLVYGDPQLDAQTDAYCQHRQRADFYFSQGQSSQAYAGYLNCLHMFGLSLPASRLECYLQTTWQFLRFLFHRLWLGRVLSRRSGGLFSNAASRKQALASARELALLFNRLNQLQLTGNGSRGDMNGIMMALFASNMAEVAHNLLTPRETICIHVMTALRMKRSAPKWLQQLFARYYMSRARQECGLTRATEQTQELRWAFTAYGYRYCATHVFTYDLSDSGEQDGFFTRLRNPCDPAAHVIKQYREHLLFKAIQCLVGAGHKSGGLPTSSVSGEAEQLQQQQHSGTIVSNVLKYTSLLKDTLWADEDERDTNVVWWADVLETAVHWLLGEDTLAEQLYGRIKQMPTQLQQCGENDHLPKALHAVLRAKMILLKNNGNALDKSLKQLVNILCDESSVELQECLTVNRITDAKGIKLLFQLLTCDWLLETRTALWELEHMNMEDDGFYQVPGEVLEKFQTDLNSLRNIVENIPNAQSRIYLYEAVCRLMAGASPCPTQQLLDRSLRSRNAHSSIFCGSKDRRQQNFVGGERERASAMYVACKYLPPALLSSPGERAGMLAEAAKTLEKVGDKRKLKECYQLMKSLGNGIGSVKA

SEQ ID NO: 41770 - DNA, 4010 bp, DROSOPHILA
cgctcgccatttgaacaggtggtccccgaaagctgattcacatgaagaaggagcacatgaaggaatacggtttggcgattgaacaattcaaatcaaaaatcaacgatggaaaggtttttttaatagtgaacctaaatgaagtgattaccctgaattctttcgttctgcaatattctgaaagctttcttattacagattgcgccgaatggagctcgagccctgcacacaatctgcgatacctacagccctctggtggaggatgcagtcatcttcctctcccttcgaacattcaacacaaccgccgtgaacaactccgtcaatctagccacggatactctgtacgatctgtgggaccaggagttgggggaccacgagctggatcctttaattactcgagttactgatcaggtgctccatttgagttaaactgaaagacactattcaaaatctttttacaaagcttataaagcaataaataaagagaattttgttggctctcgatgataaatatataagttaacaagtaacatcaggaaaagctgcgtgtgacgacgaacgacacacgaagctatacttcggatgctggtcggcggccgtgatttgtgcgagatagggtaatctttctttgtattacttagttctgaactgacagccgaaataaagtgatgttatcgtaagatacctgccgtgaatatcaagtcggagctacgaccctgctaccggcttattccagttggtcacttcagctatagtcaccgatcgtggccaccacctggtcctgatccgcactctgtaccacaccacagctacagaggcgacaacgaggtgactgtgttgtgggcagcaactcgccgcaacacactttagctactacgtgagcagcaacgtgccacgttgacatccccttgcaacaacggtgcaggcggaggatttcgcgggcaactaccttgccgcgtccatctttaaatcatatcttatatgtaaatatacttccatgtttcagtttagttttgatattgtagatgtatatagaaaataaaaacaattaaactacccctgtcccctccagagttctccgagaaatgtcagaaggctacaaatcatgccgaagcaccaaagcaggattaggccaataaaattatcaatgccaagtttaacaggtcctatatctaggttcgttttctcagatgccacgatgcgattttggcggtgcgcattcatgtattcggcggcgatcttccattcccagaatttgtcaaagcccgaggaatgccaagccagaatgaagtcgttgtaggcatttaagtgcggccacagtcgcggcacaaacgccaccgtaaatgcaaagtaaatatcatccaccataagtttcagccgctttagggcatcgttttctattagctcggtgttgcccaaatgaccaaactgaaggcgctcgacgacaaatcccatttgctccgtgtgcgagaaggcggatattaaattggcatcgtaaactcggtaatgctccattaaaccaagaagaactggctgcataaataagaatcttaaaaaatgtactaataaatttaattttgtagggcttacgtcggccgatcgctcgtcaatggtggtaatccaggcctgtgaagtccccgtccaaatgagcttatggtcgaagagacgttggcgagagtccgccgcttcctctaaagtgggcaaagtgaggatggccgccagaccgccactgtacacagtggtcaatataatgtcgatcatgtagctggccactaggacggttcttagagcatacgagctggtcacataattggtgctctgatttacgaaaagtttcagcgtactgatgcaaccgaagcgcagactactgatccaggaattgcctgccgcaaccgacgagtgttcccagcgacgggttataccaagagctaagctctcgagcagaaggcagagcatcacgcacatccagaggacaaactggaatggtcggagcaggagcgtccagctgattaaacggttcggagcgggcaccagacaggttactccagatcgtcccagaaaatgagtcatgtccatatactcgtacgcctcgtacctagaaagcgatggaatggtttacttttcaaaatgtttgattgattaatcaagagttttaccacaaatacatgccccctactccgtaatcgtttcgtctatcgaggatcattccaaccagaccatagcccgaggcattcaagtagatgtcaccccagtcgtatggttcagctgtggattgccttgacaataagctttagttgaatgtatttaattacctacatgtgtccacctgaatggtgcagttgtacaactcgcagaaaatgagcattagttgaatatctgttccatcaatggttacatccgtcgtgttcataaaacgatcataatataatggtggcttttcctaactcacataactggaattactgcgatatattctggtagcgaaaacttattaaaactcacataatccaatagcataaaaggcttgtagtcgaagatgcctatgactacctcgcgtcccttgaggtttcgcatcttgctggacattgcactctgggtttcccaagtagctttcgtacccttggcatcgaaacgctggagtatgtaaaactcaacaggctccgggtttttgttaaagtttcgcggaccgacaaatcggttcgttttaatttcaaaagtgcttgagttcaggtattgtgaagtaattaccaagatgttaggttgatctagcaattcaaatggtgagcatgtgtaattatttcaattcactgcacttatcctaccttggaatatataaccggacagataactatcttttttgtcctcaaactctttagtgtaaacgaacataaaacgatttcgcagagatctccaaatggagtagatgctggcgtgataaaaatatctggcgaattcgggaatctgctcctgaaatgctatgaaggtcttacatacaaaagtaaaataattaaatttattaattacaaatttaaaaaaaaaagggaataaccaaaaagtcttcaaacttaaaatttaacatcagctgctccgttatgttatcgatagcagatttattacgatataagccgcataaaaacgggaaatatcgtattatcaacttggaaacagttgaactgcaaaatagtttcaggacaatggacaaactgggattaggctgccccttctccttcctggtcggaagaccgcagagtatgagtgggggacccggtttcctggatctcaactacgactgctaccatcagatattttcatatataaatgtgctggaggaccagctaaatctgggccgggcccatccactattccaggttgtactgacggacattttgcgaacgcgccacaaaaaaatcaatgtgcggcttctgaaaaccattccggactgggagttcctgctgcagctgtgcggttccgaagtgtccaggtgcgaagtgccccatggtagctgggatgagccgtttacctacccctttctggggctcctgggacggcactgccccaaactgcgacaggcagtcatcatatttatgcacgccgttacagagtcgccgccgaaaagtggggacaggggccacatcatgcagctcctcctggagctacccagtctaaccaatctcactctgatcgatgccagatctgcacagcgtgagtacgaaaaccacgagcgcttcatattaattgtttcataccactcacacttttatcgtttaactctggtcaatattttaacttgaaaaagatattgcttaatctaaaattactttagattattttccctaaacttcattcgagtcggtgaatagaatcctttttataagcttaatatatatctgaattactattgcagtagatcaattgcggcacttcagtaaactggaggccttggacttggatggaatcgacccaaacctcagcaacgcctccttccaacaaatgtttgaaagtatggcttccct

SEQ ID NO: 41771 - DNA, 1722 bp, DROSOPHILA
atttaattattttacttttgtatgtaagaccttcatagcatttcaggagcagattcccgaattcgccagatatttttatcacgccagcatctactccatttggagatctctgcgaaatcgttttatgttcgtttacactaaagagtttgaggacaaaaaagatagttatctgtccggttatatattccaagatcaacctaacatcttggtaattacttcacaatacctgaactcaagcacttttgaaattaaaacgaaccgatttgtcggtccgcgaaactttaacaaaaacccggagcctgttgagttttacatactccagcgtttcgatgccaagggtacgaaagctacttgggaaacccagagtgcaatgtccagcaagatgcgaaacctcaagggacgcgaggtagtcataggcatcttcgactacaagccttttatgctattggattatgaaaagccaccattatattatgatcgttttatgaacacgacggatgtaaccattgatggaacagatattcaactaatgctcattttctgcgagttgtacaactgcaccattcaggtggacacatctgaaccatacgactggggtgacatctacttgaatgcctcgggctatggtctggttggaatgatcctcgatagacgaaacgattacggagtagggggcatgtatttgtggtacgaggcgtacgagtatatggacatgactcattttctgggacgatctggagtaacctgtctggtgcccgctccgaaccgtttaatcagctggacgctcctgctccgaccattccagtttgtcctctggatgtgcgtgatgctctgccttctgctcgagagcttagctcttggtataacccgtcgctgggaacactcgtcggttgcggcaggcaattcctggatcagtagtctgcgcttcggttgcatcagtacgctgaaacttttcgtaaatcagagcaccaattatgtgaccagctcgtatgctctaagaaccgtcctagtggccagctacatgatcgacattatattgaccactgtgtacagtggcggtctggcggccatcctcactttgcccactttagaggaagcggcggactctcgccaacgtctcttcgaccataagctcatttggacggggacttcacaggcctggattaccaccattgacgagcgatcggccgacccagttcttcttggtttaatggagcattaccgagtttacgatgccaatttaatatccgccttctcgcacacggagcaaatgggatttgtcgtcgagcgccttcagtttggtcatttgggcaacaccgagctaatagaaaacgatgccctaaagcggctgaaacttatggtggatgatatttactttgcatttacggtggcgtttgtgccgcgactgtggccgcacttaaatgcctacaacgacttcattctggcttggcattcctcgggctttgacaaattctgggaatggaagatcgccgccgaatacatgaatgcgcaccgccaaaatcgcatcgtggcatctgagaaaacgaacctagatataggacctgttaaacttggcattgataattttattggcctaatcctgctttggtgcttcggcatgatttgtagccttctgacatttctcggagaactctggaggggacaggggtagtttaattgtttttattttctatatacatctacaatatcaaaactaaactg

SEQ ID NO: 41772 - protein, 433 aa, DROSOPHILA; identical to SEQ ID NO: 28749

SEQ ID NO: 41773 - DNA, 5152 bp, DROSOPHILA
ccagtttccctggctgcgccacgtggcccccgatcgcactggctacaatctcatccagcaactgaacacagagctgtacggtttctttatggacaccatcgaggagcaccgacggcagctggcgaaggatccgtcgccggcggaaagcgatctcatctatgcctacctccaggagatgaaggaccgcagtgctggcggcgagagcagcacattcaatgagacgcagctggtgatgaccatcctggacttcttcattgcaggctcccagaccactagcaatacgatcaacctggccctaatggtacttgctatgcgcccggatgtgcaggagaagctgttcagccaagtgaccgccagcgtggctgctgccagcacagatgcgtttcctcacttgagccgtcgggaagcctttgactacatggatgccttcatcatggaggtgcagcgcttcttccacatcactcccattacgggtccacgcagagctttgtgggcaaccaagctgggtggctacgacattccgaaaaatgccacaattctgattagcctacgttcagtgcatctcgataaggagcactggaaggatccgctggagttccgcccagagaggttcatcgattcggctggcaagtgcttcaaggacgagtacttcatgcccttcggcatgggcagacgccgttgtctgggcgatgccctcgcccgtgcctgcatcttctcgtttctagtgcggatcgtgcagcattttagcgttgtcctgccggcgggagagtctccatcaatggtgcttctgcctgggattacgcttactccaaaaccatacaaggtgcagttcgtcaagcgcacctaagttcgtgactggagtcgatggtgtcggtattataggtcaagagatatggtgctgaatccactaggatatttccaaggattccgaaaattatttacacatgaggatattataagcttaaagattcaataaaaacttatgccaatctgcatagctgtggtctagatgttgtttattgatgtcctctaaattaaattacaatgctttataatttaaacaaatttacattcggcgattcgcataacaaaatgatcaaatgaatcagaatgtataacaacaccatgtgaggatctcatcgtacttgggctggaaaatatatatataaaatggaaaatatttacagactcaatttgaggaaagcaaaaacatatacaatgggttctgtataacatattaaattagtacaatcgaactaaatgaaagcaatctcgtcatgcctggtcctggaccacttcgaaaattatagaactaaacgctgatacaataagcaggtgagtgattgtaacaaagaaacgagccgaccgaacgaccatctttccttaaatgctagtagtgactgcacttgggcaaggcagacgccttctcatgcggtctatttttcatgtccgtgctctggccgccttcatttaaatcccggcggcaaggcttcgcttcctgttgcatatgcttctgtgtgtttaggacttgagggattcgtatttgaatagttaaacgatgtcctgcgcggtagggtgctaaaagttaaatccggtgctgggcatgttgtccggatcgaactcaaactgttgcgtgcctgccacgggagccacccggctatcctcctcttcgttgccgaagtactgttcgataatgtaaaatgatttgtggtagatgtcgcggttttcatgcgcctgcagatactctattttgtccaaacctatataatattaacagaatcgatatttaaatggaaatttgaaagtaaaaataaatagcgttacctccgcattcctcgatggtaatagcatagggatttggtcgcgtctggaacttttcacctgccttcaaaatgttttcaagtgcatttagcgccacttggacgatgtccgagtcgacgacggtgagaaaatcgcacatgggcggcacacagccaacctgcaccaggtagtggatctgttcgtgcgtaccgctgctggttgcgttggtaatggcccatgcggcctccttgcgagtcttaaattcggccgtctgcatgataaccatcagctgcgggaatatgttggcattgattaaggcctggatctgctcacgattgccggctgcaatatttgagattgtccagcacgactccttcttgattgtttccgccgtcgaatgcagcaggtggctaatgcaggtcaaagcgttgtaccccaatatcacctgggtctgctgatcgtcgcctgtcacaatattgcccacggccctcagagcagctgtgctcacgttctgctgaggatgtctgccaggataggtcaacaaatcataagtgtaattttaatttgtaatggcgcagcaggactacttacaatagcagctcaaccaggcgacggcaaacacccgcatcaattacagcctggattttatcattgggaccatctgacaggtagcctatggcccagcaagtatcgcttagtacatccgcatcagtgtacttcagcaaccgtgccagtattggtagaccatggctaattttggcaaagtctgcgggagggcttttgccgcggcacaagtttgaaagtgtccacaccgcattccgtatcatggtaatgcgatccgagttgctcaatacactgcaagaagtcacacctactttggcgcaatcttatcaatataattatttataacttactgcaggagaggctctagaatgccggagccgagcaaatggtctcgacacatgggtgagtcaccggctatgttgcctagggcccacacggcctgttcctgaacatcatcatggggactggagagcaaatcaatgaagataggcactgccccggcctcgataaccaccttggtctgttgcgaggtgcccgatgcgatgttcgttagcgtccaggcggcctcgaactgcagcgtggcatttgcgctatttcgcaaaaaggtgacaaactgtggcactatccccttctggatgacttcctcaatgggaggattgggatcgcgggacagcagtttgcggaacttttgagtcgcctcaagctgttcgttttcacgtccactgaagagcatttgaatcatttcctcgttgattacggatggctgtgccccgcttccagcagcttcctcgttttgaccgccagtgctgctgtcagccatgtgcatgtcggcagcctgcattggaatggagagatagttaagactatgctatcaggccaaacttgatcaaaatatacctgctgttcgttatcggtgttgctctccactccggctgatgttgaggatgtagccggctcaagaaccacattgcgtcgcttaaagagctgctgttcgcgtttgttttttcgcaactggatgcccacctcctcgcgacgacgacgcatctctgtggagtccaaggcggcatttttataacgctgtttgtggctggcagacatttcgtcgtcttggcaattcaaaagcttgaaatagttaaaaaaaatatttctttgagaacagaataatttaagtcgtaaagacaggtttcagataaaaagtgagtgcgacttgattttcgccgctactgtgatcaaatgctaaacgaaagtgcaaataatctagaaaatataggtagaggtcgtcgtggaatgcgaactagttgaattgaacgtttataatcatcactaggtgttccccaatgttctcatccactcccaccaggattattacgccctgtaaccactgaacattcgcttagcgcctgctctaggctaattttacatttccggaaacataaagattacgttgtcaggcgaataatttacatataataggttcacatttaatgaactattcagttttcctggcaaaatgcacaatcacaacactttcacatttcattgtacgtgtatgtacatatgtgcacacacggctgctttgcgtttgtgcgtataggtgcgggcttaggtcagccagcatgagccattcgctggtctccggttacgcccttctttgagccaccacaactcctggttagaagaggcgccttcagatacgtaattagaacacaatttacctgttccggagaatccttttctcgtcttaatcatgcaaggggacgggagattttacacgttgtgaggaacggggatgccggactgtcaaaatgcaatgcacacagctgacgcgctatcgatagcgatatcaaccgatagcagtaattccaatccaattgcatttaatttaaacatgaaagaaaataagaaaaagtcgcgcaaaacggccaataagacaaatgaaacgtcagagggtcagaaaaagaagatcattgaactgctgcacgagtacaacgacctaaaggatgccacccagcgcgtcctggaagccttggccaacctaaaatgcgtacccgtcggatcggtttacgctacatacaacctgccccgcgacgaataaagtttgtgctttttagactgttatatttatgtacttgttgtaaacaacttgtaatacaacggagtgcatgtaaatgccttctggcttggcagttccatgagacttctgctaataaatccacctaaaactagtcattgcatttgttccacctattggccagcatgaaaataggaccggcatcgttcattgaaggtcttgtaggaacgatctttaatgatgtcctcgacattgagctcggcctggagaacccgcagctggaaaggatcataggcatcagttaagagtaagacttaggtatttcggttaccttgcgctgctccgccctaaactggttatccgtatccacatcatccggctgggtctcccgcttttcccttagcttcttcagattactagccgaaattgttatgcaactgcgtatgctttcttgctgcaaggagaagctatctgtcaagatccccgtgtgttgtacttaatcaggatttaccctggccaagtgtgactcctggagcttcgcgtacagatcgcgacaggtgctttcactgttcacttgacccttaaacgactccgttggcagggcatttagtgcatatataatcttgtcgtccacatctcgcatcttcttcagtgcctcctgtttggaaacttaaagccatttagtatgccggctactaacccaaacaacaatattcc

SEQ ID NO: 41774 - DNA, 2307 bp, DROSOPHILA
cccgttcctcacaacgtgtaaaatctcccgtccccttgcatgattaagacgagaaaaggattctccggaacagcttttgaattgccaagacgacgaaatgtctgccagccacaaacagcgttataaaaatgccgccttggactccacagagatgcgtcgtcgtcgcgaggaggtgggcatccagttgcgaaaaaacaaacgcgaacagcagctctttaagcgacgcaatgtggttcttgagccggctacatcctcaacatcagccggagtggagagcaacaccgataacgaacagcaggctgccgacatgcacatggctgacagcagcactggcggtcaaaacgaggaagctgctggaagcggggcacagccatccgtaatcaacgaggaaatgattcaaatgctcttcagtggacgtgaaaacgaacagcttgaggcgactcaaaagttccgcaaactgctgtcccgcgatcccaatcctcccattgaggaagtcatccagaaggggatagtgccacagtttgtcacctttttgcgaaatagcgcaaatgccacgctgcagttcgaggccgcctggacgctaacgaacatcgcatcgggcacctcgcaacagaccaaggtggttatcgaggccggggcagtgcctatcttcattgatttgctctccagtccccatgatgatgttcaggaacaggccgtgtgggccctaggcaacatagccggtgactcacccatgtgtcgagaccatttgctcggctccggcattctagagcctctcctgcatgtattgagcaactcggatcgcattaccatgatacggaatgcggtgtggacactttcaaacttgtgccgcggcaaaagccctcccgcagactttgccaaaattagccatggtctaccaatactggcacggttgctgaagtacactgatgcggatgtactaagcgatacttgctgggccataggctacctgtcagatggtcccaatgataaaatccaggctgtaattgatgcgggtgtttgccgtcgcctggttgagctgctattacatcctcagcagaacgtgagcacagctgctctgagggccgtgggcaatattgtgacaggcgacgatcagcagacccaggtgatattggggtacaacgctttgacctgcattagccacctgctgcattcgacggcggaaacaatcaagaaggagtcgtgctggacaatctcaaatattgcagccggcaatcgtgagcagatccaggccttaatcaatgccaacatattcccgcagctgatggttatcatgcagacggccgaatttaagactcgcaaggaggccgcatgggccattaccaacgcaaccagcagcggtacgcacgaacagatccactacctggtgcaggttggctgtgtgccgcccatgtgcgattttctcaccgtcgtcgactcggacatcgtccaagtggcgctaaatgcacttgaaaacattttgaaggcaggtgaaaagttccagacgcgaccaaatccctatgctattaccatcgaggaatgcggaggtttggacaaaatagagtatctgcaggcgcatgaaaaccgcgacatctaccacaaatcattttacattatcgaacagtacttcggcaacgaagaggaggatagccgggtggctcccgtggcaggcacgcaacagtttgagttcgatccggacaacatgcccagcaccggatttaacttttagcaccctaccgcgcaggacatcgtttaactattcaaatacgaatccctcaagtcctaaacacacagaagcatatgcaacaggaagcgaagccttgccgccgggatttaaatgaaggcggccagagcacggacatgaaaaatagaccgcatgagaaggcgtctgccttgcccaagtgcagtcactactagcatttaaggaaagatggtcgttcggtcggctcgtttctttgttacaatcactcacctgcttattgtatcagcgtttagttctataattttcgaagtggtccaggaccaggcatgacgagattgctttcatttagttcgattgtactaatttaatatgttatacagaacccattgtatatgtttttgctttcctcaaattgagtctgtaaatattttccattttatatatatattttccagcccaagtacgatgagatcctcacatggtgttgttatacattctgattcatttgatcattttgttatgcgaatcgccgaatgtaaatttgtttaaattataaagcattgtaatttaatttagaggacatcaataaacaacatctagaccac

SEQ ID NO: 41775 - protein, 543 aa, DROSOPHILA
MSASHKQRYKNAALDSTEMRRRREEVGIQLRKNKREQQLFKRRNVVLEPATSSTSAGVESNTDNEQQAADMHMADSSTGGQNEEAAGSGAQPSVINEEMIQMLFSGRENEQLEATQKFRKLLSRDPNPPIEEVIQKGIVPQFVTFLRNSANATLQFEAAWTLTNIASGTSQQTKVVIEAGAVPIFIDLLSSPHDDVQEQAVWALGNIAGDSPMCRDHLLGSGILEPLLHVLSNSDRITMIRNAVWTLSNLCRGKSPPADFAKISHGLPILARLLKYTDADVLSDTCWAIGYLSDGPNDKIQAVIDAGVCRRLVELLLHPQQNVSTAALRAVGNIVTGDDQQTQVILGYNALTCISHLLHSTAETIKKESCWTISNIAAGNREQIQALINANIFPQLMVIMQTAEFKTRKEAAWAITNATSSGTHEQIHYLVQVGCVPPMCDFLTVVDSDIVQVALNALENILKAGEKFQTRPNPYAITIEECGGLDKIEYLQAHENRDIYHKSFYIIEQYFGNEEEDSRVAPVAGTQQFEFDPDNMPSTGFNF

SEQ ID NO: 41776 - DNA, 13322 bp, DROSOPHILA
tctgtatcagaacaatgtggcttggctttaattgagtgcaacatccgaaaccattacagacatgaaaataaagatttcaaattgaattggtcaggcggttaggctcgaaaatcgaaagtaacttgttttccatctgcgatttaatgtgtgtatgtgtgtcgatcgtggtttctcgctgtgtacgtggcgcgtgtgtgcgtgaatcggaatatatagctagtcgtttattatatatactacatatataaatgtattagcatatggagactacagactataagaattgttacatcagctgaggggggcgtaggcaaaactttacaaacgggagaacggggaaaaccctacgagacacatttacacacagctaacaaacaaactgtaagttgtccattttcaattttccattttcagctatatgtttgtttacattacggttcgattactgtgcgggcatatatgcatatgtatgtatgtttgtaattgaaatttgaattgaaattggaattcggattgcgtttacttcgtactgtggatttatttagcttgtttgtttgaaatctttattggatgcttgtaacgggcagtagtatccataaaattataatggtataatgttaaaagtttaactatgcgcttacagtctaatgaaaagtgtatacatcgacgaatatgtatggtaatttcagaaattttttataatcgcttaggttttatctagttgtttttcactgtcgattgtgtgtttttgaatggggtagggtgcggggagcggggtggctggatgcttggggtctctcgttagttatgctatgcgcttgcaactattattaattaatttaatttaatttaaattgaattacaagtaatcggtttagtttttcttcactttttactttcatatcgtagcttaattctctacgcctttgcacttgctttgattttcgcttgctacattttctctttttttaattaattttactttcgtttcgcttgttttttgttattttttttttctttgctggcttgccctacgttcaatagtaaaatgtatatatatttatatagttatatgtacgttaagaattacattaatgtaggacatacgtctaagaggatgcaggccttctaatgggaactttgggggaagagaggggtcgagggggaagggagtgggagtggactacaggtgtttgacctgaaccgaactgcaaggactttagcgacttgggggagggggggtcgacttcctataatcgtattaattagtagtaaaatttgtatgtacatttcgttacgttgcttaggactgatcgtcgatcaacagcatgacctgctgcgttgtcgtttgtggattccttgtgcactccacctggtgagcattccaatccttccgctggcagaactccgagcagtacggcgtctttcggcacagtgagcactcggccaatgcttcgcggttacagttggcgcactatttgaaaatattaaaaagataagtaagatatcgattggataattagccctatctgtagtatcaaaacataccttcttagccgaaatgatctcgttgccgtgcagggagcctgaaatatttggatcatcgatgtccgcgtgcacttggacacgcatcgcgctgaccgctgcatcgcgctccttttgcagaacctcgatgcgacgctcgaaggactgcttcatgtcgttaagcatgcgtttgaagtcattggtggccttgaccatggtgcagtacacgtgctcgatgttcttcatcgactggctggtgtccaggacggcgatggaggatccatcgttgatgttcaccacaaacgtttcccgttcgtacgtgttgcccatctgcgactgatcgaccagctcggtggaggtgtccaggctgtcgttgagcgctgcccacggctcatccttggacgtgatgttctcttccgacaggaacatgttgttctcgtccaccacgctggctgttgcagcagccacagctgcagttacatccacacagttgttggcgccgctcccgctcgtgttgttgttattggtgttactgttgttgttgttactatgatgggtgttacgcttgcgtttgggtccagactccatatcgagatcagtttgattccgcttccgccgcttgtacggtgtaaagagacggacagggccggaagctaaacaagatgagcgtgtaagggggttaaacaaatggttgtagttgggtgcagttgggtgcacatagggctcggcacaactggagaagacataacaagggcttcacatagaagttaactattgtagaaaggactatttgctttccttagttattaattagttatcaaactattacgaattagggccgatcaaagtaatgagttgctaataaaaaatcaaatcaaaatgacatcagaaccgaatgtcctgtccgaatgacttaaaaagtagcattattagttgtcaagagcaatcaattttaaattgcttttaattaaccggcgagagtacatctgtcaatatgtttgcatatcagcaagcgcaacaaatttttaactattttttctattgctagttactacgctctttcttattaatctatatttattatgcaatattgcatttcaaaaacctcttttagagagctgactgtagtatgtgcctatgcaatattaagaacaattaaataaaatagcatattaacttatggcagcactttgttgctatgtttatgtttatgtttatgcacgcagttaggccagggcggatgtaacatgatcacccactcgaaggcaaaaagtataagtgcatggtcagcattcacacgccgaccaaatacatattacatacgtacatacatatctcgctctcccgataagcctagatatataagatatacataagaacgccgctccgctgctggcgtacccggcagcgcagctacgcggattagcctaagtccaaatatataaaaaactgtaaaatcggagagactctgtagacgttgagctgacagaaccatttctgcctactctaaaatcaaaagaagaaattgaataaatatatgtcagcccgacggctgccttcaacttaaaacggacttgtgttcttaattggagttcatcattacatggcgaccgtgacagtcgtccaacgctggacgaattgaccaaagctggtgaaaacaaaggaacaaaggaacactggactggaagaagactggactaattaaatggaactgcaaaaaccaaggaaaaatctgagtgagtagagttctattgagtatgggcaaacaccgtggcggtttgaaaactaagctgaataaacgtatagcccacgtaaggtggctaatatacggtcagcaaacgccaccggtttggtcgaaagctctaaagctacatgcagagctagaccacttgttgcaatatcagcaagaattaaagacccataagctcgagaaaactcactcagataatattaaaaatatacccccaattaatgaagttccaaaataccaggcatgtccagcaccagcaccagcattaacaaaaccaaagaagtcctgcccccctggctgcgaaggaatctggagtccccactgcctggggacttgtgagcgaccatcgacgtcttcagcggcgaagaaatagacagcagcgagggagtgtcagcgtgccacccccggcgacgcccagctgacacctgatgagcatcatcaacagcagaatataataataaatatatataaatataaagtaaatataaaatatatatagataagaaaaattgtaagaaatattgtaaaacggagcatatactattatgccctgttaacccaatatggcccgtgaagccatagctagaatcaggcaggcaacaatgtaaaatacaattttttttttactcttgcgaatattgaaagattttataaatagataattccaaacataaatgtctatagagccaaatgaaataagtaaaactgaaaataaaagtatatacaaaggaaattttctattctattctccaaaatataaaattagtatacccaaaatgggtctaatagacacctaaaactgtggactctacagccaatgtaataaataaaggtagaagtccaaaatgcagacttgttctggataaccataatactaattgtaattgcattaattatggtatccaatgcattaataaaaatatacaaacctgcataacaagtgtcttaagaaaccgataccgtagcactgctaacggtatagataatatttaagggaagatctttaataaagtcaattatgaatgaaaatatgagaaaaattatatgaaaaaaaaaaaataataaataaaaaaaaatataaaacggtaatattgaatttatctacattaaaaaaaaaaatatatacaaatgaataaatttgaagttattgagtataccacagcatggactgggaaaagcttgttgatcagataaaagatcaaaatgaaaatttcagaaaatcctataagtgcttaacgcaaaacagatcaacacaagctgtaacaatcaataggaatgcccaagtcttggtaaatagttataatgaaatcagagagttgatccaacaaaatagaaagaatttggaacgcaaacagtgtgctaaggctttgaacctactggtgacattaagagaaaaattaatatttataaaaaataaattcagtctccagatagaaattccaaccatagtaaacaccccactaagaataaatttgaatgaagacagcactaactctgacgaggaagataggactatagtcaaggaagacattaaagaggaagatcttcacgatctaactataccagcaaaattaatgctgaagaacgacgataaaacaaataacgcagccgactccgaaaataacttaaccatggcagaagaagcagctgccattaggtcttacattagggaagtcgcctgcacagtgccagaatttgatgggcaaaagatccatttacaaagattcattaaggcaatcaaattggtagacctagctaagggaccatttgaagacattgcagttgaggtcattaagtcaaaaatagttggcacaattttgaactcagttgacaatgaaacgacaattccagcaattataaacaaattgcagaaagtagttgtcggtgagacatccagtaatgtcaaagcaaagctagcaacagttcagcagagaggtaaaactgcaacgcaatttaccgctgaagttgatagcctgagaaaacttttagaagcttccctatatcgatgagggtatacctctagaacatgccactggtctaagcaccaaagaggcaattgaaaccatgatacatcgtgctgagcacgaaagtatcaaaacagtactggaagcagggacttgcaccactatggatgcagcgataagcgcatacataagaacgagtacaagagttaccggtgacatcaataaagtgatgtactttagaggtaacagacccaatagaggatacggaaatgccaatagaggtagtaaccgcggtagaggctttaataacaatagtattagaggcaactaccataacggttaccaaaataacggttaccaaaataacggttaccaaaataacggttaccagaataacggttatcaaaaccgctataatggaaataataaccgttataatggctataacagaggccgttataatggaaacagaggccgtaacaacagtcagaacaactacaacagaaacaatgccaatgtacgagtaatccaagaacagggaaactcgcaacagcctttaggtactcagtagaagaagatcgtagagtatacaccatcaattataatctcaacatattttctacattcattcatgccaaaacaggcgtaaaactagtttttctacttgatacaggtgcagatatctctattctcaaagagaactctgacaaattttctaatattcaaataaccaataaaataaacattcaaggcataggccaacagaaaattcagtctcgaggacagacttttattgagatacagacaggtaaatacgttatcccacacgattttcatttagtagataaaaactttcccaataccgtgtgatggaataatcggaatagatttcataaaaaaatataattgccaaatcgatttaaaccaagaagaagattggtttataattagaccaaacagtttgaaatttccaatatatattcccatagcatacagctctggtattaacacaacgttattaccagcaagatcccaagttgtcccgaagattaatagtatcatcaaaagatgataacattttaattccaaaccaggaaattcaaactggtatttatgttgcaaatacaatcgcaacatcaagtaatacatttgtccgaattttaaatacaaccgattccgaccaattagtcaatatggacactctaaaatatgagccacgtttcgaactacaatgtagttcaggcaaatagtgaacacagaaataaaactgtcttatctcaattaaagaaaaatttccccgaattgtttaaatcacaattagaaaatatatgcagcgaatatatagatatatttgcattagaatcagaacctataacagttaataatttttataaacaacagttgagattaaaagatgatgagccagtatacaccgaaaaattatagaagtcctcatagtcaagtggaagaaatacaagcccaagttcagaaattaataaaagataaaatagttgaaccatcagtttcacagtacaatagccctttgctattagtacccaaaaagtcaagcccgaattctgataaaaagaaatggagattagtaatagactatcgccaaattaataagaaacttttagctgacaaatttccactaccgagaatagatgatattttggaccaacttggtcgagcaaaatatttctcctgccttgatttaatgtcaggttttcatcaaatcagaactggatgaaggctcgagagatataacatctttctcaaccagcaatggctcatatcggtttcacgcgattgccatttggcttaaaaatagcgcctaattcattccaaagaaatgatgactatagcattctccggaatagaaccgtctcaagcattcctttatatggatgacttaatagtcataggttgttccgaaaaacatatgcttaaaaacctcactgaagtttttggtaaatgcagggaatacaacctaaagttacatcctgaaaaatgttcatttttcatgcatgaagtcacatttttgggacacaaatgcacagacaaaggaattttgccggatgacaaaaaatatgatgtcattcagaactacccagttccacatgatgcggacagcgctagaccgttttgtagcattttgcaattactacagacgttttatcaaaaatttcgcccgactattcgcggcacataacaagattatgtaaaaagaatgttccatttcgagtggacagatgaatgtcaaaaagcattcatacatttaaaatctcagctaattaacccaacactcttgcagtacccagacttcagcaaagaattttgcataacaacagatgcaagcaagcaagcgtgtgggcgcagttttaactcaaaaccataatggccaccaactcccagttgcttatgcatccagagcttttacgaaaggtgaaagcaataagagtacaacagaacaagagttagcagcaattcattgggcaataatacatttcagaccatacatttacggaaaacatttcactgtgaaaacagaccatagaccattgacatatttattctcgatggtgaaccccagctctaaattaactagaataaggcttgaactagaggaatataattttacagtagagtatctaaagggcaaggacaatcatgtagcagatgcgttatcaagaataaccatcaaagagctaaaagatataactggaaatatatttaaaagtcactacaagatttcaaagtagacaaaaatcctgcgcaggaaaagaacaattggatttgcaaaagcaaaccaaagaaatagcttcagagccccacggtataccgaagtcataacaaatgacgaggtaccgaaaagtagtgacattgcaattgaatgactcgatatgtttatttaaacatggaaagaaaattattgcaagatatgatgttggtgatctttatactaatggaattcttgatttagatcaatttctccaaaggcttgaattgcaggccggtatatatgatatcagccaaatcaaaatggcaccgtggaaaaaaatctttgaacacgtttcaatagataaatttaaaaatatgggcaataaaatattaaagaatttaaaagtagcgctacttaacccggtgacccaaataaataatgaaaaagaaaaagaagctatattgtctacattacatggatgatccaatacaaggagggcatacaggcattacaaaaaccttggccaaggtcaaaagacattattactggaaaaatatgagtaaatacataaaagagtacgtaagaaaatgtcaaaaatgccaaaaagcaaaaacaccaaagcacacaaagactccaatgacgataactgaaacaccagaacatgctttcgatagagttgttgtggacacaattggtccactacccaagtcagaaaatggtaacgagtacgcagtcactctcatatgtgatttaaccaagtacttagttgccataccaatagcaaataaaagcgcaaaaacagtcgcaaaagctatatttgaatcttttattctaaagtacggtccaatgaagacgttcataacggacatgggaacagagtataagaattcaataattactgacctgtgtaaatatttgaaaataaaaaatataacatcaacagctcatcaccaccagacagttggagtagtagaaagaagtcatagaactttaaacgagtatatacgatcctacatatcgacggacaaaaccgattgggacgtatggcttcaatatttcgtatactgcttcaacacgacccaatctatggtacataattattgtccatatgaattagttttcggtagaacaagtaatttaccaaaacattttaataaactacatagcatagaacccaatatataacatagatgattacgctaaggagagtaaatataggttagaggtagcatatgctcgagcaagaaaacttcttgaagcgcacaaagaaaaaaataaagaaaattatgaccttaaaagtaaaagacatagaattagaagtaggagataaagttttactaagaaatgaggtaggtcataaattagactttaaatatacggggccctataagatagaaagcataggagataataacaatattacggctacttactaataaaaacaaaaaacaaatagttcataaagatagattaaagaaatttcattcatgattgaatttaaacttatattttccttaatcatttatacaaattttccatacactacggtatatttttatctttgcattataaaatcaactattgttgttcaaacaaaaacacaaacaaaataaaaataaaaataaaataatttgcatttaataatcaaaataacttcactagggttaccgttatttttcaaaaaggagggagatgtagtatgtgcctatgcaatattaagaacaattaaataaaatagcatattaacttatggcagcactttgttgctatgtttatgtttatgtttatgcacgcagttaggccagggcggatgtaacatgatcacccactcgaaggccacaaagtataagtgcattgcccactcgaaggcaaaaagtataagtgcatggtcagcattcacacgccgaccaaatacatattacatacgtacatacatatctcgctctcccgataagcctagatatataagatatacataagaacgccgctccgctgctggcgtacccggcagcgcagctacgcggattagcctaagtccaaatatataaaaaactgtaaaatcggagagactctgtagacgttgagctgacagaaccatttctgcctactctaaaatcaaaagaagaaattgaataaatatatgtcagcccgacggctgccttcaacttaaaacggacttgtgttcttaattggagttcatcattacatctcattccttaatgagatgttctatagggttacaatatgacatacacacttgagaataagaaagttttaatattatttcttgcaacatttttgcccaagaagcccttgctgagtaaaatttccaattacttggaattgtttaaaccctatagtttgcaaacaaaaaattgttgataaacagaagtcaggtgggtttttaaagctgtggtgttatgaattcggtttgtgcgcgagtcctgcacctgggacaccatgacggaccgatgaccaggtcaactcggtgcgccatgcagaaggggggagtgtgtagtaattgttgttcgtctcacctgactcacctgcttcgtcgtcgcagcagacggtgcagctgcagttggtcgcgtgcggcgtgagcgtaccctcatcgatgagggactgcagcgatttgccgccgtacttgatcgaacgcttccaatccttgctggagccccggccacacacatgctcaaactcactgggcgtatgccacttgtccttgtacttcacacagcgtccacggccgccggagcccagcttgctgcggtataactcggcgcaggtggttttgcagcggatctggaagacctcattgtgctgggttgacgggttctccgaccatcccgaggagccaccacccgttccgccgccgccaccgccgacgccactcgctccgcccgcggcgtgctccaaggtggccaggctgtcgtggctattgttgctcccggagccatcgtgattcagtccaatcgtatttgtggcggtcgtattggtgcccgcattattggcgccgccaccgccgccgcctggttgcgtctgctgttgctggatgacgatcgtcttgaggtcgttgcccatgctgaccgtgctgccggacaggtagccattgttgtcgacgcacagcatcggcttgaagtgagggggcagctggtcgggcgtgatcacattgaaggtagtgccggttatcatcgaaccgatgggcagggatacgggcaccgaaaccacaccgccaccgccgtttcctccgcccgctccgcttgtaccgccactggcgccgccgctaccactgttgtcgttggaggaggatgtgaccatgcgaaccttggtgtccaactgcattaccatagcgcacatattcccacgttcgtcacatgtatgtgggtgagtgtccagcggccaattgatggcgtttgcgatttaattcaatgcgatttgcacaggaatcgggaatgaaaattcgaatgtaagtaaacaacacagcatgggaaaaatgaaaatcggtatacacaacatttgtgcgccacaaatgcggtgggtggagggggaaaacgaggaggaggaggcaaattgggagtggatggaggcgagaaggcgagcggggaatgcctgtggcccagtgggtcgcacggagcgttccgtagggcgcaagttgcgccacccccaggccacctagcccaaccacccaccacccactttccacaactgcgcagagcgaagcggagcggttttcgagccagattcggtttcggattcaatagatagaacctgaaccaaacacacagtccggaaccaaaaccaccccgccaaaggagaagcgaatggaaaatccaaaaccaaatgggctccttacgcagccgtttgttgctcctttttcttacctggtggtgatgatgatgatggtgatggctggagctttctaatatcacctcttctttcacaacatcctcggccagcgcggccagatctttcctattcaggtgcagctcggtggaggagtcaacctgttccatagtattgttatgccagttcactttcacttattctgcggtccaacgatagtaatgcacttgaattgttcatcggattaccacttgcaattggattattgcgatatatgtatattattcgacgtctaccgagacgacggacggtctgttgttgttgttgttgttgctgccgccgcgatccgcgtttttttcagcgctcaccacgacttacatgcgaattgcgcgcaggtcgcgttcaagttgcattgccctatttacagctggtggttcattgcaatttacattttttaagcttaaactttactaatttactaaaaaagttgatatcctcctcttcttcctcatgataactagagttgtcatgcgcgttgcagctatcgcccgctatcggcactatcgatagtcgtgattcgtgctcgctatctgtgccccatctctggtttttaaatatcggaaagtttacagctatatatcttgcatattaaattaagatttctgagaattacaattttaaagatttccttatgacttgatcttaaaactcaaaatcacaccgaatttggttttaccattattactctaaacattttcgcttgtttattaataggatatattgatgttatgaaaacaagaacgatttattactttcaaggaaaagttttaaattcatgagaagaataaactatgctgcttgtgttggaactacacagtgtttcatctctaacatacatttcgatatatccaattggacagctagttcagaaaacggtcactctagcaatataatggtaactatctgatgatccaaaataataataaatagtaaaactgaatgcttacaggccgatgtggatgtgtttataagtaattatacaatcatcgatccagaaatttaccagctatggatcgaaggcttctcctgtaagttttcttctcccaattgcaatcttgtttcatgtcaaacggctccatcgatttacaattatagccagcgaggcggtgtcctatctgaaacagaagggttttggtcactccatgggcgctcccagcgacctgattgcatcggatgtactggatcattaccgcacctattccctgattgaactatacctaaacgcacccaccaaactgatggagcaatcctgcttccagctggagccacaaatgcgtgaccttatcaccgagaagtactattccatcgatgatgtggtggctcgcgaaattcttggcaagaagctgtcgtcccgctaccgcaaggacctcgacgaggtggccgagaagacgtgcgtcaagctaaaatcagttcggtgggtaaatttggccgctacttaggcagagtagagtctaatata

SEQ ID NO: 41777 - DNA, 2383 bp, DROSOPHILA
agttatcatgaggaagaagaggaggatatcaacttttttagtaaattagtaaagtttaagcttaaaaaatgtaaattgcaatgaaccaccagctgtaaatagggcaatgcaacttgaacgcgacctgcgcgcaattcgcatgtaagtcgtggtgagcgctgaaaaaaacgcggatcgcggcggcagcaacaacaacaacaacaacagaccgtccgtcgtctcggtagacgtcgaataatatacatatatcgcaataatccaattgcaagtggtaatccgatgaacaattcaagtgcattactatcgttggaccgcagaataagtgaaagtgaactggcataacaatactatggaacaggttgactcctccaccgagctgcacctgaataggaaagatctggccgcgctggccgaggatgttgtgaaagaagaggtgatattagaaagctccagccatcaccatcatcatcatcaccaccagttggacaccaaggttcgcatggtcacatcctcctccaacgacaacagtggtagcggcggcgccagtggcggtacaagcggagcgggcggaggaaacggcggtggcggtgtggtttcggtgcccgtatccctgcccatcggttcgatgataaccggcactaccttcaatgtgatcacgcccgaccagctgccccctcacttcaagccgatgctgtgcgtcgacaacaatggctacctgtccggcagcacggtcagcatgggcaacgacctcaagacgatcgtcatccagcaacagcagacgcaaccaggcggcggcggtggcggcgccaataatgcgggcaccaatacgaccgccacaaatacgattggactgaatcacgatggctccgggagcaacaatagccacgacagcctggccaccttggagcacgccgcgggcggagcgagtggcgtcggcggtggcggcggcggaacgggtggtggctcctcgggatggtcggagaacccgtcaacccagcacaatgaggtcttccagatccgctgcaaaaccacctgcgccgagttataccgcagcaagctgggctccggcggccgtggacgctgtgtgaagtacaaggacaagtggcatacgcccagtgagtttgagcatgtgtgtggccggggctccagcaaggattggaagcgttcgatcaagtacggcggcaaatcgctgcagtccctcatcgatgagggtacgctcacgccgcacgcgaccaactgcagctgcaccgtctgctgcgacgacgaagcaggtgagtcagcttccggccctgtccgtctctttacaccgtacaagcggcggaagcggaatcaaactgatctcgatatggagtctggacccaaacgcaagcgtaacacccatcatagtaacaacaacaacagtaacaccaataacaacaacacgagcgggagcggcgccaacaactgtgtggatgtaactgcagctgtggctgctgcaacagccagcgtggtggacgagaacaacatgttcctgtcggaagagaacatcacgtccaaggatgagccgtgggcagcgctcaacgacagcctggacacctccaccgagctggtcgatcagtcgcagatgggcaacacgtacgaacgggaaacgtttgtggtgaacatcaacgatggatcctccatcgccgtcctggacaccagccagtcgatgaagaacatcgagcacgtgtactgcaccatggtcaaggccaccaatgacttcaaacgcatgcttaacgacatgaagcagtccttcgagcgtcgcatcgaggttctgcaaaaggagcgcgatgcagcggtcagcgcgatgcgtgtccaagtgcacgcggacatcgatgatccaaatatttcaggctccctgcacggcaacgagatcatttcggctaagaagtgcgccaactgtaaccgcgaagcattggccgagtgctcactgtgccgaaagacgccgtactgctcggagttctgccagcggaaggattggaatgctcaccaggtggagtgcacaaggaatccacaaacgacaacgcagcaggtcatgctgttgatcgacgatcagtcctaagcaacgtaacgaaatgtacatacaaattttactactaattaatacgattataggaagtcgaccccccctcccccaagtcgctaaagtccttgcagttcggttcaggtcaaacacctgtagtccactcccactcccttccccctcgacccctctcttcccccaaagttcccattagaaggcctgcatcctcttagacgtatgtcctacattaatgtaattcttaacgtacatataactatataaatatatatacattttactattgaacgtagggcaagccagcaaagaaaaaaaaaataacaa

SEQ ID NO: 41778 - protein, 576 aa, DROSOPHILA
MEQVDSSTELHLNRKDLAALAEDVVKEEVILESSSHHHHHHHHQLDTKVRMVTSSSNDNSGSGGASGGTSGAGGGNGGGGVVSVPVSLPIGSMITGTTFNVITPDQLPPHFKPMLCVDNNGYLSGSTVSMGNDLKTIVIQQQQTQPGGGGGGANNAGTNTTATNTIGLNHDGSGSNNSHDSLATLEHAAGGASGVGGGGGGTGGGSSGWSENPSTQHNEVFQIRCKTTCAELYRSKLGSGGRGRCVKYKDKWHTPSEFEHVCGRGSSKDWKRSIKYGGKSLQSLIDEGTLTPHATNCSCTVCCDDEAGESASGPVRLFTPYKRRKRNQTDLDMESGPKRKRNTHHSNNNNSNTNNNNTSGSGANNCVDVTAAVAAATASVVDENNMFLSEENITSKDEPWAALNDSLDTSTELVDQSQMGNTYERETFVVNINDGSSIAVLDTSQSMKNIEHVYCTMVKATNDFKRMLNDMKQSFERRIEVLQKERDAAVSAMRVQVHADIDDPNISGSLHGNEIISAKKCANCNREALAECSLCRKTPYCSEFCQRKDWNAHQVECTRNPQTTTQQVMLLIDDQS

SEQ ID NO: 41779 - DNA, 7675 bp, DROSOPHILA
gtcacgtgtagtggcagataatccagcatgccagaattctgtgagtcggtctccgaagtgcggcgctgctgcttaatgacgggctccgtttcgagatcattttgtgcttccagttcttgagtccgcttctcatcgtcctcgcagtcgccctctgtttcgtcaagttctccctcctcctcatcttctgtctcgtcgtcttggggatctgttccgtattgtagtagaccctcctcgtcctcggtatcctcccacttcatcgcaccggagctggatccattgaagctcgaattgtttgccttggctggcaatgattttctttgtgcattttccgagtgcttaatgctaccctcgtgctttcccagatcagatctcttgcagctgagcctgcactcgcacaccgcgcagaacacgaagtgcggatccgtctcatccgggagcaaccacggatatatcgcctggtactccggctttgtcttgggtcgaggatatttcagcagggcgcacggccggcgtggcctgtattcggagcgtagggcatctctgggcggcgaatatagtcagtgaacataagaccctggtctcttactttggtatactcacagtttttcctgagttaactggaggtttgacatttgggtagtcttttccaaaatataaacaaaatccagtgaggtatgaccgtgcgcacatgcatagaaataccgcataacccgttttgcacatgctgtaagagttgtcacccacaccggttgtttgtttctacacactttattttaaatattcaacgatatatgaatcatatgctaatgcatgtaatttctttatatgctttctaagcataatgttcatgtagttattaaataaataattgcagttatactatgaacagtacgttttaagaccgttctcaataaagtgaccagtccagtccctcagttgcattttatgtattttttgaacttccttagtatatggtccttagcccgccggtttaatgcaacagtacggtcacattggccatcgccttgacagcgattctgagttttcgcttgcgattatttttatttttttagtttataaccgtatactgtgatctcccaaaagctaacaaatattagagcaaagtgcctggataaccagtatctcgtgatggatcgggattcgagcatgcaggcgaaaaacctagatgctcaatgcaacccagacctcaaaatggcgtctgcaaattcagaaactttagcgtcggcaacgcacgagctgaaaattatggacgtagagggtggtgctctggtggatccggatcacatcgaggaagtggagacctccatggtcatcgtggtggatgatgacgatggggatgtggccatggtggtggaggaggacaagcacccgatgcgggatgacccgtgtattgaggacatcatggatgacgaacatgctccattggtggccgagctacagtccgctctaaataacccagacgacaaacaggccagcgaggatcccctcctggaagaccaggaacgtgaacccgatgccatgtccactaaaactgaaccctccagcgatgcggagagctcccattcgtaccacgatcccatgggcctgctggagaggattgaaatccatgatccgggagacagccaggatgacgacgacgaggatgacgaaagcagcaatggcggtggcgttgacggaggcatgcgccgcaagatgccccgcgcacagcgctggctcctctggatgaagcgttggccctggatcctacacgaggactccgatggcaccttagcgttctgcctttactgcaacatatccattaacgtgaacaaccgctctagacacatccaacagcacaacgtgtcgctctcccaccaggaacgcgagtgcaactatctggcattcaagaaaagtgaggaggaaactcgaggagcgtaagtgtcacagttttaaagattacaaaaaagagtacagaaatctaaaattcggagaaatcaagttaattaatccgccgtataaagtaaaagctcaactcttcaaatgcctttcactttgtaaagggtttgtaccgaaatccagaaagcccactgtagtgtgaaaaaaactgccaacttaatgaagggagcactgctccgagtccgcattaattttccaacgtgtagcaattgtttgacacaaagaaactggtgtatgataggcttggtcgcggttcagaatagattttacatatattacactccctgctttcaatgagggtagctctactcgtaatgttagtaagatttgcacctttaaaaaacgaaataccgaaatcatattgagatcaccgaaagtttgcgaacacttattaactcccaattatccgtagaatcagcgacaacgaaatcaagcacgaattcggcaccaagagctatgtggccgccatgaagcaaaaacgaatctccgagaccgaggcatttaacaacttcaactggctgcgttggctccgttggcatccttggcttgaacgttccatgcccacagggaccatcgggacatgtcgcatctgcagcgtgcgaatgaacgtggagtttgtctatttgcgcaagcgccacgaaaccaccaaaggtcacatggaggcactgcgcaacctagattccgataagcggagtcggaagcgaaagaggagcaagagcaacagcgtgaccaatagcggcggggatgaggccgagcgagagaaggaatctgaaccagaagttgggccggaggatgctcaggacacccctgtggttatgatgaacggcgatgtggactcaggcgacgaccctggcaagtggtgtgcactgattccggacaccaatccacagcaatgccgatgtacgctctgcaactgcacaatggcgattaccagcttcctacggcactgtaaaaccagagctcattgtcacatgctatcgacacccgctgaaaaggggtgagttgacactcctacagaacgtaaatagcacctgttctttaactgctttcacttttttacctcagctcttcagatattcgcggcatttgggccgtgttcgccgacatgcatccttggttgattgctgatcccgaagaccccagcattgggtactgcagcgtctgtcgcaagcgattcatgtatggaaactcagagatcaagcgcaagaatcacgaaaaatccgagaagcataccttggctttggccagcgccaaggcaggcatcgaagttggttcggctgacggcagaggcggcgataacatggatgaagaggaagcggcggcaagtgatcaagcccagtcatcgcagaccgatgacagcgaagataatgacgatgacaattggtccgagatccaaaaactcggaaaagggtatgttgcttaaaatatttttaatttttactttaataataataatttcgtatagttttgctcataagtcctctagcgagccaagaaaggccacggttcgcgctggggtacgtttttacccgtggctttgctactccaaggaccgaaagactcagatttgcaaattctgccgcgtgcgctttcacaacgaagcggcaaaggcgcggcatgagttgagtgcccggcatgtaaagctggtaaagcagttcaaaatgcggcaagcgaaactgcaccagggcacaaacacgcaaactaaacataatgcgcaggatgatgaagaatcacaggaacaggacgaggaatatggagaagaagaggaggacgcagaagaagattcccaaagcaacttcgacttgggcaccgtgcaggcaagaaagactgctcgagcggacaataagctttttgtcaagcccattccggcaaccatgaagggcaaggttatggtgtggaagggccgcttcccgtggctctcctacaaaaagaacgagcagcgtggaaactatgcttggtgcaagctgtgcgaagtgtctctctacctgccctcatccaagtgggcctccaagcaccagaggacttcccgacacatacgcctccgcattgatcgaaagcgcaatggtggcaaccctttgaaaacatcgaacaaaaactcaggtgaaatatccactgttgtggccacagcttcggctttggccagcgccgaggctagacagaaagcggctatggcagagctgcaagcgaagtacgactggctggatcctgatgccaatgacgagaatcactgtcactgccgtgtttgtgatagccggctgccgatcaaggtattttacctgcggcaacacgacgcttcgcgtaagcacgtcgaaaataaggagcggcaaagggccaatgccgccgctgccgccaatgcaccatcagttagtcccacttccaccgttgatgcggaaaggcaggagtctggaatggacaaggagagcgaaaacgatatgagcgttcggtgagtttagaattcgaaatcccttcattaagcgtttctaataaccacactcattatggctacttagatccgatggcagcacagcggaaccgctggcgaagcggtcccgacgctcaatggaggttcgtcgcataatacgcgcccttcgcgactcaatgggcaagcgacaggaagaacgctcccaaatggacatggccagggacatgatatgctcgtcgtttgatattgttacacgcttgcgaactttggaacgggagtcggtcgcacataacgagtctatggcccaggcgccgccatcggtgacagtgtcaccgattaagccaccggagccacgacatgtaatggatctcttctttgacagcatttcgccgaccatgaagtccctgccgccggatttagccgcagagggcaagtcgaaaatcatgcagctcgtttgtagcttggagcttcgagccatgcagagaaatgcgacaactccaaccccagctacagtttctgcttcctcgaaatggccttcttcaactacggtgaccccagttaaaactcctcctgctcctatttcagctccccttgcttctgtcgatgcagatttgcattcctcggttgtcacaacaccgcatgaatacaataatgggcagaacaataataacgacaaggaaaccgtaccgaaagagccagttaccggggcttcctctgcccaagtgaccatcaatgggagcgccaaagacctgccagagaatatacgccgtatcttaacttccaaccaaacgcaagtgaccaaccgcctcgagacggattccgtgcgttgtgtacctcttgacaaactaacaacacagagtcggaccaacgtgaacggacgactcagtcaaggtggcacttcggaagcaccatccaccccacaggcggaccttagcaatggtaacacgttggccatgatcaggcagatacgggttaacaataacaacagttccaagatcaccgttactaatacgcctcagatgcaacagccgcagcaggcacaggcaagcataacgtcctcgactccaataatgcgtggtggtcccagcagcaacggttgtcaaatcacaacatttcggacaatggtgaaccataaccgcaggccatagagctcctaggaaatatgaatcaaacgtaacttaagactttatcactgtcattatttaaattcgactcaatcagatatactttacgttaatgatgaatacttgcaagcaattgttcaaaatttagaatacacaaacgatggagcttcttccaagatatcacatagaacactactccttcaacgaactacgaacctgttgcttccgaaacttgcatgttttgaagacgatttgtttcgaaaccattccaatacccgaaaaatttttatttttcatggagaaaattacaaactatggacttattcaagtccaaaatatagtaaactttatgtcttttaattataatccttactaattccggtttatccactttgtggctgctctgtttaagtctaaattcagtttcagtcgttaggagtggaccttacgatcaactcgattcgtttcgatgccgttgctgaggctccgcagctggcaatccgttttgcaccaccgcgtttccaggtttctcatcgctcgttatcgtggacagctcgatttcacgcagttccccgaggagccgtcgcatcgagctgtgcataaaggcgttctcaggcatctgatagccaccagtcgcagagagagcagccggtgcgttagcgggagtggaggaagccgttggctttggcggtttgctgacagtgtttagctgcttctgctcgttggcctccagagcctggtcgatgggcgccgatcgctggtgcagcgggaacatgaatttaacgtccagaaagctgcatagctcttcaatcccgtccagtgtccgaccgagttcttcgctaccattcgcctgctttcccacatgatggcgcacagtgctcaggtagctctgcaacttgcttcgcgctatcttgattacagtttgggcattcttcagctccaatcggagtagctctggactctgcaagggccaatacaaatatttcttaggaacaggtctttgtaataaaatcatgaaagtaaatgttacgttataaattttaaagtatttaagaattgactcactaaaaccctacttagaaaatatgtacaaaagattggcttagatttaagtagttttgttttgttataattaaatataatttaataaacggttaaatatggtaacagaaacacgtatacgacattcatatattaaagcacactcacattctccaagtatccatccattgcaactcgatgggtatcttgcaatttggccagagcagaagaatccgccgcattgcgctcctgcatgaaggtgatctgccgatcgatctggctaccactagtggccatcgaagagttttctgaattggtgcgcgggcgttgtcccgcaggagggggcacatccttgtccgcggaactgttggcaaaggacacacacgtgaaggcgtttggcggatactcaaactgcttgggattgagcatgaatagggcatgtctcagcaccagatggacatcaacattgtttgggtagcgcattagatatgtcaacgatgtggtgtagtcactaagaagcactgatatcgacattagttaggccattatttaggaactaaggcaccaggcgggagtacccacgtttatcacggatgtgcaccaacattgccactagaatgtagttgggcaggtcgaagcggtcgctatctgcgaagatggcatcccagagtagcaacaggtccagcagcataaactcccgtccaaagagaagtcttagccatcgactataataaggaaatatataatttgattaatttcaatattcatttttaagatatctttatattgtttgtggaattcccttatcgaaaagcattactagtaactaaaaccccccattttcattgccaactcacatgccgaatatgtgcagtgggatttccatcttttggagatagtggtgcaagtgctggtcctgcttggcgagtattttgtcccgtatgaagttcagctggccgataacctccgcctcggtcgacgtctcattgtccccggggctctgaaagaggaatgggtagcgataagggctgcttgctgcacccgcaaactgcgacgcacctcggctcgctgttcgatgtggccaccgggtgtggagaccagattcgagacgcgatagtacgactccacggag

SEQ ID NO: 41780 - DNA, 5051 bp, DROSOPHILA
cagtacggtcacattggccatcgccttgacagcgattctgagttttcgcttgcgattatttttatttttttagtttataaccgtatactgtgatctcccaaaagctaacaaatattagagcaaagtgcctggataaccagtatctcgtgatggatcgggattcgagcatgcaggcgaaaaacctagatgctcaatgcaacccagacctcaaaatggcgtctgcaaattcagaaactttagcgtcggcaacgcacgagctgaaaattatggacgtagagggtggtgctctggtggatccggatcacatcgaggaagtggagacctccatggtcatcgtggtggatgatgacgatggggatgtggccatggtggtggaggaggacaagcacccgatgcgggatgacccgtgtattgaggacatcatggatgacgaacatgctccattggtggccgagctacagtccgctctaaataacccagacgacaaacaggccagcgaggatcccctcctggaagaccaggaacgtgaacccgatgccatgtccactaaaactgaaccctccagcgatgcggagagctcccattcgtaccacgatcccatgggcctgctggagaggattgaaatccatgatccgggagacagccaggatgacgacgacgaggatgacgaaagcagcaatggcggtggcgttgacggaggcatgcgccgcaagatgccccgcgcacagcgctggctcctctggatgaagcgttggccctggatcctacacgaggactccgatggcaccttagcgttctgcctttactgcaacatatccattaacgtgaacaaccgctctagacacatccaacagcacaacgtgtcgctctcccaccaggaacgcgagtgcaactatctggcattcaagaaaagtgaggaggaaactcgaggagcaatcagcgacaacgaaatcaagcacgaattcggcaccaagagctatgtggccgccatgaagcaaaaacgaatctccgagaccgaggcatttaacaacttcaactggctgcgttggctccgttggcatccttggcttgaacgttccatgcccacagggaccatcgggacatgtcgcatctgcagcgtgcgaatgaacgtggagtttgtctatttgcgcaagcgccacgaaaccaccaaaggtcacatggaggcactgcgcaacctagattccgataagcggagtcggaagcgaaagaggagcaagagcaacagcgtgaccaatagcggcggggatgaggccgagcgagagaaggaatctgaaccagaagttgggccggaggatgctcaggacacccctgtggttatgatgaacggcgatgtggactcaggcgacgaccctggcaagtggtgtgcactgattccggacaccaatccacagcaatgccgatgtacgctctgcaactgcacaatggcgattaccagcttcctacggcactgtaaaaccagagctcattgtcacatgctatcgacacccgctgaaaagggctcttcagatattcgcggcatttgggccgtgttcgccgacatgcatccttggttgattgctgatcccgaagaccccagcattgggtactgcagcgtctgtcgcaagcgattcatgtatggaaactcagagatcaagcgcaagaatcacgaaaaatccgagaagcataccttggctttggccagcgccaaggcaggcatcgaagttggttcggctgacggcagaggcggcgataacatggatgaagaggaagcggcggcaagtgatcaagcccagtcatcgcagaccgatgacagcgaagataatgacgatgacaattggtccgagatccaaaaactcggaaaaggttttgctcataagtcctctagcgagccaagaaaggccacggttcgcgctggggtacgtttttacccgtggctttgctactccaaggaccgaaagactcagatttgcaaattctgccgcgtgcgctttcacaacgaagcggcaaaggcgcggcatgagttgagtgcccggcatgtaaagctggtaaagcagttcaaaatgcggcaagcgaaactgcaccagggcacaaacacgcaaactaaacataatgcgcaggatgatgaagaatcacaggaacaggacgaggaatatggagaagaagaggaggacgcagaagaagattcccaaagcaacttcgacttgggcaccgtgcaggcaagaaagactgctcgagcggacaataagctttttgtcaagcccattccggcaaccatgaagggcaaggttatggtgtggaagggccgcttcccgtggctctcctacaaaaagaacgagcagcgtggaaactatgcttggtgcaagctgtgcgaagtgtctctctacctgccctcatccaagtgggcctccaagcaccagaggacttcccgacacatacgcctccgcattgatcgaaagcgcaatggtggcaaccctttgaaaacatcgaacaaaaactcaggtgaaatatccactgttgtggccacagcttcggctttggccagcgccgaggctagacagaaagcggctatggcagagctgcaagcgaagtacgactggctggatcctgatgccaatgacgagaatcactgtcactgccgtgtttgtgatagccggctgccgatcaaggtattttacctgcggcaacacgacgcttcgcgtaagcacgtcgaaaataaggagcggcaaagggccaatgccgccgctgccgccaatgcaccatcagttagtcccacttccaccgttgatgcggaaaggcaggagtctggaatggacaaggagagcgaaaacgatatgagcgttcgatccgatggcagcacagcggaaccgctggcgaagcggtcccgacgctcaatggaggttcgtcgcataatacgcgcccttcgcgactcaatgggcaagcgacaggaagaacgctcccaaatggacatggccagggacatgatatgctcgtcgtttgatattgttacacgcttgcgaactttggaacgggagtcggtcgcacataacgagtctatggcccaggcgccgccatcggtgacagtgtcaccgattaagccaccggagccacgacatgtaatggatctcttctttgacagcatttcgccgaccatgaagtccctgccgccggatttagccgcagagggcaagtcgaaaatcatgcagctcgtttgtagcttggagcttcgagccatgcagagaaatgcgacaactccaaccccagctacagtttctgcttcctcgaaatggccttcttcaactacggtgaccccagttaaaactcctcctgctcctatttcagctccccttgcttctgtcgatgcagatttgcattcctcggttgtcacaacaccgcatgaatacaataatgggcagaacaataataacgacaaggaaaccgtaccgaaagagccagttaccggggcttcctctgcccaagtgaccatcaatgggagcgccaaagacctgccagagaatatacgccgtatcttaacttccaaccaaacgcaagtgaccaaccgcctcgagacggattccgtgcgttgtgtacctcttgacaaactaacaacacagagtcggaccaacgtgaacggacgactcagtcaaggtggcacttcggaagcaccatccaccccacaggcggaccttagcaatggtaacacgttggccatgatcaggcagatacgggttaacaataacaacagttccaagatcaccgttactaatacgcctcagatgcaacagccgcagcaggcacaggcaagcataacgtcctcgactccaataatgcgtggtggtcccagcagcaacggttgtcaaatcacaacatttcggacaatggtgaaccataaccgcaggccatagagctcctaggaaatatgaatcaaacgtaacttaagactttatcactgtcattatttaaattcgactcaatcagatatactttacgttaatgatgaatacttgcaagcaattgttcaaaatttagaatacacaaacgatggagcttcttccaagatatcacatagaacactactccttcaacgaactacgaacctgttgcttccgaaacttgcatgttttgaagacgatttgtttcgaaaccattccaatacccgaaaaatttttatttttcatggagaaaattacaaactatggacttattcaagtccaaaatatagtaaactttatgtcttttaattataatccttactaattccggtttatccactttgtggctgctctgtttaagtctaaattcagtttcagtcgttaggagtggaccttacgatcaactcgattcgtttcgatgccgttgctgaggctccgcagctggcaatccgttttgcaccaccgcgtttccaggtttctcatcgctcgttatcgtggacagctcgatttcacgcagttccccgaggagccgtcgcatcgagctgtgcataaaggcgttctcaggcatctgatagccaccagtcgcagagagagcagccggtgcgttagcgggagtggaggaagccgttggctttggcggtttgctgacagtgtttagctgcttctgctcgttggcctccagagcctggtcgatgggcgccgatcgctggtgcagcgggaacatgaatttaacgtccagaaagctgcatagctcttcaatcccgtccagtgtccgaccgagttcttcgctaccattcgcctgctttcccacatgatggcgcacagtgctcaggtagctctgcaacttgcttcgcgctatcttgattacagtttgggcattcttcagctccaatcggagtagctctggactctgcaagggccaatacaaatatttcttaggaacaggtctttgtaataaaatcatgaaagtaaatgttacgttataaattttaaagtatttaagaattgactcactaaaaccctacttagaaaatatgtacaaaagattggcttagatttaagtagttttgttttgttataattaaatataatttaataaacggttaaatatggtaacagaaa

SEQ ID NO: 41781 - protein, 1169 aa, DROSOPHILA
MRDDPCIEDIMDDEHAPLVAELQSALNNPDDKQASEDPLLEDQEREPDAMSTKTEPSSDAESSHSYHDPMGLLERIEIHDPGDSQDDDDEDDESSNGGGVDGGMRRKMPRAQRWLLWMKRWPWILHEDSDGTLAFCLYCNISINVNNRSRHIQQHNVSLSHQERECNYLAFKKSEEETRGAISDNEIKHEFGTKSYVAAMKQKRISETEAFNNFNWLRWLRWHPWLERSMPTGTIGTCRICSVRMNVEFVYLRKRHETTKGHMEALRNLDSDKRSRKRKRSKSNSVTNSGGDEAEREKESEPEVGPEDAQDTPVVMMNGDVDSGDDPGKWCALIPDTNPQQCRCTLCNCTMAITSFLRHCKTRAHCHMLSTPAEKGSSDIRGIWAVFADMHPWLIADPEDPSIGYCSVCRKRFMYGNSEIKRKNHEKSEKHTLALASAKAGIEVGSADGRGGDNMDEEEAAASDQAQSSQTDDSEDNDDDNWSEIQKLGKGFAHKSSSEPRKATVRAGVRFYPWLCYSKDRKTQICKFCRVRFHNEAAKARHELSARHVKLVKQFKMRQAKLHQGTNTQTKHNAQDDEESQEQDEEYGEEEEDAEEDSQSNFDLGTVQARKTARADNKLFVKPIPATMKGKVMVWKGRFPWLSYKKNEQRGNYAWCKLCEVSLYLPSSKWASKHQRTSRHIRLRIDRKRNGGNPLKTSNKNSGEISTVVATASALASAEARQKAAMAELQAKYDWLDPDANDENHCHCRVCDSRLPIKVFYLRQHDASRKHVENKERQRANAAAAANAPSVSPTSTVDAERQESGMDKESENDMSVRSDGSTAEPLAKRSRRSMEVRRIIRALRDSMGKRQEERSQMDMARDMICSSFDIVTRLRTLERESVAHNESMAQAPPSVTVSPIKPPEPRHVMDLFFDSISPTMKSLPPDLAAEGKSKIMQLVCSLELRAMQRNATTPTPATVSASSKWPSSTTVTPVKTPPAPISAPLASVDADLHSSVVTTPHEYNNGQNNNNDKETVPKEPVTGASSAQVTINGSAKDLPENIRRILTSNQTQVTNRLETDSVRCVPLDKLTTQSRTNVNGRLSQGGTSEAPSTPQADLSNGNTLAMIRQIRVNNNNSSKITVTNTPQMQQPQQAQASITSSTPIMRGGPSSNGCQITTFRTMVNHNRRP

SEQ ID NO: 41782 - DNA, 4892 bp, DROSOPHILA
cgttcaaagctctccaggctcagactgttgacccgcggaaggtgtatcccaatggcttttattagatccttgctggtgctcttgtagttacgcacgtgcaccttttccagggagctcatcctcaataaatacggttgcgcccgtgccactgttgcattgtatatagagatggacttcagtcggtagcagtgtctgctgatcatcgggagcagctgcagcgggtgatcatcgtcaaagtgggattccagtgtaccgatgcgactgccacagagccacagaaaggtgcgccaatcctccagagtccttatactcatatccttgtcaacaacatcctggaaatcatggcgatgcaggcgaagaaaggcatccctaaaaatgcgacagcatcgcgccaagtgcaactggtcctccaagcttagaagcttgaagatgaacaacagagaactggggtccaagtccagaatactggtgatgcgggccattattagctgactatgctcattgcgcgggaccgtcacaggcgccaaatggccagattagcaaaggcaactggtttatgtacgcctgacatggaaaaatttatcccaagtcggtaagttctatttatttactaattggactggtggcagtgatgacaattttcgaagtaagagtcttttggcaagattcaagctaaaaggttaaagctaagatattttaactattgtttaagctttgtttcttaatagaattacagtaaataataacatgaccttaaagtaaatttaaataaatttaaatttaatcaattttaattaaaaaaatcaatgtaagtaataagtaacgtaatttcagtacataaattttatacaattgtcggtgaaagcttaattgtcatgactatctgcgagccaaaagcactaaagttctaaaatcaatcgattagctatcgatagccccactggatcgcagccaactttgctttgttggggatgcaaaatgcgaatggctcttgaagaagaagcagcagagggaggaatttcaacaaattaccgaggaaaaaggcaagaaacgggcgaagaaagcagtgtgtgtgcattggcaagtgcataactcctcaccacacacacgcacacgcaccgacatcgcagggagcacacacacaagccccaaataggaccgaggtgaccaggacaaaaaccccagcttagatgatgagcagcagaacgcaggacgcggacggtgcctcgatcagattcagcgaccacacactggacaaggccaccaaggccaaggtgacgttggagaactactacagcaacctggtgacgcagtatggcgagcgaaagcagcgcctcgcaaagctggaggctcagctgaaggacgagagcttgtcggaggcgcagcgccaggagaagcgtctgcagcatgcccagaaggagacggagtatctccggctgaagcgattgcgcctcggtgtggaggactttgaggccctcaaagtcatcggacgcggcgcgttcggtgaagtgcgtttggtgcagaaaaaggacacgggacatgtgtacgccatgaaggtgctgcgcaaagcggacatgctggaaaaggagcaggtggcacacgtacgagccgagcgcgatgtcctggtcgaggccgatcatcagtgggtggtgaagatgtactacagtttccaggtgagtgacgagcgccagctacaacaaaaacaatgatatagggtgggtgggagaaagggtgatggggtgaaggagcgggcggcagcgcacataacaaaagaattgtgttaaaacacggacaaaaaaatcaataaaccaatacaacggcaaatgccaaaagcgcctttgccaatcatatggtcacgtctctcttgctctctcgcttcctctctcattctctgcgtgggccgcctttgttgtttttttctcgattctcttttgtcaacttcttctcggtgaaagttcttgacacaggcgaaccagcctacactgaatcgccatttctctgacgttaaatatttgtttaataagatatttttgcatattacaattattgtacaatgaatgtaaatacaattgcattcatatataagtattttcttactcagtaataatgtgagaatgtttttgaaatatctttccacaggatcccgtcaatttatatttgataatggagttcttgcctggtggtgatatgatgacgcttttgatgaagaaggacacgctatccgaggagggcacacagttctatatcagtgagacggcattggcgatcgattctattcacaaactcggtttcatacacagggatatcaagcccgataacttgctgctggacgcgcgagggcatctgaaggtaagtggaatccagataattgagatgagcccactaaaaactctattattattttagctctccgacttcggactgtgcactggcttaaagaagtcgcatcgaacagacttttatcgggacttgtcgcaggcgaaaccatccgattttataggcacgtgcgccaggtaagatgtgaaagaatctaagcttgtatttattaaataaactagcttgtcctgcagtccgatggactccaagcgacgtgccgagtcgtggaagcgaaatcgacgcgccctcgcctacagcaccgtgggaacgccggactatattgcacccgaagtatttctgcagactggctacggacccgcctgcgactggtggtccctgggagtcatcatgtacgaaatgctgatgggctatcctccattctgctcggacaatccccaggacacctaccgcaaggtgatgaactggcgcgagacgctgatatttcccccagagatccccatatcggaggaggccaaggagacgatcatcaacttctgctgcgaggccgatcgccggctgggttcccagcgcggtctggaggatctgaagtccgtgccgttcttccggggagttgactgggagcacatacgtgagcgtcccgcggccatacccgttgaggtgcgctcaatcgacgatacgtccaacttcgacgagtttcccgatgtgtcgctggagatacgtaagtatatttttaagcaaagggacgagcacacagactaacgtgcatccattgcagcatcggcgcccataccgcagggcggtgagattgcgaaggactgggtctttatcaactacacgtacaaacgattcgaggtgcgaaatttggagtgaatccagcagagcaggaactggagcaggagcagtagcagtagcagcttgaaggttgccgcactttgccacccattttatcaccaccacagccgtcgtctctctaacaccatcaccaccaagagcattctccacgctaaacgaaatccccgattttcctttttgaatgtcttacctacatgtgtatttaaatactagctaacatttgtgattccaaacaagagaagaatatgataacgcgaacaaacgatgtattgtatgtaaaaaagtcttagagcgtcgcccgcgcctcgggctaggttaaacgctatactaatcctcaaatgtccttccattggctttgttcaatccctaatcccgatcttaatcgtttaaacgttgtgtttgtaaaccagttccccatattagggacccattcggcaattctttatatatatatatattgtttacttattgggcagcagcgaaatacccataaatttattatttagcaaattaaaaatgttataacttttaggcacgttaattgtacgtatatgttttgtatcaacttgtaatgaaacaaagtcttaatacatagtgaaccccacacacaaaaccgaatccgaaaatctatcacacaaattagttactaatgccaatagcaacaaaagctaatctagacagcagaataaataaaagtatgtttaaatatcggtttcgttctatgtacacctgccccatcccaccccaccacaacccgcgcccacggacacgaatatagatttaaaaacattctacttcccgctggagtttttagttccaagtaattgtagtttgagcaaaagtgaattattgaaaaagttaccgagttaccgctggcaagtataaatccaattacatagcaaacactcaacgccgagcagttgcagaatgcaaacttaaaataattgataatatacctataaataaattaaacgagtaaacaagttttaagaaattatttttggtaatagaatacaataatagtaagcatactgataattcgataataatgctacacacacagcaacatgaaatgcaataataaatgaaacatgtgcataataactaacaaatacatgctttttacttgaattcgactcgatctgggcaatcagtgcattacttacaggagtgctagcatccttgaagcattctatgaggtggatgtggttcatgaaatcatacaccgtggacatcaaccttggaatcatctccctatttccacttgaatcatgaaacctatctcaaagaaaccttaagcttttgagtttcccgtagtgtaacaacatgtgaatgggtatggatacgacgaaccttcatctttaacctaaatggtattgtattgtattttcgaaataagtaagcatgaggaaaccaaaaagtaacacgacacaaatgctaggctttgtacatttaaatgtatgtatatattttgtcgatcttttcatctgcacttctctcgatatttccctatctgcactcgcgttcgatttttgatttgtgttttgtgtgttgatgagagggcgttgatttcattttctgcagttctgcagtttctgtatctgtatcagaacaatgtggcttggctttaattgagtgcaacatccgaaaccattacagacatgaaaataaagatttcaaattgaattggtcaggcggttagg

SEQ ID NO: 41783 - DNA, 2255 bp, DROSOPHILA
aagcagcagagggaggaatttcaacaaattaccgaggaaaaaggcaagaaacgggcgaagaaagcagtgtgtgtgcattggcaagtgcataactcctcaccacacacacgcacacgcaccgacatcgcagggagcacacacacaagccccaaataggaccgaggtgaccaggacaaaaaccccagcttagatgatgagcagcagaacgcaggacgcggacggtgcctcgatcagattcagcgaccacacactggacaaggccaccaaggccaaggtgacgttggagaactactacagcaacctggtgacgcagtatggcgagcgaaagcagcgcctcgcaaagctggaggctcagctgaaggacgagagcttgtcggaggcgcagcgccaggagaagcgtctgcagcatgcccagaaggagacggagtatctccggctgaagcgattgcgcctcggtgtggaggactttgaggccctcaaagtcatcggacgcggcgcgttcggtgaagtgcgtttggtgcagaaaaaggacacgggacatgtgtacgccatgaaggtgctgcgcaaagcggacatgctggaaaaggagcaggtggcacacgtacgagccgagcgcgatgtcctggtcgaggccgatcatcagtgggtggtgaagatgtactacagtttccaggatcccgtcaatttatatttgataatggagttcttgcctggtggtgatatgatgacgcttttgatgaagaaggacacgctatccgaggagggcacacagttctatatcagtgagacggcattggcgatcgattctattcacaaactcggtttcatacacagggatatcaagcccgataacttgctgctggacgcgcgagggcatctgaagctctccgacttcggactgtgcactggcttaaagaagtcgcatcgaacagacttttatcgggacttgtcgcaggcgaaaccatccgattttataggcacgtgcgccagtccgatggactccaagcgacgtgccgagtcgtggaagcgaaatcgacgcgccctcgcctacagcaccgtgggaacgccggactatattgcacccgaagtatttctgcagactggctacggacccgcctgcgactggtggtccctgggagtcatcatgtacgaaatgctgatgggctatcctccattctgctcggacaatccccaggacacctaccgcaaggtgatgaactggcgcgagacgctgatatttcccccagagatccccatatcggaggaggccaaggagacgatcatcaacttctgctgcgaggccgatcgccggctgggttcccagcgcggtctggaggatctgaagtccgtgccgttcttccggggagttgactgggagcacatacgtgagcgtcccgcggccatacccgttgaggtgcgctcaatcgacgatacgtccaacttcgacgagtttcccgatgtgtcgctggagataccatcggcgcccataccgcagggcggtgagattgcgaaggactgggtctttatcaactacacgtacaaacgattcgaggtgcgaaatttggagtgaatccagcagagcaggaactggagcaggagcagtagcagtagcagcttgaaggttgccgcactttgccacccattttatcaccaccacagccgtcgtctctctaacaccatcaccaccaagagcattctccacgctaaacgaaatccccgattttcctttttgaatgtcttacctacatgtgtatttaaatactagctaacatttgtgattccaaacaagagaagaatatgataacgcgaacaaacgatgtattgtatgtaaaaaagtcttagagcgtcgcccgcgcctcgggctaggttaaacgctatactaatcctcaaatgtccttccattggctttgttcaatccctaatcccgatcttaatcgtttaaacgttgtgtttgtaaaccagttccccatattagggacccattcggcaattctttatatatatatatattgtttacttattgggcagcagcgaaatacccataaatttattatttagcaaattaaaaatgttataacttttaggcacgttaattgtacgtatatgttttgtatcaacttgtaatgaaacaaagtcttaatacatagtgaaccccacacacaaaaccgaatccgaaaatctatcacacaaattagttactaatgccaatagcaacaaaagctaatctagacagcagaataaataaaagtatgttt

SEQ ID NO: 41784 - protein, 459 aa, DROSOPHILA
MMSSRTQDADGASIRFSDHTLDKATKAKVTLENYYSNLVTQYGERKQRLAKLEAQLKDESLSEAQRQEKRLQHAQKETEYLRLKRLRLGVEDFEALKVIGRGAFGEVRLVQKKDTGHVYAMKVLRKADMLEKEQVAHVRAERDVLVEADHQWVVKMYYSFQDPVNLYLIMEFLPGGDMMTLLMKKDTLSEEGTQFYISETALAIDSIHKLGFIHRDIKPDNLLLDARGHLKLSDFGLCTGLKKSHRTDFYRDLSQAKPSDFIGTCASPMDSKRRAESWKRNRRALAYSTVGTPDYIAPEVFLQTGYGPACDWWSLGVIMYEMLMGYPPFCSDNPQDTYRKVMNWRETLIFPPEIPISEEAKETIINFCCEADRRLGSQRGLEDLKSVPFFRGVDWEHIRERPAAIPVEVRSIDDTSNFDEFPDVSLEIPSAPIPQGGEIAKDWVFINYTYKRFEVRNLE

SEQ ID NO: 41785 - DNA, 3552 bp, DROSOPHILA
atccatacgagacatgcaaccactctgaggtcaaccggttgtctaatttatctattctagagagttgaagatcagccattcagccatttggccaacttatttttgttgccaactctatgtggcgatgtctcggcacccgcaattatttaaatgtcccagagacagagatttgtaaattgcacggctacaaagtgcatattgtatggtgccattaaatggacccacagggcgtatgcgcaatgtgtcgcactgaactttttcacctagccccagctcatgaattaattcagctctgcataaataacaaagttattcaaattcgcgaactgtctacctaaatcaccaatgactttggactcctcaatgcatttcatagaattttccacatttttccagcagtatgcagtatcgtataaaatgatcttgaaagaaccttaacgtttggggcacaactattggggttcttgaccaaccttttctggttttcaatgatagagtcaaacatacgtttgtaaagaatggatatgcaaatattccattcgtcgtgtacaacattaaaaaaaatatattgattgtttttctgcggggattttgttgtttcgatttattcggcttcggttttggatttcgttttattcggaattctctttttgcgcttccggcttgctatctttgtatcagttttgagtatcattgaagctggccaactgccgaaggtcgccgatcggcactcacctcaattgtggtccataattagtcgtgcagctggggtgataccttccatatgaagattcatagtgccatagtgaaatagcaatgcgtcctgcatttaaatgagggaaagcactgccacagaggagcacccacagatagatttgcatctccgtgcgggctccacatagtcgagacgacaggccataaatcagaatgaagaatactattgaatgctaatgttgtatactaattgccgaatatgtatcttttccggttacgcttgcagatgtcgcccaacataataggcagtacctttatattggccgagacggccattgccgatggcaacaacaacaaaatggctgccacaccagctgcttccgccgccccttcagcagccacgcccagccagaaggtggccaagaaagcggaggccaagacgcccgagaacaagccctacgaactggagatcgtctggcgcaacgtgggactcttcgtcatcctccactcgatggccctgtacggtctgtacttggtgttcgccgagagtgcctattgggaactcttgccaggtgagtttgagtatcaacacgtttcgtctttgccttactaagcgtcttggttcatctgcagtctatgccaccatgttcctcggcggtctgggcatcacggccggagtgcatcgtctgtggtcgcacaaggcctacaaggccaagctgccactgcgcatcttcctcatgctgtgccagtcactggccttccagaacagcatctgggagtggacccgtgaccaccgcgtgcatcacaagttcaccgacacacacgccgatccccacaactcccgacgaggcttcttcttcgctcatatgggctggctgatgtgcaagaagcaccccgatgtgaccagcaagggcaagcagatctccatggaggatattgagcaggatcccgtcgttatgttccagaagaagtgagtagtgtgctatctatgatttgaaggctatagtataatagatctgaaaggtttatacatccagggtgttcttgaagtttcccaagtaattaatttgctcgcccaaaagtaggcaatgaacaataaacaatgttctattgattcttagaagtttaactttaatccctctattatatgtacttataacacctcttatttccttagaatgtactttgtggttatgcccatctgctgcttcgccctgcccatgatcttcccctactacgtgatgggcagctcgctgcgcgtctgcttcttcacctgctccatgctgcgcttctgcctgtcgctgcacttcacgtggctggtaaacagcgccgcccacttctacggcatgaagccctacgatgtcaatgtgagcgccatgaacaacaagctggtatccaccctgaccatcggcgagggatggcacaactaccaccacgtcttcccctgggattacaaggcagccgagctgggcacctacagtttcaactggacgacggcctttatcgatgtgatggctaagatcggtaggttctgctgcgctccatgcccttgcatattaactttatctttatctctcataggacaagcctatgacctgaagttcgtctcgcaggagatggtctacaagcgagtccttcgcactggcgatggctcccacattgccgccctgctggatgccaacaacaatagtgccattccgaccagcgagctggtggcccacctggatcacgagaaggaggagcatgccatttggggatgggacgacaaggatatcagcgaggaggatcgcaagggagccaatgtggtgaacaaggaatccgaatgcaagctggattagagatcggggatcagtgggagctcacccaaaacgaacacacttcttgctgccacatcgggtcttcagtatttaattatattaattgcctattctccgtactgcctgtgcatctgagtggtggctgtaaactgcaaactgaaaataactacctaagggggattccgatcgtgggacctggtatgatggtagcaaggacatcttatatatcaatggcttcaattccaaatactacaaaacaaatgaaaactattcgagattagtcaatgcaactcgttcgcagcaacagagtgttaaaaaaaacctgcaccctctacacaatcccaatctcgcacttgtcgttcggggataatgaacacatctgccaccctctccctctcactatctctatctctatttttatatatattaattaactgtatatttacgcaagaggttctagaattaagcgtacctgctaagatctattttaagcatcgacttttatgtgtgtgtacattgtgttagttatgtaggtctaaattgtatatttcgatccaactattgttgaaaattataacaaaaattataaaaaaccaaacaaaaaatattgtaagcaacttattatcgaaaagggatgaaatacgcaatacttctcaagatccaaatgagtgtttaattgcttaattgattaaatattttcatagtgagaactaattgtaatggtgagtaagtacaacatatcaataaacattaatacatttgtttaactcgtgcctactctcggtttctaaatgtttacgacttctactgtgtataattgctgtaattatattttgaagtacaataaatttccccatttcaaatttattaggtgtcattaaccttttaacaccttgaaagggctttaattctgtagttagcttaaagttggtcgttaaactaaaaagtcaaatgcattttgcgattgcattgcaatgcatttgcggataataaataaatatggcaaaaagtttatattttt

SEQ ID NO: 41786 - DNA, 1227 bp, DROSOPHILA
atgtcgcccaacataataggcagtacctttatattggccgagacggccattgccgatggcaacaacaacaaaatggctgccacaccagctgcttccgccgccccttcagcagccacgcccagccagaaggtggccaagaaagcggaggccaagacgcccgagaacaagccctacgaactggagatcgtctggcgcaacgtgggactcttcgtcatcctccactcgatggccctgtacggtctgtacttggtgttcgccgagagtgcctattgggaactcttgccagtctatgccaccatgttcctcggcggtctgggcatcacggccggagtgcatcgtctgtggtcgcacaaggcctacaaggccaagctgccactgcgcatcttcctcatgctgtgccagtcactggccttccagaacagcatctgggagtggacccgtgaccaccgcgtgcatcacaagttcaccgacacacacgccgatccccacaactcccgacgaggcttcttcttcgctcatatgggctggctgatgtgcaagaagcaccccgatgtgaccagcaagggcaagcagatctccatggaggatattgagcaggatcccgtcgttatgttccagaagaaaatgtactttgtggttatgcccatctgctgcttcgccctgcccatgatcttcccctactacgtgatgggcagctcgctgcgcgtctgcttcttcacctgctccatgctgcgcttctgcctgtcgctgcacttcacgtggctggtaaacagcgccgcccacttctacggcatgaagccctacgatgtcaatgtgagcgccatgaacaacaagctggtatccaccctgaccatcggcgagggatggcacaactaccaccacgtcttcccctgggattacaaggcagccgagctgggcacctacagtttcaactggacgacggcctttatcgatgtgatggctaagatcggacaagcctatgacctgaagttcgtctcgcaggagatggtctacaagcgagtccttcgcactggcgatggctcccacattgccgccctgctggatgccaacaacaatagtgccattccgaccagcgagctggtggcccacctggatcacgagaaggaggagcatgccatttggggatgggacgacaaggatatcagcgaggaggatcgcaagggagccaatgtggtgaacaaggaatccgaatgcaagctggattag

SEQ ID NO: 41787 - protein, 384 aa, DROSOPHILA
MAATPAASAAPSAATPSQKVAKKAEAKTPENKPYELEIVWRNVGLFVILHSMALYGLYLVFAESAYWELLPVYATMFLGGLGITAGVHRLWSHKAYKAKLPLRIFLMLCQSLAFQNSIWEWTRDHRVHHKFTDTHADPHNSRRGFFFAHMGWLMCKKHPDVTSKGKQISMEDIEQDPVVMFQKKMYFVVMPICCFALPMIFPYYVMGSSLRVCFFTCSMLRFCLSLHFTWLVNSAAHFYGMKPYDVNVSAMNNKLVSTLTIGEGWHNYHHVFPWDYKAAELGTYSFNWTTAFIDVMAKIGQAYDLKFVSQEMVYKRVLRTGDGSHIAALLDANNNSAIPTSELVAHLDHEKEEHAIWGWDDKDISEEDRKGANVVNKESECKLD

SEQ ID NO: 41788 - DNA, 3131 bp, DROSOPHILA
tttttaagaacccttttcctcacatacaatatttatgtttaaattattatcatattccgtggattttggtagtcttgtatgcacttattttcggactggattagcgggacagaagataagattaagtttcgtctgctacttgttaccaaaatatagtattgagaaatgcgtatcgtagtgcggacggacatgttattggggaaataaaaccatgactaccgcaataaagatttccctactgcgagttggagtatttgtttgctaattgtgtgaaagtaaattaggtgaccaaatcggtaaagcggatttttcgcaacgctagatatatagaatttactttctactctggattttgagatcgatctgccgcctgcgccagttttgtcaacaactttcccatgcgatggccgtcaagcgttaattggaggcgtctcatgtctgaagaccgtagtctgaagtggtgggtttaaagaatggagtcgggaaccgttagcaggctacttagagagacagcgttatttatggtcaataccgcggggtcccgggggcaattaaagctaaaagaaatcaatgagcgagatcactgagaaattgcaggcctactctagttttattttttttcgcaactacttctaacacagacatcgacttgtgcgactggcaatttaattgaagaggatccagcacaagaatcgtgttctagcggtggtggcaacctgcaacttgcaacattgcaactggcaacaggttgctgatgcagcggccacttctcgccactcttctcagttgtctctgtgctcaattccaatgccaattccagcctcagaatgcagctaactctggcttttcagccgctactctgctgcttttcttcagctttcttcgtagttgataaaacgcttggccatcgccgatcgtgccacattttgcagcaggccattgcagaggttgcaccaagattaattcacgcagacccacagccaactgacatgcaacagagatgagcgacttggtgaggtttcttttactgagtgtgctctgtagttccctggctctggcccaggccagcagtagcgatggcaaccaggagacatccaccgttagccaggaggcggctagaggtttggccagcagctatgagccggaggacaagcaggcgctgcgtaaaaactcgcacattttcatgggcatctacaagaactacaaaagcacctatttgggcaacaaaacgaccagtgagtacaagaaacgcctgcgagatcgcgtgagtgctccgcaaatggcggaaaatgagacacctgaaatggttgagcccgatcaagaggaccaaagggattccctggcacaggaaattcgtcaggatgcccaggccgaggctctgatggagactcaaacagagtcccccaactacgatgatagtgaatcactagccgccaaaaaacgacgcaaacgcaagcgcaaggatcgcaacaagcgaaaggacgaggtggaatccgaaacggatcagcccgatcctgcgccggaggacgagacaatacagcggtacaatgtgggtcctggactgaacgtcagtctggacatgagcaacgatatagtgcatgtgaaactggatggcgagaatctcaaggagatcattggagctcgctggttaaccttagataatagtgaagaaggtgagttctactgctatcttcatatttgaaaacattactttactgtttataatttcatcaggtcgcggcaagaagtacgacatgatcaccaaagtcttaccactcttcattctccccttcctcatccaatcggccattgttccatttctggtcaccaagctgaaactgctcctggtcaaatcgattcttgtgggcaagctggccatcttcctgctgatcatctcggccatcaagaatggcaacaagatggtccagagctacgaagtgccctcctactgggccggcgaaccaagtcggagatcggagttggccgccgctgcttcctcggcagctgccgcatacaatggctatcgggtggagggtaagccaaccacctggatcagctaggcggtctcacatggctataagtttcggttctaggcttttagtgtttccaaataaacatatacacaaatcgggttgatgaccatactttttcttttagttcatatgacaatactcttacccaacaacaaaaaaaggaatagtagaaaactaaaaagaactctaaaatccgtaattattaaaccacctgtagctaaaaccggtgatttaaagtctgctttagaatccataaatatcagagatccataaacccgaaaaaaagtgattgcaaaatcgtgtgcatgatatatgttaaataacgtatttattgatagcatttgttgtggtaataaattagaggtggaatcaaataaattaacttaaatgtaggtaaacagttttcgtgggactcgaccagcgccccaatcctggattccatttccagtggagcatccatttagtagcaggagtactgcctttccagctggacgcacacatcgcactggagtcggaatccccagaccagcttgcaattgcacctcctctcggttctcacgtgctgggatctcactcggtatccgcacacgcggcacaactgctggcaggagaggcgttcctccagagaaccactgccatccttggagcactggcgaccccgtgttcctttccacaatccggtggcatcgcgttcgcagtagttgggcgagtcctgcatgaagaccagcgagtctaggggaatgttctgccacataatctttagattgctactggctccttctagttggatggcatcgtcgtacatttggaggagatcctgggcaatggcttcgaatggctttagtaccgccacacactcctcctcctggcattcaccctgcacagctcctggttgcttgcaccggcattcctgttccagtgatctttgtagtagagctcccaccacccgtcgattgtgaccgatggctcctgatcccgatccgaaatgcttctcgtactgctccagtgccttggtgggttcgtgggcacagggtacattcagagcattttccgtgcatccgcatccggcgattactccattggcacagtccttggtca

SEQ ID NO: 41789 - DNA, 1070 bp, DROSOPHILA
atgagcgacttggtgaggtttcttttactgagtgtgctctgtagttccctggctctggcccaggccagcagtagcgatggcaaccaggagacatccaccgttagccaggaggcggctagaggtttggccagcagctatgagccggaggacaagcaggcgctgcgtaaaaactcgcacattttcatgggcatctacaagaactacaaaagcacctatttgggcaacaaaacgaccagtgagtacaagaaacgcctgcgagatcgcgtgagtgctccgcaaatggcggaaaatgagacacctgaaatggttgagcccgatcaagaggaccaaagggattccctggcacaggaaattcgtcaggatgcccaggccgaggctctgatggagactcaaacagagtcccccaactacgatgatagtgaatcactagccgccaaaaaacgacgcaaacgcaagcgcaaggatcgcaacaagcgaaaggacgaggtggaatccgaaacggatcagcccgatcctgcgccggaggacgagacaatacagcggtacaatgtgggtcctggactgaacgtcagtctggacatgagcaacgatatagtgcatgtgaaactggatggcgagaatctcaaggagatcattggagctcgctggttaaccttagataatagtgaagaaggtcgcggcaagaagtacgacatgatcaccaaagtcttaccactcttcattctccccttcctcatccaatcggccattgttccatttctggtcaccaagctgaaactgctcctggtcaaatcgattcttgtgggcaagctggccatcttcctgctgatcatctcggccatcaagaatggcaacaagatggtccagagctacgaagtgccctcctactgggccggcgaaccaagtcggagatcggagttggccgccgctgcttcctcggcagctgccgcatacaatggctatcgggtggagggtaagccaaccacctggatcagctaggcggtctcacatggctataagtttcggttctaggcttttagtgtttccaaataaacatatacacaaatcgg

SEQ ID NO: 41790 - protein, 332 aa, DROSOPHILA
MSDLVRFLLLSVLCSSLALAQASSSDGNQETSTVSQEAARGLASSYEPEDKQALRKNSHIFMGIYKNYKSTYLGNKTTSEYKKRLRDRVSAPQMAENETPEMVEPDQEDQRDSLAQEIRQDAQAEALMETQTESPNYDDSESLAAKKRRKRKRKDRNKRKDEVESETDQPDPAPEDETIQRYNVGPGLNVSLDMSNDIVHVKLDGENLKEIIGARWLTLDNSEEGRGKKYDMITKVLPLFILPFLIQSAIVPFLVTKLKLLLVKSILVGKLAIFLLIISAIKNGNKMVQSYEVPSYWAGEPSRRSELAAAASSAAAAYNGYRVEGKPTTWIS

SEQ ID NO: 41791 - DNA, 3493 bp, DROSOPHILA
cgcagccgtttgttgctcctttttcttacctggtggtgatgatgatgatggtgatggctggagctttctaatatcacctcttctttcacaacatcctcggccagcgcggccagatctttcctattcaggtgcagctcggtggaggagtcaacctgttccatagtattgttatgccagttcactttcacttattctgcggtccaacgatagtaatgcacttgaattgttcatcggattaccacttgcaattggattattgcgatatatgtatattattcgacgtctaccgagacgacggacggtctgttgttgttgttgttgttgctgccgccgcgatccgcgtttttttcagcgctcaccacgacttacatgcgaattgcgcgcaggtcgcgttcaagttgcattgccctatttacagctggtggttcattgcaatttacattttttaagcttaaactttactaatttactaaaaaagttgatatcctcctcttcttcctcatgataactagagttgtcatgcgcgttgcagctatcgcccgctatcggcactatcgatagtcgtgattcgtgctcgctatctgtgccccatctctggtttttaaatatcggaaagtttacagctatatatcttgcatattaaattaagatttctgagaattacaattttaaagatttccttatgacttgatcttaaaactcaaaatcacaccgaatttggttttaccattattactctaaacattttcgcttgtttattaataggatatattgatgttatgaaaacaagaacgatttattactttcaaggaaaagttttaaattcatgagaagaataaactatgctgcttgtgttggaactacacagtgtttcatctctaacatacatttcgatatatccaattggacagctagttcagaaaacggtcactctagcaatataatggtaactatctgatgatccaaaataataataaatagtaaaactgaatgcttacaggccgatgtggatgtgtttataagtaattatacaatcatcgatccagaaatttaccagctatggatcgaaggcttctcctgtaagttttcttctcccaattgcaatcttgtttcatgtcaaacggctccatcgatttacaattatagccagcgaggcggtgtcctatctgaaacagaagggttttggtcactccatgggcgctcccagcgacctgattgcatcggatgtactggatcattaccgcacctattccctgattgaactatacctaaacgcacccaccaaactgatggagcaatcctgcttccagctggagccacaaatgcgtgaccttatcaccgagaagtactattccatcgatgatgtggtggctcgcgaaattcttggcaagaagctgtcgtcccgctaccgcaaggacctcgacgaggtggccgagaagacgtgcgtcaagctaaaatcagttcggtgggtaaatttggccgctacttaggcagagtagagtctaatatatttcaacttcttcttcagccgacaatttgacaacgtaaaacgcatttttaaggcagtcgaggaaatgccgggcacgttaaccaacaacatcaagcaacacttcatcatatccaccgatctagccaagtatgaatataatcaatgtattgaacttcaaaaagctaaacctttcactcttacagaaagtacgcctgcattgttttcctggcctgcctgcgtttcgaaaccaccaaaaaaaagttgcaatacctgagcttcagtgatttgttgacctgctcccatgccatcatgatctactggacgtatacttaccaggtatgacttagctctgctaattccttacgaaactaatttactaaatgcagcacactggaccggagtactatgataccgaaatggacaaagagtttctcttggacctgcgggagttgcgctgtctactcgacaaggaaaaggagattaagcagtgagatttatttttctaccgcacacgagctattatatagtttagtccttgcatttagcctcgtctgcatgcgcctcaaacccgttcttctcgagcgcgcctttcacgaactggatggcaactttcggtaaggacttatttctcgacattatcaccttttcttactattgatctgttttgatttgcagttcttactggcgcgccctgatcaccatcgcctgcaatttgcatcgcaatcgggagctgcgcgatcttttcgtcgatctctgtgagaagcttattgatccttggcgtcagaatggctggaaccgtgagcaagtgaataaatttttggcttccataacgcaaagcgttttggatctggaaatatcaaggtgggtacttttgtctagattaatcaagtaacttttttgataatcaactctaaatgttttgcagggaccaagaaaccagatgtctttgggatcgctatatgcaggtcataacgatatgcttggataaaatgtatcacatttaagatgtgattaaactaaggatcaaatataaatagtatttaattgtttgtttgtgtttgtttcgacttgtgttgatttttactcagattgtctagccaaagtaaaataatgaaaattgattcatatgagtttcatatttaaatatttaaataccgttgttaattggcgccaaatggtatttttaagcgaaaagcttgtttcccttggtattcttccgaaagttgctggtatattttgcagccacgttcacactgcagcttcgaagctgaagatgcaggaaaagcttgcaacaaattgtcggcctgcacaaacttccgttttaaatgttattattgggacgttgatgctagtcgatgttagtaaacaaacaaaagggaggtcttcgtcggaaagggcttaatttttcataagcaaacgtcaccgattggcgatggaagttcaggagttctggtgagtttcactggaaaagtgcattgcaaattacatacacattgcataaaaacgagctgtaagtgtgtgcgttaagcacccacacgaacgcacaatcgcgaaaacgagcacacacacgctcatacaagttggccaggtgtgcgtgtgggtgtgaagggaagaggaagcaacagttgacgcccgttacacgggaaatccacactggttgattaaatatcggggttgttttctaattcaccatttgttgttttcgatttagcgaaaatatggaggagatcgaagatgaaaactacgacgaggagaagtcagctagaacctcggatgaaaatcgcaagtacggaaaacattattcaggcttaactaattccatatccatttattcgacttcaagactaataatgattatttcggaaaagttaattggtcttttcaatcagattcctgcatccatatgcatttataattttaacgttatatcatttattttaattaggcaaaatcacagcgagatcgagaagcggcgtcgggacaagatgaacacgtacatcaacg

SEQ ID NO: 41792 - DNA, 1027 bp, DROSOPHILA
gccgatgtggatgtgtttataagtaattatacaatcatcgatccagaaatttaccagctatggatcgaaggcttctcctatgggcgctcccagcgacctgattgcatcggatgtactggatcattaccgcacctattccctgattgaactatacctaaacgcacccaccaaactgatggagcaatcctgcttccagctggagccacaaatgcgtgaccttatcaccgagaagtactattccatcgatgatgtggtggctcgcgaaattcttggcaagaagctgtcgtcccgctaccgcaaggacctcgacgaggtggccgagaagacgtgcgtcaagctaaaatcagttcgccgacaatttgacaacgtaaaacgcatttttaaggcagtcgaggaaatgccgggcacgttaaccaacaacatcaagcaacacttcatcatatccaccgatctagccaaaaagtacgcctgcattgttttcctggcctgcctgcgtttcgaaaccaccaaaaaaaagttgcaatacctgagcttcagtgatttgttgacctgctcccatgccatcatgatctactggacgtatacttaccagcacactggaccggagtactatgataccgaaatggacaaagagtttctcttggacctgcgggagttgcgctgtctactcgacaaggaaaaggagattaagcacctcgtctgcatgcgcctcaaacccgttcttctcgagcgcgcctttcacgaactggatggcaactttcgttcttactggcgcgccctgatcaccatcgcctgcaatttgcatcgcaatcgggagctgcgcgatcttttcgtcgatctctgtgagaagcttattgatccttggcgtcagaatggctggaaccgtgagcaagtgaataaatttttggcttccataacgcaaagcgttttggatctggaaatatcaagggaccaagaaaccagatgtctttgggatcgctatatgcaggtcataacgatatgcttggataaaatgtatcacatttaa

SEQ ID NO: 41793 - protein, 315 aa, DROSOPHILA
MGAPSDLIASDVLDHYRTYSLIELYLNAPTKLMEQSCFQLEPQMRDLITEKYYSIDDVVAREILGKKLSSRYRKDLDEVAEKTCVKLKSVRRQFDNVKRIFKAVEEMPGTLTNNIKQHFIISTDLAKKYACIVFLACLRFETTKKKLQYLSFSDLLTCSHAIMIYWTYTYQHTGPEYYDTEMDKEFLLDLRELRCLLDKEKEIKHLVCMRLKPVLLERAFHELDGNFRSYWRALITIACNLHRNRELRDLFVDLCEKLIDPWRQNGWNREQVNKFLASITQSVLDLEISRDQETRCLWDRYMQVITICLDKMYHI

SEQ ID NO: 41794 - DNA, 6120 bp, DROSOPHILA
atagacatgaatttacagatcaattgtgtctggttgacacttttgataactctcaattcagaagcggatcgttaaagtcacgcaatattactatactcaaagttgttgcagaaagtgttgcggacagtgcggtacgtgtatttccattttcaacaattcccattttcaactgtaatgagggtcgcttttttctgttattacgtgaagtagtagtcattaaaaggcaagaatgtcacaatttgctccaataaaagttattggccaataaacgaataaaatagttaccccagaccctaagcatgattgttttaaagctctttatttatgatgaaggactttcttaagttaggaatgattcataggcaacatacaaaatacatgatatgataatacgagtagaataagatataaagtaagttgtatgtagatttaattgatcgaaattatgcgcgcacgtcatgacataagtaattttcatttccgttttttgaaaaatagtcatcaagacgtttttaatgatttctgtaaagattaaaacaaccatagagatgcatttttgcgatataaaacttatacttaagttttattcaagaacactttcactttttcgccaatcaataataagctatttaagtaatgtgttaatggaacttaaagaaattcctagtaattactatctttaattgaaagtaagatttgttgttggtaacagggtcaactgctgaccatttcatacgatcccacagtgggccgatatcaaaatcaaggcccaagggtagcagactctctcataaggaatggtattcgtatttgtatttgttgctctgcttccagataagattgaaaaagtgcctatgagcaccaagagataaggcacacttttgcttttgcgataacgcaccatcgcaatttcaggcaatcaattaatgagccagctgatatcgccgattcccattccctttgggccagccaacgtcagttagttggagttggaattcgattcacagcgggtcgagagttgtagatcgggtcgagaaaaaagagcaaataaataaataaagagcacagtgggcagcacacaaggtaaccaatccatcggttcttctaagcccgtaaatcaacataccaacgatatgtctcagacatctgtatcttaggatctgatgtcatgccagtgaaagcaataaataaatctcgaaacacggcggtaaataattgacccacaatcacggcctaaaaatacgcgattaactcttatattcgagtccttatgtaataagctgccattaacgattgcttcatgagcgaagaatttcctggcttgtgataactgcaaaacagaaataaagtaacgccagcaaactgaaaaagcaaagcaatcgcaaacacagtgccaattgcgtttatctaatcggacaggtagctaccacacaggtgaaataggtactctcctatgtacatatgtacacctatgtacttctaaatgcaaaggtatctaatggtagccatctatctgattcgcattgcccattgggaatcaatagtttaccagaacgctttgattacacaccgccgcaatggtcaaagcaggcaataggaccctgaaatacttccgacccatttcggtcaagtatgggtaaatatcaaatatcaagcgtgatagacaggaggctatctcatagattgaagcattgccaacacctgtctatcatatacccgtatacttaaagtgccactttggaaattttcggtgttttactgtttatgttagcataacattcaaacaaagagatcttttcgtccttgatctgcatttatagtgtaaaagatgcagaacaagatagaaaattctttactattgaactattaaagtttaacctattttccttgtattaaaaagtgtaagagcaactattactcatcgtcaattacctctatgtcatgcattagttgcaatgtagtgttatcaacaaaacaaaaagaagggcaaagaattgcgcagttcatattctacaatatgtgcgcctgaatgccaaactttacatggaaacaaccaataagtgataaaaaaaaaaaaaactatagttatttggaatgcccatttccctatttctcaggatgccacaaaacggctacgaaaatggagtccctggcgggaatcaggcaaatgggcactacgacgaggtcaagcccacctatgccctggagcacttggccacctttaagctgaagaacgaggctgaggtcaagcagccgaaggagaagatgaagcttctggtcgaattggaaaagaccgggggcatttggccgcacaagatgttcatgagcttcaatgggcagtggctggtgatgctggacagtgatatgaaggagattgagaactttccggggagcctgatcacggagcccacggcttttataagcgatcatccgcaggagtcattcaacaatatcctcattttctcagtgcccggaatctcactgggcaataccgaaatgcacatcttccaggtgagcagccacgatttttcagcactttgagatctgtaataattagatcattaataggtggccgatgtcagttccgtgctcttggttgaggatctaaagacggtgagttgagttgaataaatagatccccgatctatataatcccaataccacgatttctcagctaagcaagggaacccctgtgacagtggatcgcaacaagacgcccatcctgctgcccaagccggagaggccgcagaaccagcaggccaaggatcagtatggaatagcagctgctgtggccggaatagcagccgagaagaatgccatagacaaggagcagaccgagagggatgtccaggtgataaaccactgcttcgaggacatcgagcggttcatggcccgtcttcattatgccgccgaggcgcttaacgagctaaagttgcgcaaggaacagcataatccccacggtgagggacttttggtcctgagatcgcgaccaccaatcgagagcgagttccatgacattttggccaaggcgaaactggcccttatatactccgttcggctgcagaaccaattcaccaagcccgccgatccggtgcacaatgtcttcatatcgcttaaatccatcgtcacggtttgcaacgatatctacgtggatgcgggtctgccgcaggcggtacttaatcccctcctgcgccgtgagaccattgccttcctcaatggcaccctcgactccaacgagatgcagctgtggcagagcctcggtcccaactggacggttcccaaggatcagttcaaggatcacaagagctcttatcatccgatcttctacgacgattggtctcccgattgggtggtcgatgaggaggtgccgtacctggctcctgctctaaaaaagagcacaacgccttcgccagtgccggttcccatgcccccgagtccaggtctaggaaatcgcacctggctgagtagattggagagccgaaatgtcaagatcgccgaggttaccttcaataagtcggccaccaacgataaggaactaaaggttacaaagggagagtatttggaggtaagtacctaataataatcgaaaggggttttaatgtcagttcttatcattcagatcttttagccaaatttatcccaatttcaagttcctttaattaagatttgcacaacatttaaaacgacttgcttttttaatcgttcgctgacgtatgaatgtatgtaagaggcaattattttgggttacaatacagttttgtaaatatataggaatgtccacgtgtgagaactgaatgatttgaaatcttataaggcacaggtcttttacttttatattaatcttttgttttggaatgttactgatataaaaaagctttagataagtattggttgtgaagatatgaaaattcattgccggtaatatatatgattcaataattttaaattcaggcatttgagatgtcttaccaatgagaggtcagtaacactatatcaatacaaaaactttgaatgcaattactaaacattgattatatttttaactttataccatgtttactatacatggtaccaatcttatcgattccccaattacgcgatcttaccttcatatcaccatgataacagaccttataataactatcatataaatcgtctgattccaagattatcgatgactcccgcaactggtggaaggcccgtaactcgtacggaaacattggctacgtgccgcacacagtgctcacgccgtacaactttgagcccggagtaaatggccgggacacggagtcgctggcctcaatggctttgacggagaacggcggcgaggaggccattcctcctccgctgtaccgcaacacaatggccatgtataccgctcccgtggagcagccggcggccaatggcaaggccatgcagcgcaccttctcgatgcccaacgtgcccgttccaccaccgatgcctccaccgagcgatagccaaacgcccacgcccagtggcacactcaaacgcaacatggcggcggcaggagcactagcaggtgggtacactagtaaattaaaaaaaataatacaatataataatgatatttgtatttatctcattcgcttaccagccatgcgggcccgcaatgattgcgaggcagatgatcagctctactacatgcagggcgacgtgcatgatgaactgcgtctactgcagcagcagcgagagaggcgcaaggacctcgagatccttaagacgccggaaatcttcatcacccagaattcaaagccaagcgaggtggaggagtggctgcggggcaagggattctcggacatcattatcaaacgattgcacacgctatccggcgaggagatcttcgccctatcaccgcacaccatcgaaagttactttggccggcgggagagtcgccgcctcatttcccagatcgtgctgcaaaagaatttctgcgaggtgagttcttggacatatcctcaccttatctaatctaatcgaatccattccaatatccaattttgcagtacaaaaccattcgatcatcggagctttctgccaaactggcacgtgctcgccaaaaggccgatcagtccaatggcaatcccaacgaggtcttctaagactcccagtatcccgagttttttagccggagaccagagagacaaaaatgcttcagatgccattaatttatttatgtgtaataatccttcatttatgttaaacagtgttcatacgtatattaaaaaaaaaaaaagacaaaaatgggtttgatttatatgcatttagtgttaacatctcgaattgattataaatgtaatatagatactttatttaaacacaaatatttatgaagtgaagaaatcatatgatttcctgtttagaaacttaacttccctaaactcaaaagtggtatggcatgattaattaggcaagaatatgtttatcattacaggaaactttgagaactggttatggaacagtcctaatgaaacgcttattggttaacccagataccttatatgtcgaactccagttcgaattgcagacttcaatcaaaagacttacgaaatagccgaaatgaattggttttttcaataaacacgatgttcaatgttatgaagaagtaatagacgtcgattaagagtaataagtgataatcttcataaattctgcttcgtgagtgcatcctaaaagtcaagtaagtgggcgtttcaaaccggtaggggcgtggcgtgttatttaccttttttgtgaacacattgcgggggaaataagtatttgaaaatgtaagtcacgcgtctgttcaccagacaaatcggatttgtgaagtcacatgtttcaaggctccaaccggtctcttgttagcctggttatttggctaaacatatgtagcttcacgtgtacttactgtctaaaacattagaaatacaacatttgttcgatacagatacagaaacagtttcggaattttgatttttcgagtttgtccagttacaagcgatgaccaattgtttcgctttctgcggcggttttgccaattagaacgaattaattttgcaattacgcgaaacgcacaaaacaggtccatgggttatttgggtttaagagtcgatcaaattg

SEQ ID NO: 41795 - DNA, 2232 bp, DROSOPHILA
ttcacagcgggtcgagagttgtagatcgggtcgagaaaaaagagcaaataaataaataaagagcacagtgggcagcacacaaggaggatgccacaaaacggctacgaaaatggagtccctggcgggaatcaggcaaatgggcactacgacgaggtcaagcccacctatgccctggagcacttggccacctttaagctgaagaacgaggctgaggtcaagcagccgaaggagaagatgaagcttctggtcgaattggaaaagaccgggggcatttggccgcacaagatgttcatgagcttcaatgggcagtggctggtgatgctggacagtgatatgaaggagattgagaactttccggggagcctgatcacggagcccacggcttttataagcgatcatccgcaggagtcattcaacaatatcctcattttctcagtgcccggaatctcactgggcaataccgaaatgcacatcttccaggtggtggccgatgtcagttccgtgctcttggttgaggatctaaagacgctaagcaagggaacccctgtgacagtggatcgcaacaagacgcccatcctgctgcccaagccggagaggccgcagaaccagcaggccaaggatcagtatggaatagcagctgctgtggccggaatagcagccgagaagaatgccatagacaaggagcagaccgagagggatgtccaggtgataaaccactgcttcgaggacatcgagcggttcatggcccgtcttcattatgccgccgaggcgcttaacgagctaaagttgcgcaaggaacagcataatccccacggtgagggacttttggtcctgagatcgcgaccaccaatcgagagcgagttccatgacattttggccaaggcgaaactggcccttatatactccgttcggctgcagaaccaattcaccaagcccgccgatccggtgcacaatgtcttcatatcgcttaaatccatcgtcacggtttgcaacgatatctacgtggatgcgggtctgccgcaggcggtacttaatcccctcctgcgccgtgagaccattgccttcctcaatggcaccctcgactccaacgagatgcagctgtggcagagcctcggtcccaactggacggttcccaaggatcagttcaaggatcacaagagctcttatcatccgatcttctacgacgattggtctcccgattgggtggtcgatgaggaggtgccgtacctggctcctgctctaaaaaagagcacaacgccttcgccagtgccggttcccatgcccccgagtccaggtctaggaaatcgcacctggctgagtagattggagagccgaaatgtcaagatcgccgaggttaccttcaataagtcggccaccaacgataaggaactaaaggttacaaagggagagtatttggaggtaattatcgatgactcccgcaactggtggaaggcccgtaactcgtacggaaacattggctacgtgccgcacacagtgctcacgccgtacaactttgagcccggagtaaatggccgggacacggagtcgctggcctcaatggctttgacggagaacggcggcgaggaggccattcctcctccgctgtaccgcaacacaatggccatgtataccgctcccgtggagcagccggcggccaatggcaaggccatgcagcgcaccttctcgatgcccaacgtgcccgttccaccaccgatgcctccaccgagcgatagccaaacgcccacgcccagtggcacactcaaacgcaacatggcggcggcaggagcactagcagccatgcgggcccgcaatgattgcgaggcagatgatcagctctactacatgcagggcgacgtgcatgatgaactgcgtctactgcagcagcagcgagagaggcgcaaggacctcgagatccttaagacgccggaaatcttcatcacccagaattcaaagccaagcgaggtggaggagtggctgcggggcaagggattctcggacatcattatcaaacgattgcacacgctatccggcgaggagatcttcgccctatcaccgcacaccatcgaaagttactttggccggcgggagagtcgccgcctcatttcccagatcgtgctgcaaaagaatttctgcgagtacaaaaccattcgatcatcggagctttctgccaaactggcacgtgctcgccaaaaggccgatcagtccaatggcaatcccaacgaggtcttctaa

SEQ ID NO: 41796 - protein, 714 aa, DROSOPHILA
MPQNGYENGVPGGNQANGHYDEVKPTYALEHLATFKLKNEAEVKQPKEKMKLLVELEKTGGIWPHKMFMSFNGQWLVMLDSDMKEIENFPGSLITEPTAFISDHPQESFNNILIFSVPGISLGNTEMHIFQVVADVSSVLLVEDLKTLSKGTPVTVDRNKTPILLPKPERPQNQQAKDQYGIAAAVAGIAAEKNAIDKEQTERDVQVINHCFEDIERFMARLHYAAEALNELKLRKEQHNPHGEGLLVLRSRPPIESEFHDILAKAKLALIYSVRLQNQFTKPADPVHNVFISLKSIVTVCNDIYVDAGLPQAVLNPLLRRETIAFLNGTLDSNEMQLWQSLGPNWTVPKDQFKDHKSSYHPIFYDDWSPDWVVDEEVPYLAPALKKSTTPSPVPVPMPPSPGLGNRTWLSRLESRNVKIAEVTFNKSATNDKELKVTKGEYLEVIIDDSRNWWKARNSYGNIGYVPHTVLTPYNFEPGVNGRDTESLASMALTENGGEEAIPPPLYRNTMAMYTAPVEQPAANGKAMQRTFSMPNVPVPPPMPPPSDSQTPTPSGTLKRNMAAAGALAAMRARNDCEADDQLYYMQGDVHDELRLLQQQRERRKDLEILKTPEIFITQNSKPSEVEEWLRGKGFSDIIIKRLHTLSGEEIFALSPHTIESYFGRRESRRLISQIVLQKNFCEYKTIRSSELSAKLARARQKADQSNGNPNEVF

SEQ ID NO: 41797 - DNA, 6300 bp, DROSOPHILA
tatgcgtggtagggatctccgccatttaagaagttaaactttggattgcccagctcattttggcggatgcgcgcctcgaattccggtccattgcgagccacaaaactggcggtcttgtcaacgatatctaatagttaaagctttgataactgagtatgggaaacgctaaatgtgtattaaatgaatgtattttgagtaaaaaatggctaaattgagaaaaaagtttgttttctttttggcaaaggatgcttctaacttccggcggcggatagataatcccaatgattggacccgacatcgacttgggctgatcattgccgaactgctcctcgttggcttccgcgtctaaagttgccatggctggtgaaatcgtcctcttttattgataaaatctgattgctttttgagaaatgagaaaacgcttgtttagccgaaaattagaggtggaaggaatagggatggaacaatcgttggactgttgccaccgccatcgatagttttcttacattcatgtagtaatgttagggtgactcaataaacgaactagtttcaagccggaactagtgaaccactggctcagcctatcgattaatttggcgctggatttaaacaatctgtcggacaaaccatcaactcaggcgttaataatggcttataaaatctttacatatatatcagtagatggacggacaaaggcgtgggcagaactgaaccccacggatgaggtctttatttgcatattatgttagtgttggtacggctttgtacgggtggcttgattcaccaagccaaaacaaaaataacatttgtttacgtttgtacgactttattcattcgctgagagagtctgctgccagcacgatagccagatgatgatgatgatgattatccagatgatgaggttcccttgtgcgtgataacgacccgactcattctcattctcatcgactcgattctgtcgagatttgcccccaagctcagtagtctacgaatcgctgagccgtcgacacggtttaattggactgaaagcgcggattaggtccgatagagtcgcagttcggatcacttccttatcacaagctagcgacgtgacttaaatcccattgacgtgcgggtattttgtgaatcacaaccggtggctgaaaaatccgagttctagaacaaagacactgcaatgggtggaattcagtacatctgcctgctggctttcataataggagcatcattattgacaacaatcgatgctaattgtgagtccgctagcagtatttaaattaaactctgtgtttatagagacattttggtgtcaagtatctcattctcgtgctaatttcttttaagagagcacagtcttcttcgtgtagaaaagtagaccaaatagagggaaacctattaattttatagcttgttattcggtttattatgataataaaaactttattgaagtatataaatatttaattgataaagcagaaagacattcgtaaagcggaggctggtcgtctcacagcgataaatttccacaatcactacgcactatttagcctgtaattaagtacaagtattaaaaatatatacagaaatgggaaactgttttattgatcaatgtaaaatgtactttccactttctgcgagtgctcaagcgttatatcatcatgaatgactgcattggtttttaccaggttttcacatttgtttattgtaataaacattactaaattgttacattcaaaaaaccccatttgcatatacttgttgataaagattccaataaattccaaaagctcaccccaaggttcgcatatatgagggcttatcgctgaataagaattcccaatcaacaattgtttactgatcggatccaaatagatttctataagcgtgagaaataattgatgtttatttttcgagtaagatgcagagatatttcacttgaattagcatactgtattcaggtaaatatctctttaatagggtattcacactttcaataacaatacgactgcatagaaaccattcacaaaaggccattttttatgattgtatcgttacctttgatatagtacttttaaattgtcttgattaatgtgttgacaagacaatttgtggaatattccagaacaattcaattataccgtagatataaatcatgttttctttaaatgagtcaatttacttaaaacggcgcctagaaattgagattcccaagagaaatgatgataatgaaaattataaattaaactacccatctgaataaacttaaatttaaccaattcatttgtatcattttatgaatcttcagcgagccgagatgttaatgccgaattaaacaggattcctgcttcgaaatggttgcaatatgtagaaacggcgttggactcagtaaataggcaaaagcggtttgtacaactgattactttgaaaaccagttaactttaatgacttacgctgatatgtttaggatgtgacacttttctgctgaacttggtgcgcgacttatatttccgtattcgggcttaaatttaaacattatattttacataatattacttaaccattttttcagactggaggacaatctattaggttccgatatcactgttaagaacggcagcctttcacacgctcaacttctggatactttaccaagcctagcttcgaagaaggacaataagctcgccctgaagatccttaagtccagcttgctcgttttcaacagcgaatgcctgcctaataatatcgatggagacaagtgccgcagttacctggagcaaaaaccacttccggagggcagtagcttgcgaactgagtgtgagaactcactcaagggaaatcgagagggtcactatgctttcagaaggctacttgggagcagccactacaggaacggtttctatcaggtgcgatccgctcagaaaaacaggatgtagaagatgaattaaatggtttatatggtatttttagatgtttcccaattccggaagacgcgaaacagtgccggctgcgtggtccattagtaaggagctgtatgagcccgatcacattcagatctccaaacaacaaaccttcgaaagcaattccaatttggccctccctcagtgggctcaatttgtggagcatgatcttagcaagccggtgtcgcaatcaatgagtgagtttcatatgatgacctcttccttttgtacttaacatacttaaaaccaaagtatatcaatttatatatttatattgttaaaattgtttcaattaacgatttctccgttcccaggcaatggagccccaatagagtgctgcagccgtgaccagatcaaccttcagccgcgtcaccaccacccggcatgtgctccgattctgtaccagcccggtgggaaatacgacgtgcccagctgccttaactatgtgcgaagtgctctggccgtggctgattgcaatttcggtggcgccgaacaagtaagaagaattcaattgtgaaaaaccatgtaaaaatatcactgattgcttacttctattatatgtatgtagctcaaccaggccacggggtccttggatctatcgcaactctatggtttcaccgcagcggcggagagaaagttgcgtgttctcgagggcggtttgttaaggtcaactcctcgtggagaattcgacaacgccctcctgcccatcgccaccgatacggaaggaccatcgttctgcgccagggcaacaattggtgatggcacctgctttgctgccggagattcgcgggtgaatagcagtccgttctccatactgatctacacgatcttcatgcgcaatcacaacaaagtggctgccgagctgaagcaaaggaatccccggtggagcgatgaaaagctcttccaagctgccaaggcagtcaatgtggatatatatcgtcgagtggtcattgaggagtggctgccagaggtgctcggccagaagatgtccagtgagattaggagaaaacagcctaatcgtgctttggaggtctccaatgagtttgcggtggctgccattcgattttacttctctatgctgcccaatgagctcctaaatctgaccaaggataacgtagtctacggtactgagaagtgagtgtcacaatctgatgaagaataaattaagaaattcatttccatataaattactaatacgacaagttggccagaatctttaaacttttaataacatttaactttcttacagaaacaaccaatatgtgtttattagcaaggagctaccaactaaaaacctttttgagctcaaggaagaaatctacaaaccaaagttgcagtacacttcccaaaagttgaataacatccttgagagtttgctcaatcaggagaccatgaagatggacgctgcctactccggtggtgtaagccaaatgattttgatattttatagcttctgaaattcattttttaactaacaggtcgtctggcacaaggacaccaagccaacccatgccgatattttggccttcgatatccaaagggggagagatcacggtctgctgccatattatcggtacttggaatcgtgtgtgttgtccagacccgtagaaagctggaaagattttgagcatttcattcccagtgatgtaggtcttttatttatttattatttatattttaatttttttttaatataattttaaaatattcattcaacaaggtcttggataagctgaaaacaatatacgccagttgggctgatgtggacctcattgtgggtggtatttcggagaatcctgttcatggatccattggccccaccttcagttgcattatctgtatgagttatactgctagcaaatgtatatatatcactcaattacttttcttatagctgagcaattcgtacatgttctgaaacaaaaccagcaaaaagctgtccaaaaacacactgaactggtggagcaatatcgccacttcaatggaaccaaactcctttgcctgaattccggcctttcagctgttccccagaatatcttccagttgccatcggccaggttagtattggaaaaaaaatcataatagatcacctgtcactcgcttgagtcacagtccgtacacaatttgattcacatttgatattatactgagtactggagtgataagctcagcaaccaaaattatctacaaccttaatgattgttttttctttcgcgtttccttacagaaatcaaatggtctcttgtgaagacgtctagaggttgacaaaacaacgctgctcacatttaagattgtttccaaaccaaaaaaaaatatatataagagtcaaaactcattaaatacctcaatcttgattcttattatcttattgctatattggttgttaactatacgttttgtctaagggaacatcgaattacaggtagaattacatgacatagacatgaatttacagatcaattgtgtctggttgacacttttgataactctcaattcagaagcggatcgttaaagtcacgcaatattactatactcaaagttgttgcagaaagtgttgcggacagtgcggtacgtgtatttccattttcaacaattcccattttcaactgtaatgagggtcgcttttttctgttattacgtgaagtagtagtcattaaaaggcaagaatgtcacaatttgctccaataaaagttattggccaataaacgaataaaatagttaccccagaccctaagcatgattgttttaaagctctttatttatgatgaaggactttcttaagttaggaatgattcataggcaacatacaaaatacatgatatgataatacgagtagaataagatataaagtaagttgtatgtagatttaattgatcgaaattatgcgcgcacgtcatgacataagtaattttcatttccgttttttgaaaaatagtcatcaagacgtttttaatgatttctgtaaagattaaaacaaccatagagatgcatttttgcgatataaaacttatacttaagttttattcaagaacactttcactttttcgccaatcaataataagctatttaagtaatgtgttaatggaacttaaagaaattcctagtaattactatctttaattgaaagtaagatttgttgttggtaacagggtcaactgctgaccatttcatacgatcccacagtgggccgatatcaaaatcaaggcccaagggtagcagactctctcataaggaatggtattcgtatttgtatttgttgctctgcttccagataagattgaaaaagtgcctatgagcaccaagagataaggcacacttttgcttttgcgataacgcaccatcgcaa

SEQ ID NO: 41798 - DNA, 2357 bp, DROSOPHILA
ccgtcgacacggtttaattggactgaaagcgcggattaggtccgatagagtcgcagttcggatcacttccttatcacaagctagcgacgtgacttaaatcccattgacgtgcgggtattttgtgaatcacaaccggtggctgaaaaatccgagttctagaacaaagacactgcaatgggtggaattcagtacatctgcctgctggctttcataataggagcatcattattgacaacaatcgatgctaattcgagccgagatgttaatgccgaattaaacaggattcctgcttcgaaatggttgcaatatgtagaaacggcgttggactcagtaaataggcaaaagcggactggaggacaatctattaggttccgatatcactgttaagaacggcagcctttcacacgctcaacttctggatactttaccaagcctagcttcgaagaaggacaataagctcgccctgaagatccttaagtccagcttgctcgttttcaacagcgaatgcctgcctaataatatcgatggagacaagtgccgcagttacctggagcaaaaaccacttccggagggcagtagcttgcgaactgagtgtgagaactcactcaagggaaatcgagagggtcactatgctttcagaaggctacttgggagcagccactacaggaacggtttctatcagatgtttcccaattccggaagacgcgaaacagtgccggctgcgtggtccattagtaaggagctgtatgagcccgatcacattcagatctccaaacaacaaaccttcgaaagcaattccaatttggccctccctcagtgggctcaatttgtggagcatgatcttagcaagccggtgtcgcaatcaatgagcaatggagccccaatagagtgctgcagccgtgaccagatcaaccttcagccgcgtcaccaccacccggcatgtgctccgattctgtaccagcccggtgggaaatacgacgtgcccagctgccttaactatgtgcgaagtgctctggccgtggctgattgcaatttcggtggcgccgaacaactcaaccaggccacggggtccttggatctatcgcaactctatggtttcaccgcagcggcggagagaaagttgcgtgttctcgagggcggtttgttaaggtcaactcctcgtggagaattcgacaacgccctcctgcccatcgccaccgatacggaaggaccatcgttctgcgccagggcaacaattggtgatggcacctgctttgctgccggagattcgcgggtgaatagcagtccgttctccatactgatctacacgatcttcatgcgcaatcacaacaaagtggctgccgagctgaagcaaaggaatccccggtggagcgatgaaaagctcttccaagctgccaaggcagtcaatgtggatatatatcgtcgagtggtcattgaggagtggctgccagaggtgctcggccagaagatgtccagtgagattaggagaaaacagcctaatcgtgctttggaggtctccaatgagtttgcggtggctgccattcgattttacttctctatgctgcccaatgagctcctaaatctgaccaaggataacgtagtctacggtactgagaaaaacaaccaatatgtgtttattagcaaggagctaccaactaaaaacctttttgagctcaaggaagaaatctacaaaccaaagttgcagtacacttcccaaaagttgaataacatccttgagagtttgctcaatcaggagaccatgaagatggacgctgcctactccggtggtgtcgtctggcacaaggacaccaagccaacccatgccgatattttggccttcgatatccaaagggggagagatcacggtctgctgccatattatcggtacttggaatcgtgtgtgttgtccagacccgtagaaagctggaaagattttgagcatttcattcccagtgatgtcttggataagctgaaaacaatatacgccagttgggctgatgtggacctcattgtgggtggtatttcggagaatcctgttcatggatccattggccccaccttcagttgcattatctctgagcaattcgtacatgttctgaaacaaaaccagcaaaaagctgtccaaaaacacactgaactggtggagcaatatcgccacttcaatggaaccaaactcctttgcctgaattccggcctttcagctgttccccagaatatcttccagttgccatcggccagaaatcaaatggtctcttgtgaagacgtctagaggttgacaaaacaacgctgctcacatttaagattgtttccaaaccaaaaaaaaatatatataagagtcaaaactcattaaatacctc

SEQ ID NO: 41799 - protein, 528 aa, DROSOPHILA
MFPNSGRRETVPAAWSISKELYEPDHIQISKQQTFESNSNLALPQWAQFVEHDLSKPVSQSMSNGAPIECCSRDQINLQPRHHHPACAPILYQPGGKYDVPSCLNYVRSALAVADCNFGGAEQLNQATGSLDLSQLYGFTAAAERKLRVLEGGLLRSTPRGEFDNALLPIATDTEGPSFCARATIGDGTCFAAGDSRVNSSPFSILIYTIFMRNHNKVAAELKQRNPRWSDEKLFQAAKAVNVDIYRRVVIEEWLPEVLGQKMSSEIRRKQPNRALEVSNEFAVAAIRFYFSMLPNELLNLTKDNVVYGTEKNNQYVFISKELPTKNLFELKEEIYKPKLQYTSQKLNNILESLLNQETMKMDAAYSGGVVWHKDTKPTHADILAFDIQRGRDHGLLPYYRYLESCVLSRPVESWKDFEHFIPSDVLDKLKTIYASWADVDLIVGGISENPVHGSIGPTFSCIISEQFVHVLKQNQQKAVQKHTELVEQYRHFNGTKLLCLNSGLSAVPQNIFQLPSARNQMVSCEDV

SEQ ID NO: 41800 - DNA, 4107 bp, DROSOPHILA
ccaggtatgacttagctctgctaattccttacgaaactaatttactaaatgcagcacactggaccggagtactatgataccgaaatggacaaagagtttctcttggacctgcgggagttgcgctgtctactcgacaaggaaaaggagattaagcagtgagatttatttttctaccgcacacgagctattatatagtttagtccttgcatttagcctcgtctgcatgcgcctcaaacccgttcttctcgagcgcgcctttcacgaactggatggcaactttcggtaaggacttatttctcgacattatcaccttttcttactattgatctgttttgatttgcagttcttactggcgcgccctgatcaccatcgcctgcaatttgcatcgcaatcgggagctgcgcgatcttttcgtcgatctctgtgagaagcttattgatccttggcgtcagaatggctggaaccgtgagcaagtgaataaatttttggcttccataacgcaaagcgttttggatctggaaatatcaaggtgggtacttttgtctagattaatcaagtaacttttttgataatcaactctaaatgttttgcagggaccaagaaaccagatgtctttgggatcgctatatgcaggtcataacgatatgcttggataaaatgtatcacatttaagatgtgattaaactaaggatcaaatataaatagtatttaattgtttgtttgtgtttgtttcgacttgtgttgatttttactcagattgtctagccaaagtaaaataatgaaaattgattcatatgagtttcatatttaaatatttaaataccgttgttaattggcgccaaatggtatttttaagcgaaaagcttgtttcccttggtattcttccgaaagttgctggtatattttgcagccacgttcacactgcagcttcgaagctgaagatgcaggaaaagcttgcaacaaattgtcggcctgcacaaacttccgttttaaatgttattattgggacgttgatgctagtcgatgttagtaaacaaacaaaagggaggtcttcgtcggaaagggcttaatttttcataagcaaacgtcaccgattggcgatggaagttcaggagttctggtgagtttcactggaaaagtgcattgcaaattacatacacattgcataaaaacgagctgtaagtgtgtgcgttaagcacccacacgaacgcacaatcgcgaaaacgagcacacacacgctcatacaagttggccaggtgtgcgtgtgggtgtgaagggaagaggaagcaacagttgacgcccgttacacgggaaatccacactggttgattaaatatcggggttgttttctaattcaccatttgttgttttcgatttagcgaaaatatggaggagatcgaagatgaaaactacgacgaggagaagtcagctagaacctcggatgaaaatcgcaagtacggaaaacattattcaggcttaactaattccatatccatttattcgacttcaagactaataatgattatttcggaaaagttaattggtcttttcaatcagattcctgcatccatatgcatttataattttaacgttatatcatttattttaattaggcaaaatcacagcgagatcgagaagcggcgtcgggacaagatgaacacgtacatcaacgagctctcctccatgattcccatgtgctttgcgatgcagcgaaagctggacaaactgactgtgctccggatggcagtgcagcatctgcgagggatccgtggcagcggcagcttacatccattcaacggatccgattaccggcctagcttcctgtccgaccaggagctcaagatgattatcctgcaagcgtcggagggattcctgttcgtggtgggttgtgaccgaggacgcatcctgtacgtttccgattcggtgtccagtgtgctgaacagcacccaagcggacctgctgggacagagctggttcgacgtcctgcatccgaaggacataggcaaggttaaggagcagctatcctcactggaacagtgtcccagggaaaggcttatcgatgcgaagagtaagtggccatgcgaaagtgtgagattcagtacgtcacttaagttttctccttgcgttatcacctgcagccatgttgcccgttaagaccgacgttccacagagcttgtgccgcctgtgtccgggtgcccggcgctccttcttctgccgcatgaagctgcgcactgccagcaacaaccagatcaaggaggagtccgatacgtcctccagctcccggagctccacgaagcgcaagtccagactgactacgggccacaagtaccgggttatccagtgcacgggctacctcaagtcctggacacccatcaaggacgaggaccaggacgccgacagcgacgagcaaacaacgaatctatcctgccttgtggcaattggtcgcattccgcccaacgttcgcaactccacagtacccgcctcgctggacaatcacccgaacatacggcacgtgctcttcatctcgcgccactccggcgagggcaagttcctgttcatagaccagcggtaggtacgattatgggcattaattttctgatgattcgacttaaattatttggcagtgccaccctcgtgattggtttcctgcctcaggagatcctcggcaccagcttctacgagtacttccacaacgaagacatcgctgcgctgatggagtctcacaagatggtgatgcaggtgccggaaaaggtgaccactcaggtctaccgcttccggtgcaaggacaacagctacattcagctgcagagcgagtggcgggccttcaagaatccctggacgagcgagattgactatataatcgccaagaattccgtgttcttataaggcatacgaacgttccgatggggaacattacttttatttattccactacaatccgacatttgtatacactccaaagatcttcatccgcatcgagttgctggcgccggcgtttgaaattccatattcgatatacaaactttacctaatgataagcccatcatttttgtaccgcctcaattaaattaactaacaacttgaaaagagattcgcttagataagaacatttgctatcgtgggaacaatctagttttaccccatcaaggtttcaacatagctctctggcgattggaattgtcgagaagagcggtcgccttcgattacaaacaacaaatagttcttagccgagcacgttttggacgtgatcgctgctcgaatttcttcgggcacataactacttgtggtaaatggtgtggatcatgtgtacatatgtacatatgtacggacatgtgtgtgtttgatttatcaactgagacgggctttttcgcccgtttttcgtttcactcaacttttttgcttgcactatcaatagacccacatgaaaaggcggcagcccaggcgcgtgggtttgtctgggtctgggtataggtctggcatgggtatgggtatgggcatgcctctggctctctcgctcgctggattcgggttcggaatcagttggcatagagctggcgtggcatacggacgctctgacaccttggcttcccaaccagtgaacgttttattggacaaaagccttgcttggacgtcggtctcgtttttcggtggtcttataaatagtatattgaaatgagtgccctcatatttctgtgcgcgattctaattggtttcgtgatttattcactcatcagctcggcgcggcgtcccaagaactttccaccaggtgagttcttctcgtgctgcactttggaaaacttttcctggaatcccaaatgcagataagaagttaaagcgttggtgcacaaacaaacgatggatttgctttaaaattcgtagaataccaattttgtgtatcgtgggtacagtttgcttttgaaaactagccaattaattatatttaatagaagagaagcattattctttgcattaataaccatattattataaaatatatttgtatataggcgaacatacgacctgccccgcgaccaattaattggtgggctcattagcaactcgtaatggtgatcagaggcatctttggccaatcggcggggaaccaga

SEQ ID NO: 41801 - DNA, 1563 bp, DROSOPHILA
tattgggacgttgatgctagtcgatgttagtaaacaaacaaaagggaggtcttcgtcggaaagggcttaatttttcataagcaaacgtcaccgattggcgatggaagttcaggagttctgcgaaaatatggaggagatcgaagatgaaaactacgacgaggagaagtcagctagaacctcggatgaaaatcgcaagcaaaatcacagcgagatcgagaagcggcgtcgggacaagatgaacacgtacatcaacgagctctcctccatgattcccatgtgctttgcgatgcagcgaaagctggacaaactgactgtgctccggatggcagtgcagcatctgcgagggatccgtggcagcggcagcttacatccattcaacggatccgattaccggcctagcttcctgtccgaccaggagctcaagatgattatcctgcaagcgtcggagggattcctgttcgtggtgggttgtgaccgaggacgcatcctgtacgtttccgattcggtgtccagtgtgctgaacagcacccaagcggacctgctgggacagagctggttcgacgtcctgcatccgaaggacataggcaaggttaaggagcagctatcctcactggaacagtgtcccagggaaaggcttatcgatgcgaagaccatgttgcccgttaagaccgacgttccacagagcttgtgccgcctgtgtccgggtgcccggcgctccttcttctgccgcatgaagctgcgcactgccagcaacaaccagatcaaggaggagtccgatacgtcctccagctcccggagctccacgaagcgcaagtccagactgactacgggccacaagtaccgggttatccagtgcacgggctacctcaagtcctggacacccatcaaggacgaggaccaggacgccgacagcgacgagcaaacaacgaatctatcctgccttgtggcaattggtcgcattccgcccaacgttcgcaactccacagtacccgcctcgctggacaatcacccgaacatacggcacgtgctcttcatctcgcgccactccggcgagggcaagttcctgttcatagaccagcgtgccaccctcgtgattggtttcctgcctcaggagatcctcggcaccagcttctacgagtacttccacaacgaagacatcgctgcgctgatggagtctcacaagatggtgatgcaggtgccggaaaaggtgaccactcaggtctaccgcttccggtgcaaggacaacagctacattcagctgcagagcgagtggcgggccttcaagaatccctggacgagcgagattgactatataatcgccaagaattccgtgttcttataaggcatacgaacgttccgatggggaacattacttttatttattccactacaatccgacatttgtatacactccaaagatcttcatccgcatcgagttgctggcgccggcgtttgaaattccatattcgatatacaaactttacctaatgataagcccatcatttttgtaccgcctcaattaaattaactaacaacttgaaaagagattcgcttagataagaa

SEQ ID NO: 41802 - protein, 413 aa, DROSOPHILA
MEVQEFCENMEEIEDENYDEEKSARTSDENRKQNHSEIEKRRRDKMNTYINELSSMIPMCFAMQRKLDKLTVLRMAVQHLRGIRGSGSLHPFNGSDYRPSFLSDQELKMIILQASEGFLFVVGCDRGRILYVSDSVSSVLNSTQADLLGQSWFDVLHPKDIGKVKEQLSSLEQCPRERLIDAKTMLPVKTDVPQSLCRLCPGARRSFFCRMKLRTASNNQIKEESDTSSSSRSSTKRKSRLTTGHKYRVIQCTGYLKSWTPIKDEDQDADSDEQTTNLSCLVAIGRIPPNVRNSTVPASLDNHPNIRHVLFISRHSGEGKFLFIDQRATLVIGFLPQEILGTSFYEYFHNEDIAALMESHKMVMQVPEKVTTQVYRFRCKDNSYIQLQSEWRAFKNPWTSEIDYIIAKNSVFL

SEQ ID NO: 41803 - DNA, 4772 bp, DROSOPHILA
ctgttcatagaccagcggtaggtacgattatgggcattaattttctgatgattcgacttaaattatttggcagtgccaccctcgtgattggtttcctgcctcaggagatcctcggcaccagcttctacgagtacttccacaacgaagacatcgctgcgctgatggagtctcacaagatggtgatgcaggtgccggaaaaggtgaccactcaggtctaccgcttccggtgcaaggacaacagctacattcagctgcagagcgagtggcgggccttcaagaatccctggacgagcgagattgactatataatcgccaagaattccgtgttcttataaggcatacgaacgttccgatggggaacattacttttatttattccactacaatccgacatttgtatacactccaaagatcttcatccgcatcgagttgctggcgccggcgtttgaaattccatattcgatatacaaactttacctaatgataagcccatcatttttgtaccgcctcaattaaattaactaacaacttgaaaagagattcgcttagataagaacatttgctatcgtgggaacaatctagttttaccccatcaaggtttcaacatagctctctggcgattggaattgtcgagaagagcggtcgccttcgattacaaacaacaaatagttcttagccgagcacgttttggacgtgatcgctgctcgaatttcttcgggcacataactacttgtggtaaatggtgtggatcatgtgtacatatgtacatatgtacggacatgtgtgtgtttgatttatcaactgagacgggctttttcgcccgtttttcgtttcactcaacttttttgcttgcactatcaatagacccacatgaaaaggcggcagcccaggcgcgtgggtttgtctgggtctgggtataggtctggcatgggtatgggtatgggcatgcctctggctctctcgctcgctggattcgggttcggaatcagttggcatagagctggcgtggcatacggacgctctgacaccttggcttcccaaccagtgaacgttttattggacaaaagccttgcttggacgtcggtctcgtttttcggtggtcttataaatagtatattgaaatgagtgccctcatatttctgtgcgcgattctaattggtttcgtgatttattcactcatcagctcggcgcggcgtcccaagaactttccaccaggtgagttcttctcgtgctgcactttggaaaacttttcctggaatcccaaatgcagataagaagttaaagcgttggtgcacaaacaaacgatggatttgctttaaaattcgtagaataccaattttgtgtatcgtgggtacagtttgcttttgaaaactagccaattaattatatttaatagaagagaagcattattctttgcattaataaccatattattataaaatatatttgtatataggcgaacatacgacctgccccgcgaccaattaattggtgggctcattagcaactcgtaatggtgatcagaggcatctttggccaatcggcggggaaccagacggcacacgctttgaatgctaatatatcttattgataaaatcgtcacatacttctgacacctggcctaactggtctgaattggccagtaacaagggccgggctgatttattccacttaccaatgcagcttttgatttgcattaggattacgattatgggcgtaatagctgtcattcctgtatataagcacatttttattattattcgcaattgttgcagttcaaaatggtgataaattagtatgcaatttctaagggaatcttattcacctaaagaaaagcggtctcaatttgaccacatataaaagttatgaaattgattttgataacgcattgatagttaataactaagcggtttgatttcaagatagagttttcactttcgtttcggtagttttgcttgctaacagatttcttttgcaggcgattagattagcactttgatacctatgcataggttgaattgattgaattggacggttgtattccatatgaaattctattgctaacaagacaaatatttaaaattagtatcatttttgaatttcattcctaaaacaggacctcgatttgtgccatggttaggaaacacattacaggtaaggctcacaaaagtttcttaaatactattaaaatgagattatttgaatacgaaacagataattgaaacatccaaaatctagattgttctttaatgaaatccaaatcttaaataacgtttcgtcgaaaagggcaagctgaatatgttcatcaagatctcaaaaacctatatattctcaaaatcattaaatatactagggttattaatccttcgttcctttattatattaccagttccgtaaggaagctagtgctgttggcggccagcacatcctgttcgagcgctgggcaaaagacttccggagcgacctggtgggtctgaagctgggccgcgaatatgtggtggttgcccttggccacgagatggtgaaggaagtgcagctgcaggaggtgttcgaggggcgaccagataacttctttctgcgtctgcgaaccatgggaacccgcaagggcatcacctgtacggacggacagctttggtacgagcaccgacattttgccatgaagcagatgcgcaacgtgggctacggacgcagccagatggagcatcacatcgaactggaggcggaagagctgctggggcagctggagcgcaccgaggagcagccgatcgagccggtcacttggctggcgcagagtgtactcaatgtactgtggtgtctgatagctggaaagaggatcgccagacaggaggatgggacgttgcggcgtctgctcgacctgatgaatcggcgttccaaactctttgacatctgcggtggtctgctggcccagtttccctggctgcgccacgtggcccccgatcgcactggctacaatctcatccagcaactgaacacagagctgtacggtttctttatggacaccatcgaggagcaccgacggcagctggcgaaggatccgtcgccggcggaaagcgatctcatctatgcctacctccaggagatgaaggaccgcagtgctggcggcgagagcagcacattcaatgagacgcagctggtgatgaccatcctggacttcttcattgcaggctcccagaccactagcaatacgatcaacctggccctaatggtacttgctatgcgcccggatgtgcaggagaagctgttcagccaagtgaccgccagcgtggctgctgccagcacagatgcgtttcctcacttgagccgtcgggaagcctttgactacatggatgccttcatcatggaggtgcagcgcttcttccacatcactcccattacgggtccacgcagagctttgtgggcaaccaagctgggtggctacgacattccgaaaaatgccacaattctgattagcctacgttcagtgcatctcgataaggagcactggaaggatccgctggagttccgcccagagaggttcatcgattcggctggcaagtgcttcaaggacgagtacttcatgcccttcggcatgggcagacgccgttgtctgggcgatgccctcgcccgtgcctgcatcttctcgtttctagtgcggatcgtgcagcattttagcgttgtcctgccggcgggagagtctccatcaatggtgcttctgcctgggattacgcttactccaaaaccatacaaggtgcagttcgtcaagcgcacctaagttcgtgactggagtcgatggtgtcggtattataggtcaagagatatggtgctgaatccactaggatatttccaaggattccgaaaattatttacacatgaggatattataagcttaaagattcaataaaaacttatgccaatctgcatagctgtggtctagatgttgtttattgatgtcctctaaattaaattacaatgctttataatttaaacaaatttacattcggcgattcgcataacaaaatgatcaaatgaatcagaatgtataacaacaccatgtgaggatctcatcgtacttgggctggaaaatatatatataaaatggaaaatatttacagactcaatttgaggaaagcaaaaacatatacaatgggttctgtataacatattaaattagtacaatcgaactaaatgaaagcaatctcgtcatgcctggtcctggaccacttcgaaaattatagaactaaacgctgatacaataagcaggtgagtgattgtaacaaagaaacgagccgaccgaacgaccatctttccttaaatgctagtagtgactgcacttgggcaaggcagacgccttctcatgcggtctatttttcatgtccgtgctctggccgccttcatttaaatcccggcggcaaggcttcgcttcctgttgcatatgcttctgtgtgtttaggacttgagggattcgtatttgaatagttaaacgatgtcctgcgcggtagggtgctaaaagttaaatccggtgctgggcatgttgtccggatcgaactcaaactgttgcgtgcctgccacgggagccacccggctatcctcctcttcgttgccgaagtactgttcgataatgtaaaatgatttgtggtagatgtcgcggttttcatgcgcctgcagatactctattttgtccaaacctatataatattaacagaatcgatatttaaatggaaatttgaaagtaaaaataaatagcgttacctccgcattcctcgatggtaata

SEQ ID NO: 41804 - DNA, 1636 bp, DROSOPHILA
ctggcgtggcatacggacgctctgacaccttggcttcccaaccagtgaacgttttattggacaaaagccttgcttggacgtcggtctcgtttttcggtggtcttataaatagtatattgaaatgagtgccctcatatttctgtgcgcgattctaattggtttcgtgatttattcactcatcagctcggcgcggcgtcccaagaactttccaccaggacctcgatttgtgccatggttaggaaacacattacagttccgtaaggaagctagtgctgttggcggccagcacatcctgttcgagcgctgggcaaaagacttccggagcgacctggtgggtctgaagctgggccgcgaatatgtggtggttgcccttggccacgagatggtgaaggaagtgcagctgcaggaggtgttcgaggggcgaccagataacttctttctgcgtctgcgaaccatgggaacccgcaagggcatcacctgtacggacggacagctttggtacgagcaccgacattttgccatgaagcagatgcgcaacgtgggctacggacgcagccagatggagcatcacatcgaactggaggcggaagagctgctggggcagctggagcgcaccgaggagcagccgatcgagccggtcacttggctggcgcagagtgtactcaatgtactgtggtgtctgatagctggaaagaggatcgccagacaggaggatgggacgttgcggcgtctgctcgacctgatgaatcggcgttccaaactctttgacatctgcggtggtctgctggcccagtttccctggctgcgccacgtggcccccgatcgcactggctacaatctcatccagcaactgaacacagagctgtacggtttctttatggacaccatcgaggagcaccgacggcagctggcgaaggatccgtcgccggcggaaagcgatctcatctatgcctacctccaggagatgaaggaccgcagtgctggcggcgagagcagcacattcaatgagacgcagctggtgatgaccatcctggacttcttcattgcaggctcccagaccactagcaatacgatcaacctggccctaatggtacttgctatgcgcccggatgtgcaggagaagctgttcagccaagtgaccgccagcgtggctgctgccagcacagatgcgtttcctcacttgagccgtcgggaagcctttgactacatggatgccttcatcatggaggtgcagcgcttcttccacatcactcccattacgggtccacgcagagctttgtgggcaaccaagctgggtggctacgacattccgaaaaatgccacaattctgattagcctacgttcagtgcatctcgataaggagcactggaaggatccgctggagttccgcccagagaggttcatcgattcggctggcaagtgcttcaaggacgagtacttcatgcccttcggcatgggcagacgccgttgtctgggcgatgccctcgcccgtgcctgcatcttctcgtttctagtgcggatcgtgcagcattttagcgttgtcctgccggcgggagagtctccatcaatggtgcttctgcctgggattacgcttactccaaaaccatacaaggtgcagttcgtcaagcgcacctaa

SEQ ID NO: 41805 - protein, 504 aa, DROSOPHILA
MSALIFLCAILIGFVIYSLISSARRPKNFPPGPRFVPWLGNTLQFRKEASAVGGQHILFERWAKDFRSDLVGLKLGREYVVVALGHEMVKEVQLQEVFEGRPDNFFLRLRTMGTRKGITCTDGQLWYEHRHFAMKQMRNVGYGRSQMEHHIELEAEELLGQLERTEEQPIEPVTWLAQSVLNVLWCLIAGKRIARQEDGTLRRLLDLMNRRSKLFDICGGLLAQFPWLRHVAPDRTGYNLIQQLNTELYGFFMDTIEEHRRQLAKDPSPAESDLIYAYLQEMKDRSAGGESSTFNETQLVMTILDFFIAGSQTTSNTINLALMVLAMRPDVQEKLFSQVTASVAAASTDAFPHLSRREAFDYMDAFIMEVQRFFHITPITGPRRALWATKLGGYDIPKNATILISLRSVHLDKEHWKDPLEFRPERFIDSAGKCFKDEYFMPFGMGRRRCLGDALARACIFSFLVRIVQHFSVVLPAGESPSMVLLPGITLTPKPYKVQFVKRT

SEQ ID NO: 41806 - DNA, 8129 bp, DROSOPHILA
cattttctatttaattcccattaagtatttaatgatatacttattccagcacgaggtgccctccaactgcggatgctcgccgtgctcagagttttcggactctgcaatcgatgtgcgaatgcagcaggatgcgcagtctccactactccaattactcggcaaccatagacattaataacttattggttgtctgagaaagtcatttcgttagttttaagaatgtcgagcataaaaataaaatttttaaaaaaattaaagtagtttgtatttgatttgctataagatgtttttattcacacaacaaaactctacttgtaactcaacgttagccgcatcaaacatttgcatactcatcggggtttttatatacacatacacccagaaaaggtagaatattctacaaatattctacattttgcttacatctatcatatttgcaagtaatcgtttataaaattaggcggatcaacgtgatcagtaaagtctcacccctcttgacaagcaaaacagtatttaccaaaaattaaatgttgtgtcgagaaatcgcacagaagtttcgaatttcataattgacatttacgtgaaaaaaacattgtagttatacaaaatatacgtaacattttaacaacatttgtaacatatactaaatatattcataaattcatatatacatgatgttggggatataacaattcaagaaattcgttctgggctccctacgtttctagatactagaagataattggcgaagaggataatgattatacagcgtaaaaatataaatgtagattacagataagtgggtctaattctaagcaaataaacatgttgatactacagctaaaaaatggaaattttgcgaattacttctaattttttatgggaacagcggacatggggatcatggaataatttaaatatccttggtggctaaagctattttgtgcccgggcgaagagacgttgttggtggtggcattggccaaccagcaggcactgcctcagacggacttgataaggcgatcctgccgctcgaagagtttcgtcttgttggccagtgtctcagtggctgttgcaatgacaccactggtagcagccatggcggctgatgtggcactggccagccgctcctgcatcacggcggtcaagcactcccggaatcccagcaggaattcatctgcattctcccggttgaagcacatgggtggctttagcttgatcacgttatcgttgggaccgtcggaggaaacgagcacccggtggagctgcttcatccggttgaccacccagtgggcagccttcttgtcgggaatacgctccttccgatcctggaccagctctatgcccacgaagagtccagcgcctcgcacatcgccaatgcactcgaattcttgcttcagacgattgcactcctccaaaagataatcgcccaaaacaagagccttctgttgcagaccctcctcctcgataacgcgcatcactgcattggcgatcgcacaggagaccggattgccgccataagtgttaaagtaagcaactccggtggcatggaaggcctgagcgatttccggagtggtaactaccgcacccaccggatgtccattgcccatgggcttggccacacacacaatatcggggattacgttttgggtctcgaatgcccaatagtggctgcccacgcgtccaaatcccacctgaacctcgtcagcaatgcaaacgcctccggcagagcgtaccgcatcgtagactgcctggaagtatccggctggtggcaaaatctgtccaccgcaactctgcagactctcggcaatgaaggcggcgacgccctgtcctttggccaactgcttctggcagatctcctcgatgggctgagcatacagggcacccatgtcagcatccggatacatcttgtccgtaaactttccgccataaacgtccgggcacggcgccacatgcacgtagtcgggcttggcctcgccgccgggctggttaaatttgtatggagacacctccatcaccgactgcagatgaccatgataggcactgtaacgaaataaaagaaattagcatatttttccataggtgttcaaaataaatattaagcaagccaaaatcattttttcaagcaaatttaatctctagaatcaaacagaagaaacttactggtcgagagtgataacatcctgacgcttagtaaagttgcgggccaatcgaagggccaggtcattggcctcggatccggaattgacgaagaagcaaacggacagaggctccggcattttgctggtcaacgtgcgagcacactggaccagttcgtcgtggaggaagcggttgttcgtcgagatggtggccatctgcagggctccagctcgcaccacctccggatggcaatgacccactgcaaagattgaggtcaaatttataattattgtatagtttttaaataaatatatttaaattgttagcaagtattaataaaagtaaaatagataaccatattgtataactgaataccaggcaccctctttaactaatcaaattgctaactcacgatggagaaataaacccaaaaataaagctttcaattagcgctactgacccaacgagattattagatcaaatttatagatagatcaacccaatagtgataagcttgtactgagggtgtggctaaaattaggcaagtcgcgcacgtgattttcccctaaccacttgcttgcccgatcgtttgtgcagcgcttcacatataagcagggcaatctgccacgataccgaaaataaaacgctttcagacaggcccggatccattgggctcggcgtcgccatccgtaagtgtatcgctattccgtaggcgccgacggatgggcgataagccccgggacccggaccactccgctcccgtcgacggcgacagattgcgacgtttgggggtcaactactcgttccgattgcgtttctaatttcgtctcgtactcgcattagaatcatttggacttggactcacacacgcccccgataagacgtagtgttctgcgaggcaggtatcacgtgaagttcacgcgatgccttcacgtttctagtttccatatcagtggtatgaaattaaatggtgtataatagactgactgtttctgtttcatacgcttgctgattaggtttggaatgatcgaaatgaccatgggggaatctctgcactttggtttttaattatgtcgagggaatagaagtacagttatgctgggaaaaactagcatttttagaaactgttttgaaagagcgttactaagcatatctcaatgtgtattcaaataacttcatcactagctatattgaaaaacttcagttagggctcgttctagatcgtatactttaagtgatgaatattattaatatgctcttcatcttctataattcataacaagcccacccacttgttttcctctttcgcgatcagcaaattttcttagtttttcgcgacattgtcgacaatctacaagtggtcgctatgacatgcttacacttccacttgctcttctctttatatcgcctgtttgtacgacttttcacagcccgcaggcccatggctcggggtgtttttccgactatctgctcagaattttccactcgcaatgtgtgctgagtggcacagctgattgctcagatctcgtggggttggggcactacgagcacaaatattgaaaaactagactacgtacggacatatgggctgcacgactgtacgccttgtgtgctcaccccggggcagccccgcccccttttttcgtactgtgcccgaccgcctatctcgagtacatttccactcgcacgagacgttcacatgttgcggcctgttggacacccggagtggaaaaagtagcacgagattacgaggaacgtggtttctagtttcataacaacttgttattcagatcgtcagatcgtccacacgtgcccccgccaccttatcatggttatagtgctacatgtttgcttgaggactgatttcacactttgttattgatgacttatgggcatagccgtaagttacgtgcctctgcacggacccaatattacgttctgaatgtgaaagggctaactatcagtcgtatgaagatcgtaagacttgttccgaggttgattgagttttgcgatcgtctacgaaatgtgcaaccgtctaagtgggtcattaaatgggggagcactataaataatcccaatatccatcaccaagtttttgaaagtgttttgatataaagggacaacatctattgattgatttattgatcagttgatggtgcaaacacaatcagttgactatctctgaactgtaaacagctttacctttttgcacccttcgatgataacccttattggaatattgttttcgaccctgttgatgagcccccttaggtggcaattaaccaaaaggaaagctattaataagcgctacagtcgacgttatcaaatctcattgggttgtcaaatctatttcatctatattcagtacattcgcaatgccaatggcctcatcttatcagtgcggcaagcgttaatacaaaaggaaaaactaattttatagaagggcagcttttcagaaatagaaagccctgaaaataactatttattactatatatgttttaagtattatttaagggcatgtaatataactttacacatataaagttataattaatagtgattttaggctaggaaaattgctgccaacaaaaccttgtaaatggaaaattttccgtagcaggaagtgttttggacaattacaaacaagacgcaaacaatgtgagctacctagatcccagaatcagcaaattggcaaattggttgccgacgtcaatcttcgttgtttttttgttattgtcgttgggccaccgttgttgataagttgatatggtttggatggtctggatttgactgggaccccctcggtgatatatatatacatatatatgtatgtgtacgtaatacgtattgtatattttacgcaaatgcggtccctggccatttgttattattgtgattgtcttgatggcagtgctgtgttaatcactcattctatatctatatatatctagttgagcactcaaccttgaacttgcgttgccaaacgctccaaatagccgcagtgccacatgcactttgcatccgtacattggccatttgacgggcgtgtgccactgctaatcagcataaacagaaataggatccgtcaacgaccaagtgtcgacgtccggacgggaggtccaaaataatcgtcatcaggccccggttccaaaatcgcaaaacatgacctagcaacgtacttaatggcacccctactttattataacaattttttattgcagaaatggcgacgaaattatcattttctgcgccctacaccaccgttttcttcatcttttcacctaattaacaatattttcgagatgaataataggatctattacatataagagctggttttttgatctattgatcttacgcattctgtagtcctacaaatttttacatatttttcaaatttagttttgatagattgacttaccgtgggctacattgttgatgcagtccagataccgggtgccctcctcatcaaacatatattgaccttgaccgcgcacaattttcaggggatcagagcgatagaagagctggcaggcttgtctgcagaaaaaaatgcaagttattaagtaggttaattaggtggatggcaaagttgctagctaagctaagtgaagtcataaaatccagacaatgtaaaaggcaaagacgtatatgtgacgatagttatactattaaccggggcctatttcaacagttcacaaatatacgacagagtagtgagtagtactcattatcaccaagataatcactgttcccactgccgtgtttaatggttattgtgtttgtgtttgttagacaaaaacaaggcgtcttgctgtgtttgataaacattttagggttgactttaggcaaacaaagagagcgggaacgcagctgctaacaatttaatggggacaaaaaatgcactttgatccgaactgcatcctaaccatttgaaaatcataattattagctacttgaatttagcctgatccatatttagtttaatatggtaaatcaataattgttcgccaataatttggaaacatgaaagtgataaaaccgaactgacgtattttgtaaaagttcagagtcataaaaaacaggccccttttgttttcgaatttctcgatttattgctagcaatttgtaattcatttcacaagctacctagcctttgttcttttttaaaatattccacaaaatggaaaatttggattgatatttttcagtcaatttagattacaatatatatgtaagcgagaacaaatgtgaaatgtatattgaacgtgattatcaagtgcgaacactctgcctagcaggccctttgaatttatttttataaaatttccaaattggttttataaatatttttatgcagtcaggcgataaaaaatcaatatggcccaaatctaaaaaagcgccgctgttgcacgacttttttcctgcttttttttgtgcactttttttgttatattatttccttgggtggcggtggcggctgttggcaacagtgccaaaaatacaaaagtacaagaaaatcgggcggccagccgtccaatgcgagcgaaagagagggctggcgatgagtgggccgagtgggggatgccgcctgaccttgacagccagagcgaattcaaggcaaggtcgcaggctcacgacccggaccagggattacgaatacgagcgaggataacggcgtaaggaccacgaaaggaagccacttacccgatgtgctggttgcgcagcttgatggtctccgttttgctcagctgctcgctggccaccagattcagttgctcgtgggcgaaaggcatttttaagatatattttgattttattttgtttttttttttaactcagttatttaaaatcggcagaaaagcgcgcacttttagaactggcaagtgacttgatttaaattagctttgagccgtgtgttgagactggagtcctggcaggataatcggtgctcctggacagtcgctggcaggcacggtcgcctttaacgtcttgtttgaaattgttgccgaagcaagtttcgttctcgcttataaacacacacagcggcatatcttgccatctctctctgcgaattcgaactcgctcgcgcctatcgatttgtcgattattcatcgcattagagtccatttgggcgcgataatttgaattatatagtaatggtaaataaataatagtataaaattgtaatagtaaataaatactagtagaaaattgtaatagtaaataaatactagcagtaaattgcaatagtaaataaatactagtagaaaatcgtaatagtaaataaatactagtagtaaaatgtaatagaaaataaaatagttcgaaaataaatctatcatggtacttttagctagaattgaaagttacatcttttatcctccattaatagacgaaagtgtagccagcgaattcgagtttgatgtagttcctagaatctaaaagtatctttaagtaatagccccaaacaatccaaagccacgcagatcagcggtcgaaaatatctatgtcggttatataaaaaaacgttttctttttatttttcttttgttttttttttgctgttttctttatgtatatgtaaataccaaggacaatatcatttgtttttcactttgttgtttgcaataatataattaataatataatattaaatcagcgctttttgtgttcattttcatttcaatttatgtataccgttatcttttgctatgctaatgccttaaattggtttgtattaatttcgataaatacaattattttattaatgtttcaataaatttttgaattattctttaaatgtttaactttatatttgttcatttataattgttctttacaatatacacaactgaaatacttttattggaattgtttatcattaaacactaagcactagtttagctcgatcttttgcgtttatgcctggtgttttctttcctaattgtcattttgaatgggatcggagaacagaatagaatgtaggt

SEQ ID NO: 41807 - DNA, 1619 bp, DROSOPHILA
cgttaaaggcgaccgtgcctgccagcgactgtccaggagcaccgattatcctgccaggactccagtctcaacacacggctcaaagctaatttaaatcaagtcacttgccagttctaaaagtgcgcgcttttctgccgattttaaataactgagttaaaaaaaaaaacaaaataaaatcaaaatatatcttaaaaatgcctttcgcccacgagcaactgaatctggtggccagcgagcagctgagcaaaacggagaccatcaagctgcgcaaccagcacatcggacaagcctgccagctcttctatcgctctgatcccctgaaaattgtgcgcggtcaaggtcaatatatgtttgatgaggagggcacccggtatctggactgcatcaacaatgtagcccacgtgggtcattgccatccggaggtggtgcgagctggagccctgcagatggccaccatctcgacgaacaaccgcttcctccacgacgaactggtccagtgtgctcgcacgttgaccagcaaaatgccggagcctctgtccgtttgcttcttcgtcaattccggatccgaggccaatgacctggcccttcgattggcccgcaactttactaagcgtcaggatgttatcactctcgaccatgcctatcatggtcatctgcagtcggtgatggaggtgtctccatacaaatttaaccagcccggcggcgaggccaagcccgactacgtgcatgtggcgccgtgcccggacgtttatggcggaaagtttacggacaagatgtatccggatgctgacatgggtgccctgtatgctcagcccatcgaggagatctgccagaagcagttggccaaaggacagggcgtcgccgccttcattgccgagagtctgcagagttgcggtggacagattttgccaccagccggatacttccaggcagtctacgatgcggtacgctctgccggaggcgtttgcattgctgacgaggttcaggtgggatttggacgcgtgggcagccactattgggcattcgagacccaaaacgtaatccccgatattgtgtgtgtggccaagcccatgggcaatggacatccggtgggtgcggtagttaccactccggaaatcgctcaggccttccatgccaccggagttgcttactttaacacttatggcggcaatccggtctcctgtgcgatcgccaatgcagtgatgcgcgagtgcaatcgtctgaagcaagaattcgagtgcattggcgatgtgcgaggcgctggactcttcgtgggcatagagctggtccaggatcggaaggagcgtattcccgacaagaaggctgcccactgggtggtcaaccggatgaagcagctccaccgggtgctcgtttcctccgacggtcccaacgataacgtgatcaagctaaagccacccatgtgcttcaaccgggagaatgcagatgaattcctgctgggattccgggagtgcttgaccgccgtgatgcaggagcggctggccagtgccacatcagccgccatggctgctaccagtggtgtcattgcaacagccactgagacactggccaacaagacgaaactcttcgagcggcaggatcgccttatcaagtccgtctga

SEQ ID NO: 41808 - protein, 474 aa, DROSOPHILA
MPFAHEQLNLVASEQLSKTETIKLRNQHIGQACQLFYRSDPLKIVRGQGQYMFDEEGTRYLDCINNVAHVGHCHPEVVRAGALQMATISTNNRFLHDELVQCARTLTSKMPEPLSVCFFVNSGSEANDLALRLARNFTKRQDVITLDHAYHGHLQSVMEVSPYKFNQPGGEAKPDYVHVAPCPDVYGGKFTDKMYPDADMGALYAQPIEEICQKQLAKGQGVAAFIAESLQSCGGQILPPAGYFQAVYDAVRSAGGVCIADEVQVGFGRVGSHYWAFETQNVIPDIVCVAKPMGNGHPVGAVVTTPEIAQAFHATGVAYFNTYGGNPVSCAIANAVMRECNRLKQEFECIGDVRGAGLFVGIELVQDRKERIPDKKAAHWVVNRMKQLHRVLVSSDGPNDNVIKLKPPMCFNRENADEFLLGFRECLTAVMQERLASATSAAMAATSGVIATATETLANKTKLFERQDRLIKSV

SEQ ID NO: 41809 - DNA, 2707 bp, DROSOPHILA
tctctcggacttcgcggtaagcaaagctactgaccctaccaaaaaatgtccacctctgcccgctacaacctgtgttcggatcatagcatgatcaagatcctcttaaaaagtcgtacctcatctgcagtgaagcttataaggcgcaacacaaatatcagcagttacaagagctggctggaagaacacatagatcctcagcccggattctaaactccgaacgaaattgatgatgtggtagatagtctcactttgcagcgaacattgcaacaccaacagttgaagtccctagagccgcaaatcataatcaacagatttagctaccatggtaagagagaggaaagtactgaagagggtccggcagatcagcagacgccggagtgacaagactgcgtacaatcgagcatgtaaagacctcaagaaaatgcttattgacctcaaaagtaaatctctggatgcatatctggtcgatcttgagtctaaaaacgctaaacataatccttggaacgccaccaaatgttttaagaggccagtgaagagggtagccacagttacaacatctgcaggtatatggtgtcgctatagtcaagaaaaagcaaacgcgtttgctgaacacttaagatgcagcttccagccgtttgacctgagtgatccggaagacctaagcgacatgaagcgtgtaaaagtaattatgaatattagacaaacaataaaacgaggagcattttttaatagtgtagtcgtggcagttttgtgctgtgtctgcgtgggcgtgccaaaacgttttttggcaaatcgataaaaatgtacaaaaaaatttttccaaatcgatagaaaattacaaaagtgtggcattggcagttttgtccggttttaggccataagagtgggcgtggcaatatgggtcaacaaactagctctgtgtgaatgaatctcaaccttctagcttttatagttacatattcaaaagagtacatctgaatttcaacaaagatgcatgtgagagtttgaaattgcatgaggacctcgaattccaaacagcagtgccgcattcactttatgctacttcctcctactttaaggaatgcattaaaaaatcgtacttaaaactaacttcagaataattatcatcataatctatagtacaagatcaataaaaatatgaaaaaatatcaaaacagattttaaatgtgtgggtgtggcagtattgtgcggtttttggacgttaaagtgggctctgagtctatgtctctggaagatgcatattcatacggacagaccctccgtctgggactgagagggacagatcgacttggctattgatcctgatatattgtatatacttcttaaggtcggaaacgcttcaaatcatataaaattattaaaaatattttataaaattcatgtggacgcggcaaaatgttttttgataaatctatagaaattcacaatactaatacaaatatgaaaaaatatcgaatcatttggaaacgtgtgggcttgacttatcaacgaatataatatacccttttaaattatattcgcgaatacaaatatccaaatatctgtgtcccaataactataaattacttaattcttcctttaaaatcttaaaacgtaaaatcgttggaacacagcagggccattcttcaatccaaaagacaacctcaaatactcgtattgtctttgagggataacaaatggcacggatttttctttgacctcttttatttgataaaatcaataacagaagaacaacatatccctttcaaatactccaggcaatcttcgataaggggcaaaggaaaattatctttgaagatatgcttttttaaaccaaggcacattcgaatgtcaccagattttttcttcacaagggctatagggtaaggcgctggcccgtattacgttgttttaagcaaatgattaatgatttttgatacttttctcctctcaaggtaatacaaacttctcggagaacagtaaaacatatcatatatcggattataccttctggttgcagcttcaatatcgcaccaaagacattagaataaataaggttaataataataaaatttttctagtgtcgtcagaaagtttcttcttgtcacccagttgcttgaacacatcgaatgcagtaatcttaaagtcgaaaaagactttcagctctgctcgtagtctcggccaattcaaaactgacgtttcattcatgaatgctcttgtcgattcaatcattataaatatattatattcgaattgtggtcaatctaatgaagcacagggactcgcgaaaacggttgaactaggacattcaagtacccaatatcgatattgtgcttttgagctgatttattctggcccaacgcagtttctaaatcaaccacacacgcttacgcgcagcgtacaacttctaaacttgctgcaaatgttgtacaagttaacacgggccaacgagctagaccagttggctcagtgcacgaaatttaataccattacgttaaagtgctgaccccagcatcgggccggaaacccgtgcgcagccggcaaacacagcatatttgcgtgaccgctgcgagtcttttgttagctgtaagattcattttttatattcagtttatgtttgactttaataaagagcggttgctcgtctacattatcactccgactgttcgtcgcaaaacatacttttattaattactctaccagacca

SEQ ID NO: 41810 - DNA, 444 bp, DROSOPHILA
tggtctggtagagtaattaataaaagtatgttttgcgacgaacagtcggagtgataatgtagacgagcaaccgctctttattaaagtcaaacataaactgaatataaaaaatgaatcttacagctaacaaaagactcgcagcggtcacgcaaatatgctgtgtttgccggctgcgcacgggtttccggcccgatgctggggtcacaaagaaaaatccgtgccatttgttatccctcaaagacaatacgagtatttgaggttgtcttttggattgaagaatggccctgctgtgttccaacgattactatagattatgatgataattattctgaagttagttttaagtacgattttttaatgcattccttaaagtaggaggaagtagcataaagtgaatgcggcactgctgtttggaattcgaggtcctcatgcaatttcaaactc

SEQ ID NO: 41811 - protein, 48 aa, DROSOPHILA
MNLTANKRLAAVTQICCVCRLRTGFRPDAGVTKKNPCHLLSLKDNTSI

SEQ ID NO: 41812 - DNA, 9358 bp, DROSOPHILA
tccgaccgaacagttgagtaatccaatcccatggaataagctttcgctttagcgcaaacaatcaggacaatgctgtggggagggattgtgttggcgtggacagggataataacaaacatatgtctgaaacgaaatcgccggcgatatatatatttaatgcctcaaacgaaattgcataatggcaaaatcaacgcatgcataattaataataacaagctgtgcgctccgcattatgggcctccattccggaggatacatatgtacgaatgtatatggcattccttggtggaaaaaggcctctgcagtagctgataagctacttatcagtgattcgctcccaattcccatggcaaagaactgaacagcctaattaaaaaattcctaagctcgtttcggctgccgacggacgagtggtcaacgatattgaagttggacattccaacatttgacatttccctgcgtgggcacttgcctggcatccggttgcctgttggagtacacccagcgtcatttcccttttgcgtcctttgcgacactcagcagttccagcttattgataaacagagaaaaataatcgtcctacttgattcccaatttagtttggtatttttgagtaaagcagttgtttaaataagctaagaattgatatagtatgttaatttcgaacgtaattgcttaagaatacatttattttagagtctttaatattatatcctgccataatttattctctgtgtcctgggcagtcggactgcagctgctttccagcttctctgccttgcagctctttcgtctgaatcaagccaagtgtctgaaatgcgttcagcatgctgttttctatttgtgtttgcctttgtcaaacatgcatttttattatgcaaaggggtccttggcagtttcaattgcgtcctcacttagcttcggctcggtcctgctcctcgcgcaacgcttctgctcctgtctctggtcctactctcaactgatccttcttctccgttcccatcattgcagtgtgagaatccgttgggacccataggcgtcgcgctgaacggccccggcctaaggggccatgacgcgttggccctttaatctactactcttgctgtcggtggcggtacgcgactgtagcaatcatcgcaccgtcctcactgtcggctacctaacggccctcactggcgatctcaagacgcgtcagggactggccatttccggtgccctgactatggccctggatgaggtaagtactagcttcgatttatttgtaataatagcaaatatctgaactcgatagtattcaaactgcgtcatcaaagttgtacctttttttttttagatagaattgttattgaaagtctttcgttttcgttccggaaacaggtcaacaaagatcccaatcttctgccaaatgtgtacctggatctgcgctggaatgacaccaagggggacacggtactggccaccaaggccatcaccgagatgatatgcgatggcatcgccaccatttttggcccggaaggaccttgctatgtggaggccatcgtctcgcagagtcgaaacattccaatgatttcctacgtatgtattttaagctcctgacttatgacgcctccccgcagcggcgggtgcagacaatttcacgcaccacatttttcatgcaagtgaagttcttatttcttttcgttttccccctttcaacagaaatgtgcagagtaccgtgcatccgccataccgacattcgcccgcaccgagccgccagatacacaggtgagcaagagccgggagcaacaggtggatggatggatgtgtgggtggttgggttcaagacgagacgagacgaggaggcgggtcggggtggccttccttgcggtggctttgagtctcgacaggcacagccatttagcctcggattatcctcaaaccggggacaacaaacgccagaatgagaaggacaaaagaagagtacgaacgcccgcaagagaaaaacaatgcaatgttttgccagaagaaatgggtagtgagaatacaaaataataagattagctcaattttaatattcatacatatgttaggtaaggggtccctcttcgcagaaaccagagaaaaaatgtgctttgtagagcatgttttcttgtttatggtttgaaatgaattttcataattttgtatgtcatatttgcagcgaggaaatgagtaaaatccattaaccgcaaacaccataggcaaatctctttaaagtatttgcagttgtggttcacctagtgtttctagaatgtcatcccatgtcgtagctaaataaaagccgttgatttgtgtgctagctccgcatatcaaactcttaatcctttgacattttacttgatgctcactctgctcactctcgtgtttttcaggtcgttaagtcgctgcttgcccttctgcgatattatgcgtggaataagttttccattctgtacgaggatgtgtggagtccggtggctgatctgctgaaagatcaggccaccaagagaaatatgacgatcaaccacaagcagtcgttcattgataatcgagtcaagtgctgtgagcagatgctggactgctgtcgttctgggtattggtaccaggtgagggaggaatgattgaaatttaacccaaatcgaatctaatttgtatgtgttttcattttttccgcaaacagctggtgcaaaacacgatgaatcgcacacgaatctacgtatttctgggggcggcgaatagtctggtggactttatgagttccatggagaccgctggtctgtttgcccgtggcgagtatatggtgatctttgtcgacatgatggtctattccgagaggtacttgattttggggagacaccttttcgtccagcggtttaaaaattgcttcttgaattgctcgttttgcagggaggcagaaaagtacttgcgcagagtggatcaaataacattcatgtccaattgccatagcacggagaacttcaatcaaatggcccgcagtcttctcgtcgtggcatccacgccacccacaaaggattacatacagttcactaaacaagtgcagaagtacagctcaaagccgccgttcaatttggaaattcccaggctgtttgtagaaagtaattttagcaaggtatgtgcattataatgtgtaaaagccctgcagatataaattctatcttttcttttcgattccgattagttcatatcgatctatgccgcgtacctgtacgattcggtaaagctgtatgcctgggctgtggacaaaatgctgcgggaggagacccgagtcttgaccgatgatgtgatcttcgaggtggccagcaacggaacacgtgtaatcgataccataatcaaaaaccgtacttatatgagtgagtttatccactggccgaccgattttatttcaaataatatatctctgatatacttcatcttttcccaccgaaggcataactggatccaaaattaagatcgatcaatatggcgattcggagggtaatttttcggtcctggcctacaagccacacaagtggaataactcgaacaacatgccctgcaactatcacatggttcctgtagcttactttcatcaaggcgaagaacatccagtgagtgagtcgtcttctcttttttagtttgcctttctttcaattggttaccgcttatcttgcgtgtcccacgaaatttcatcatttaactcatcattcatattttgttgcatacgacaggagtacaagctcatcaatggctccatagattggccatcgggcggtgagaagcccgcagatgaaccgatgtgcggttttgcaaacgagctgtgtaaaaaggacgacacccactatacgtccactgtcgccgctgtggttttgggcgtattgctcttctgctcaggtgttatcaccatgagtatatatcggaagtggaagatcgagttggagattgagggcttactctggaagatcgatccgaacgaaataaagggttattctggcaacgagattgtctcctcaccgagcaaagtaagtcgatatattgtggtcaggtagtttacctttataagtgattgtttgccaccaacaggtcagtttgatgagtgcccagagctatggttcccgctggaccaaccagtttgttacctccacgggtcgccttcgcggggccgtggttcgtattaaggagttgaaattcccgcggaagcgagacatatccagggagatcatgaaggagatgcgattgttgcgcgaactgcgtcacgataacatcaacagcttcattggcgccagcgtggagccaacacgcattcttctagtcaccgattactgtgccaaaggcagtctttacgacatcattgagaacgaggacattaagttggacgatctattcatcgcctcgcttattcacgacctcataaaggtatattgaattacagtttgtcaaataaaaagggtgcttaagagcgttatgaagtagtcaaaatttgcaattgctgtgtagattttacttaccagttaatattttaatttcttgcagggcatgatctatatacacaactctcagctcgtctatcatggtaaccttaaatcctcaaactgtgtggtcacctcgcgttggatgctccaagtcaccgatttcgggctgcacgagttgcggcagtgtgccgaaaacgaatccatcggggagcatcagcattatcgaagtaagatattgcagcttcattccgattgtttgattgactaattgtttgcgaactatctcctatttctagatcaactttggcgcgctccagagctgctgcggaatcacattcacggcagccagaagggcgatgtctatgcctttgccatcatcatgtacgagatatttagtcgtaagggtccgttcggacaaattaactttgaaccaaaggaaatcgtagactatgtcaagaagctgccgctcaagggagaggatccctttcggccggaagtggagtccattatagaggccgagtcctgtccggattacgtactggcctgcatcagggactgctgggctgaagatcccgaagagcggcccgaattcagtgtcatacggtaagagaatttaactttgtaattaaataaatggtacataatgttctactcccgactgccttaagcaatcgcttgaagaagatgcgtggtggtaagaccaagaacatcatggatcaaatgatggaaatgatggagaagtatgccaacaacttggaggacattgtcaccgagcgcacgcgtctcctgtgcgaggaaaagatgaaaacggaggatctcctgcatcgcatgctaccgcaatcggtggctgaaaaattgaccatgggtcagggtgtcgagcccgtttcatatgatttggtatgttggtaattcaaggctttacacgctccccaaaagtttaaaattaattcataatgtctaatggagtttcctatctgttaacttccactaggtaaccatatattttagcgacattgttggttttactgcaatgtcggcggagagcacaccgctgcaagtggtgaactttttgaatgatctctacacagtgttcgatcgcatcatacgcggctatgatgtctataaagttgaaaccattggagatgcttacatggtggtaagtaagcttactcatgttatatttcctatatttattcaaaaaattcagttattcaaaaaatcactttttccttatatattttaggtttcgggtctgccaattaagaacggagatcgacatgcaggcgagatagcttcgatggccctggagctgctccacgctgtcaagcagcaccgcatagcccatcgtcccaacgagacgctgaagctgcgcattggaatgcacacgggtccggtggtagcgggcgtggttggtctcaccatgccgagatactgcctttttggtgacaccgtgaatacagcgtcccggatggagagcaacggagaggcgctaaagattcacatttccaataagtgcaagctggcgctggacaaactgggtggtggctacataaccgagaaacgtggcctggtcaatatgaagggcaagggcgatgtggttacttggtggctaaccggagccaacgagaatgctattcagaagaagttagtggatatgatggacatgccgccgccgctgtttagtcgacctcgaaagagtccaaagctaaatcccgactcccgtcagccaagcatccaggccatgcacttctgcggcaccggatcaagacgccagagcacagttcccagggcgatggacggcgaatcaacgtatagcctccagggatccgtgagggaatcaccgcgcatggtcagcaaacgtgacagggatcgagagcgaccccccatcaatggactgggcgcagggcacttcgtggggggagctctcctcgaatccgcacaggcctcgcttagcacgctgaatcattccgaaacaaacgaaactaactgtgatatggatgggggatcgggaggagtgtcaggatctggatctggattagtgcgtcaacccaatgcactgcacaaaccgttggccatggtgcggccgcaccggattattagtgctgcccagctaccccaactgggagataacgatgatgactccgcagacacgctgttgcgggagtctcgctccctggatcccatgcccatgcagcaactgcgcaaacgtcacgacagggtaaagttgccgccctcgaagttgtccaagaacaattcccgatcgctggacacgggtgtatcgctgatcagtgggaatcccaacggtgaagtgcactcgagtcaactggatttggataacgagatgaccgccaacccggtggatgccaccgatggctacgacgatgagctgggccttctgatgcgccacgacaacggccaactgcctgctctccgctattcaggcagctttcccaacgctcagattagcattgttcctacaggaaggtcagcaggaggaggaggaggaggaagagaaggaggtgggagcaactgtgccaagcatctgaacaacaactgcaacggaggagtgaacgtcgaggatgatcttgagtcgcccctgctgcaacgccaggcatcgctgtcggtgccgccagaggagatgctggcgcacaacaaacgttggcactcactggagcacatggatggtcccggtgggcatggcggaaatagcgttagctatgccgccgatattgataaccgccaccccggagatctggacttcttcagcggttcctccaatcagcatcatagatccaaagcggctggtgggagtaagctgactaactggatgactaacatcttcaagggcaacggcgtgcgtagcggtgaggctaggcgagtaggaatcctgcccagcggtgtgcacggcgcacgaaccggattcacggatatggcggcatcggcagcagcccgcgatcgtgagagtatagtatagagataaggagaaggcagtgtagaaactaaggaagaaggagcaggatgaccaggatgagctaaatagccggatgagagagatggaaaagttactcaggaaccgagtcgagcaggaaacgatcgtcttttggcttacttctttgttttatgtattgtagtttgtatggatcgaacgaattgtgtgtctgtgttggaagtcatccacctataaacatataccagccggttcttaactctttgatcgctctggcattgcgggactctacatatgtgtcctatgggtttccaaactatttttattcgttttcgaggaaaatcctgcgatcccgaagtagaagcgagcagaagctgaagcgaaaatcatacatagcatatattttataactctacatacatacatattagagaagccgaaaaaaccgtctagtcacaaggtcttcagactagttattgttttatataaaataaacacacacccacacatctaaatgtacgtttgtaaatgtaacacataaacacaacgacacacatatttatacgacgatggagaatcaaaatcaaatattttatgtaaatgtaatcgaaattttctgctttccatacacgatgcgcagcagcaaacaaattatgcttaaacagaaactagttaatttatgtatttgaaaatcaaaacgagcgtgaaaaatgtaatgtatcaatgtgttttgctagtacgtagttaagtgcgtgtgattgtacgtaatatttaagtctctaaagctaaaataataattataattaattgaacgcgaattgtgagcagagaagagcgaaaatgcgcccgatgagaggtgttttagctgtatgtatgtatgtatgtatatttttaaatgaaaatttgttaaatttgccatatataaatacaaacgagaaactattaaaagtgtgtttgtccagatatgcttaaatggtgcaaaatgttcaatagatggtagatacgagggtgaatcctgcgggaaagactagaaacttggagaacacttcttctaaaagaaacatttttaaaatattccgagcactgggaacagttgtgttttgtgtttcgacaaacatttctgaagtcgtggtgaatacaaaaaaacatgttaagcatataagagatcactgtaagtgtgatctcacgataagatctctgtaagttcttgcaactaaagccatcgattcattggaactccttttgaaatgtttatgcactgggaacagtgaaacgtatgggaagacttcgtgggttttatcaagagttcttcttgggcagaaagaaaacatttgttttttcctgtgagtattatatttgctccaaatgattatgtattattttacgcttttagtttattggaactccttttgaaatgtttatgcactgggaacagtgaaacgtatgggaagacttcgtgggttttatcaagagttcttcttgggcagaaagaaaacatttgttttttcctgtgagtattatatttgctccaaatgattatgtattattttacgcttttagtttattttttaacttcaatttaataagataactaagcattagtgacagatgttgacatatgtaagtacgtacgtatgtttaatgtaaaatacaatgtcaaaaatgaggtagcagttttcaagaccgcaaaataaagttgatttctcataaattcaaaaatataaaaaaaggaaatagtcatatttcttgaacataaaagaataataaatggatggacctcaatataattttgaatgtacgtccatgtagcgtcgatgagttagctgcgttagaggaacggcggaatttggaatacggggaagtttttaattaattattttttcgatatttagagctgagttctataaactgaactcgtacatagatagttagatcttttctttct

SEQ ID NO: 41813 - DNA, 5565 bp, DROSOPHILA
catcattgcagtgtgagaatccgttgggacccataggcgtcgcgctgaacggccccggcctaaggggccatgacgcgttggccctttaatctactactcttgctgtcggtggcggtacgcgactgtagcaatcatcgcaccgtcctcactgtcggctacctaacggccctcactggcgatctcaagacgcgtcagggactggccatttccggtgccctgactatggccctggatgaggtcaacaaagatcccaatcttctgccaaatgtgtacctggatctgcgctggaatgacaccaagggggacacggtactggccaccaaggccatcaccgagatgatatgcgatggcatcgccaccatttttggcccggaaggaccttgctatgtggaggccatcgtctcgcagagtcgaaacattccaatgatttcctacaaatgtgcagagtaccgtgcatccgccataccgacattcgcccgcaccgagccgccagatacacaggtcgttaagtcgctgcttgcccttctgcgatattatgcgtggaataagttttccattctgtacgaggatgtgtggagtccggtggctgatctgctgaaagatcaggccaccaagagaaatatgacgatcaaccacaagcagtcgttcattgataatcgagtcaagtgctgtgagcagatgctggactgctgtcgttctgggtattggtaccagctggtgcaaaacacgatgaatcgcacacgaatctacgtatttctgggggcggcgaatagtctggtggactttatgagttccatggagaccgctggtctgtttgcccgtggcgagtatatggtgatctttgtcgacatgatggtctattccgagagggaggcagaaaagtacttgcgcagagtggatcaaataacattcatgtccaattgccatagcacggagaacttcaatcaaatggcccgcagtcttctcgtcgtggcatccacgccacccacaaaggattacatacagttcactaaacaagtgcagaagtacagctcaaagccgccgttcaatttggaaattcccaggctgtttgtagaaagtaattttagcaagttcatatcgatctatgccgcgtacctgtacgattcggtaaagctgtatgcctgggctgtggacaaaatgctgcgggaggagacccgagtcttgaccgatgatgtgatcttcgaggtggccagcaacggaacacgtgtaatcgataccataatcaaaaaccgtacttatatgagcataactggatccaaaattaagatcgatcaatatggcgattcggagggtaatttttcggtcctggcctacaagccacacaagtggaataactcgaacaacatgccctgcaactatcacatggttcctgtagcttactttcatcaaggcgaagaacatccagagtacaagctcatcaatggctccatagattggccatcgggcggtgagaagcccgcagatgaaccgatgtgcggttttgcaaacgagctgtgtaaaaaggacgacacccactatacgtccactgtcgccgctgtggttttgggcgtattgctcttctgctcaggtgttatcaccatgagtatatatcggaagtggaagatcgagttggagattgagggcttactctggaagatcgatccgaacgaaataaagggttattctggcaacgagattgtctcctcaccgagcaaagtcagtttgatgagtgcccagagctatggttcccgctggaccaaccagtttgttacctccacgggtcgccttcgcggggccgtggttcgtattaaggagttgaaattcccgcggaagcgagacatatccagggagatcatgaaggagatgcgattgttgcgcgaactgcgtcacgataacatcaacagcttcattggcgccagcgtggagccaacacgcattcttctagtcaccgattactgtgccaaaggcagtctttacgacatcattgagaacgaggacattaagttggacgatctattcatcgcctcgcttattcacgacctcataaagggcatgatctatatacacaactctcagctcgtctatcatggtaaccttaaatcctcaaactgtgtggtcacctcgcgttggatgctccaagtcaccgatttcgggctgcacgagttgcggcagtgtgccgaaaacgaatccatcggggagcatcagcattatcgaaatcaactttggcgcgctccagagctgctgcggaatcacattcacggcagccagaagggcgatgtctatgcctttgccatcatcatgtacgagatatttagtcgtaagggtccgttcggacaaattaactttgaaccaaaggaaatcgtagactatgtcaagaagctgccgctcaagggagaggatccctttcggccggaagtggagtccattatagaggccgagtcctgtccggattacgtactggcctgcatcagggactgctgggctgaagatcccgaagagcggcccgaattcagtgtcatacgcaatcgcttgaagaagatgcgtggtggtaagaccaagaacatcatggatcaaatgatggaaatgatggagaagtatgccaacaacttggaggacattgtcaccgagcgcacgcgtctcctgtgcgaggaaaagatgaaaacggaggatctcctgcatcgcatgctaccgcaatcggtggctgaaaaattgaccatgggtcagggtgtcgagcccgtttcatatgatttggtaaccatatattttagcgacattgttggttttactgcaatgtcggcggagagcacaccgctgcaagtggtgaactttttgaatgatctctacacagtgttcgatcgcatcatacgcggctatgatgtctataaagttgaaaccattggagatgcttacatggtggtttcgggtctgccaattaagaacggagatcgacatgcaggcgagatagcttcgatggccctggagctgctccacgctgtcaagcagcaccgcatagcccatcgtcccaacgagacgctgaagctgcgcattggaatgcacacgggtccggtggtagcgggcgtggttggtctcaccatgccgagatactgcctttttggtgacaccgtgaatacagcgtcccggatggagagcaacggagaggcgctaaagattcacatttccaataagtgcaagctggcgctggacaaactgggtggtggctacataaccgagaaacgtggcctggtcaatatgaagggcaagggcgatgtggttacttggtggctaaccggagccaacgagaatgctattcagaagaagttagtggatatgatggacatgccgccgccgctgtttagtcgacctcgaaagagtccaaagctaaatcccgactcccgtcagccaagcatccaggccatgcacttctgcggcaccggatcaagacgccagagcacagttcccagggcgatggacggcgaatcaacgtatagcctccagggatccgtgagggaatcaccgcgcatggtcagcaaacgtgacagggatcgagagcgaccccccatcaatggactgggcgcagggcacttcgtggggggagctctcctcgaatccgcacaggcctcgcttagcacgctgaatcattccgaaacaaacgaaactaactgtgatatggatgggggatcgggaggagtgtcaggatctggatctggattagtgcgtcaacccaatgcactgcacaaaccgttggccatggtgcggccgcaccggattattagtgctgcccagctaccccaactgggagataacgatgatgactccgcagacacgctgttgcgggagtctcgctccctggatcccatgcccatgcagcaactgcgcaaacgtcacgacagggtaaagttgccgccctcgaagttgtccaagaacaattcccgatcgctggacacgggtgtatcgctgatcagtgggaatcccaacggtgaagtgcactcgagtcaactggatttggataacgagatgaccgccaacccggtggatgccaccgatggctacgacgatgagctgggccttctgatgcgccacgacaacggccaactgcctgctctccgctattcaggcagctttcccaacgctcagattagcattgttcctacaggaaggtcagcaggaggaggaggaggaggaagagaaggaggtgggagcaactgtgccaagcatctgaacaacaactgcaacggaggagtgaacgtcgaggatgatcttgagtcgcccctgctgcaacgccaggcatcgctgtcggtgccgccagaggagatgctggcgcacaacaaacgttggcactcactggagcacatggatggtcccggtgggcatggcggaaatagcgttagctatgccgccgatattgataaccgccaccccggagatctggacttcttcagcggttcctccaatcagcatcatagatccaaagcggctggtgggagtaagctgactaactggatgactaacatcttcaagggcaacggcgtgcgtagcggtgaggctaggcgagtaggaatcctgcccagcggtgtgcacggcgcacgaaccggattcacggatatggcggcatcggcagcagcccgcgatcgtgagagtatagtatagagataaggagaaggcagtgtagaaactaaggaagaaggagcaggatgaccaggatgagctaaatagccggatgagagagatggaaaagttactcaggaaccgagtcgagcaggaaacgatcgtcttttggcttacttctttgttttatgtattgtagtttgtatggatcgaacgaattgtgtgtctgtgttggaagtcatccacctataaacatataccagccggttcttaactctttgatcgctctggcattgcgggactctacatatgtgtcctatgggtttccaaactatttttattcgttttcgaggaaaatcctgcgatcccgaagtagaagcgagcagaagctgaagcgaaaatcatacatagcatatattttataactctacatacatacatattagagaagccgaaaaaaccgtctagtcacaaggtcttcagactagttattgttttatataaaataaacacacacccacacatctaaatgtacgtttgtaaatgtaacacataaacacaacgacacacatatttatacgacgatggagaatcaaaatcaaatattttatgtaaatgtaatcgaaattttctgctttccatacacgatgcgcagcagcaaacaaattatgcttaaacagaaactagttaatttatgtatttgaaaatcaaaacgagcgtgaaaaatgtaatgtatcaatgtgttttgctagtacgtagttaagtgcgtgtgattgtacgtaatatttaagtctctaaagctaaaataataattataattaattgaacgcgaattgtgagcagagaagagcgaaaatgcgcccgatgagaggtgttttagctgtatgtatgtatgtatgtatatttttaaatgaaaatttgttaaatttgccatatataaatacaaacgagaaactatta

SEQ ID NO: 41814 - protein, 1525 aa, DROSOPHILA
MTRWPFNLLLLLSVAVRDCSNHRTVLTVGYLTALTGDLKTRQGLAISGALTMALDEVNKDPNLLPNVYLDLRWNDTKGDTVLATKAITEMICDGIATIFGPEGPCYVEAIVSQSRNIPMISYKCAEYRASAIPTFARTEPPDTQVVKSLLALLRYYAWNKFSILYEDVWSPVADLLKDQATKRNMTINHKQSFIDNRVKCCEQMLDCCRSGYWYQLVQNTMNRTRIYVFLGAANSLVDFMSSMETAGLFARGEYMVIFVDMMVYSEREAEKYLRRVDQITFMSNCHSTENFNQMARSLLVVASTPPTKDYIQFTKQVQKYSSKPPFNLEIPRLFVESNFSKFISIYAAYLYDSVKLYAWAVDKMLREETRVLTDDVIFEVASNGTRVIDTIIKNRTYMSITGSKIKIDQYGDSEGNFSVLAYKPHKWNNSNNMPCNYHMVPVAYFHQGEEHPEYKLINGSIDWPSGGEKPADEPMCGFANELCKKDDTHYTSTVAAVVLGVLLFCSGVITMSIYRKWKIELEIEGLLWKIDPNEIKGYSGNEIVSSPSKVSLMSAQSYGSRWTNQFVTSTGRLRGAVVRIKELKFPRKRDISREIMKEMRLLRELRHDNINSFIGASVEPTRILLVTDYCAKGSLYDIIENEDIKLDDLFIASLIHDLIKGMIYIHNSQLVYHGNLKSSNCVVTSRWMLQVTDFGLHELRQCAENESIGEHQHYRNQLWRAPELLRNHIHGSQKGDVYAFAIIMYEIFSRKGPFGQINFEPKEIVDYVKKLPLKGEDPFRPEVESIIEAESCPDYVLACIRDCWAEDPEERPEFSVIRNRLKKMRGGKTKNIMDQMMEMMEKYANNLEDIVTERTRLLCEEKMKTEDLLHRMLPQSVAEKLTMGQGVEPVSYDLVTIYFSDIVGFTAMSAESTPLQVVNFLNDLYTVFDRIIRGYDVYKVETIGDAYMVVSGLPIKNGDRHAGEIASMALELLHAVKQHRIAHRPNETLKLRIGMHTGPVVAGVVGLTMPRYCLFGDTVNTASRMESNGEALKIHISNKCKLALDKLGGGYITEKRGLVNMKGKGDVVTWWLTGANENAIQKKLVDMMDMPPPLFSRPRKSPKLNPDSRQPSIQAMHFCGTGSRRQSTVPRAMDGESTYSLQGSVRESPRMVSKRDRDRERPPINGLGAGHFVGGALLESAQASLSTLNHSETNETNCDMDGGSGGVSGSGSGLVRQPNALHKPLAMVRPHRIISAAQLPQLGDNDDDSADTLLRESRSLDPMPMQQLRKRHDRVKLPPSKLSKNNSRSLDTGVSLISGNPNGEVHSSQLDLDNEMTANPVDATDGYDDELGLLMRHDNGQLPALRYSGSFPNAQISIVPTGRSAGGGGGGREGGGSNCAKHLNNNCNGGVNVEDDLESPLLQRQASLSVPPEEMLAHNKRWHSLEHMDGPGGHGGNSVSYAADIDNRHPGDLDFFSGSSNQHHRSKAAGGSKLTNWMTNIFKGNGVRSGEARRVGILPSGVHGARTGFTDMAASAAARDRESIV

SEQ ID NO: 41815 - DNA, 5035 bp, DROSOPHILA
cactgtaagtgtgatctcacgataagatctctgtaagttcttgcaactaaagccatcgattcattggaactccttttgaaatgtttatgcactgggaacagtgaaacgtatgggaagacttcgtgggttttatcaagagttcttcttgggcagaaagaaaacatttgttttttcctgtgagtattatatttgctccaaatgattatgtattattttacgcttttagtttattggaactccttttgaaatgtttatgcactgggaacagtgaaacgtatgggaagacttcgtgggttttatcaagagttcttcttgggcagaaagaaaacatttgttttttcctgtgagtattatatttgctccaaatgattatgtattattttacgcttttagtttattttttaacttcaatttaataagataactaagcattagtgacagatgttgacatatgtaagtacgtacgtatgtttaatgtaaaatacaatgtcaaaaatgaggtagcagttttcaagaccgcaaaataaagttgatttctcataaattcaaaaatataaaaaaaggaaatagtcatatttcttgaacataaaagaataataaatggatggacctcaatataattttgaatgtacgtccatgtagcgtcgatgagttagctgcgttagaggaacggcggaatttggaatacggggaagtttttaattaattattttttcgatatttagagctgagttctataaactgaactcgtacatagatagttagatcttttctttcttaacattatttaattttttttggaattcacctccaaataacggaaaaaaataaataaataggaaagttctccatgtttcatgtttcaccgtgctgcacttgaattttgactaccgatgaaaaggcgcgcgatttaaataatcgatgattgcaagcaactatcgatgctgaactctatttggaacagtcgattatatcgaataaacatctgtaatcgtttaaacctattgaaaacaaagcaattttcgtggtcttttggccagtatttaatataaattcgctggcaaaagtcgcgtattaattgcaaaagaacacatatttacctcccctcccccgattgcttgttgcgcctgtgcggattcttcttttgcatgtcgactgggcgggcaaaagaaagttagcacggagaacaacaacgcaggtgacttgacctcgcaacgaaggaggagcacatcgagatgcagagctacggccccggagcccagacagctccggccgtcaagcgccgcacggacagctacgaggctgcccagcaacagcagcagtcgccggagagcgacgaggagtacgtgaacaccaggatactgcggcgccaagtgcagctgcagtccactccggtggccccggtggtgcccatgcccatatccgccggtagtggcactgccccaccctccgtggatggccgcgaggagcagcccgaattccccggatcctcggctgcatcttaccaggaggagcgaatgcgcaggaagcttcagttcttctttatgaaccccattgagaaatggcaggccaagcggaaatttccgtacaagttcgttgtgcaggtgagttcacatccgggtttcatttgcagttcacatctggatgaatgctagttaattgaagtcgtgtgatgcgcggcgtttgggggcggaactcgggtgacacatctgaaccacttatttaggcatttctcttaatttacagacgcctttaaacagccgtctccgatcttcaatgtttgtctagatttcgagcatgtaaaatggggtagagtcaacacagtcttgattactttgcttgcattgttaagcccctccactcttatcgatgccttatctgataggtccaactattgttagcacaatacgtaataaacaaagtgaaaattcaagaattttatggctagaaactgcgtgtggacgcttttgtagaacccaaaaagttatttaatatgcgataaacatcgtggtcagggggatttcttttgtgcgatttttaatgattaatgcgaaaatgttatgactagtctttaagtctacacttagtctctaaggtctacaactaaattagatttcctgtagatacccaataaatatagtctgacgcatgctctaacataattcggcttctatttatagcccagcctctagatctctgaactggcgaccaagaaaaggtccgtcccctgaggccaaaaggcaaatagaaactttaaaagttatactataaacatttcttagcaactcaagaatttttctcttagattgtaaaaatctttctggtgacgatgcaattgtgcctttttgcccactcgcggtataaccacatcaactacacgggtgataaccgatttgccttctcacatctattcctgcgcggctgggattcttcccgggaggtggagagttatccgcctgctgtgggtccctttgctctatacctcaaatcggagttcttcgacactgtgcagtatgcagtcaatggctacgcgaatgtaagccgatctattggaccatacgactacccgacgcccaataacacaatgccgccactaaagctttgcctgcagaactatagagagggcaccatatttggctttaatgagtcctacattttcgatccacatatcgacgaggtgtgtgagcgactacctccgaacgtaaccaccattggggtggagaattacctcaggcagcgcgatgtggaggtcaattttgcatctcttgtctccgcacagttgacgttcaagataaagacggttaatttcaaggcaaatggtggacctctttctgctcctgattgttttcggtttgacatttccataacgtttaacaaccgagaccatgacgggcaaatgctgctctcactggatgcggaggcgacgcggctgaagtgccacggagcaacggacttcatatcagacgccaatttcgattccatgctgcgaagcgtacttaatatattcgtcctactaacatgcgcactatcctttgcactctgtacaagggctctgtggagagcatatctgctgagatgtacaactgtcaactttttccgttcgcaattcggcaaggagctgagctttgacggccgactggaattcgttaacttttggtgagtcctttgttttgtgttataaaaacctcggctatattggcaacaagtattacccataatgctgaaggttaggccgacgtaaacccaaaaattatcagaaaggttgcagactataataaaccgttttgctttcgcaggtacatcatgatcattttcaatgacgtccttttgatcattggatcagctctaaaagagcaaatcgagggaaggtacttggtggtggaccaatgggatacctgctcgctttttctgggaattggcaacctgcttgtttggttcggagtgctgcgctacctcggcttcttcaaaacctacaacgttgtgatactgacgctgaaaaaggcggcaccaaagattctgcgcttccttatcgccgccttgctgatctatgctggatttgtgttttgcggctggctgatcttgggaccctatcacatgaagttccgatcgctggctacaacgtcagagtgcttgtttgcgctgataaacggtgatgatatgttcgccacctttgccacgctttccagcaaggccacctggctgtggtggttctgccagatctacttgtactcgttcatatccttgtacatttatgtggtcctgtcgctgttcattgccgtcataatggatgcctacgacacgataaaggcgtattacaaggatggctttcccaccaccgatctcaaggcatttgtcggaacgcgcactgcagaggacattagttctggtgtcttcatgaccgacctggacgacttcgaccagacgagcttccttgacgtggtgaagagcatttgctgctgtggacggtgcggtcggcatcaggagcccgcccagcccaacagtggttacaccagcctttctagtattatgaagtaactgggtgcgctatgtcgacccgcaggtcttcattttgttttgttttgtcagctttatgtgtgtagtcaaacttgttgttagctttttgtattagtttgttaatttgccaaagcacttgaaccgagataagagaaaccataacgtacgtacctatgagaaattccaaaagcagctgctctgatcacaaacagcgggcatgttccgattttatctttcgcagcaatggctttaattcggtttgcagaaatataattctgactgaaattcatttttcttcaatacaaaaattacaaaatgtataagaccaaaaggaaaaactaaatgtaaggcgaatttgtgtcatttctgcgaaagtaaaatccgaaaaatgactaagaaagggcaccaagcaacgctgtacgctgggaaaccacaaagtcgcaaatttgtttttgtaacgcgagatattaagtgtgtgatataatgtggaaccagaatcggagaacaatggaaattatattagagggagctatttttgttagcgatatcgacatgggcctggtcaagatcttccatgaaaacgaatgcatccgaatcgagttttcatagaaatctgaaagtcacagcaaaaaattgtataaaactgcactggtcgacaaaatgagatttttggcagtctaagcaaatagttattttagaaagtgtttagttcggcataacacaacatcgatttttgtcgacttgtgtcaatttcagaagccatagataaggaaacattaggtaactatattttatgtgtacaatgaaaactttgtatttataaccaaaaaccacaaacacaataaactgtttatagaacgattgaattgaacaaattgcactttgaaccaaaatttattacaacgatatgcaacaaaaatgtgtacaacaaaaataattaattgtgagcttaaccaaaacgaggaacaatgaagtctacttttatcttcagatgtaggtggcgcaatgttttaatgttttg

SEQ ID NO: 41816 - DNA, 2194 bp, DROSOPHILA
cctattgaaaacaaagcaattttcgtggtcttttggccagtatttaatataaattcgctggcaaaagtcgcgtattaattgcaaaagaacacatatttacctcccctcccccgattgcttgttgcgcctgtgcggattcttcttttgcatgtcgactgggcgggcaaaagaaagttagcacggagaacaacaacgcaggtgacttgacctcgcaacgaaggaggagcacatcgagatgcagagctacggccccggagcccagacagctccggccgtcaagcgccgcacggacagctacgaggctgcccagcaacagcagcagtcgccggagagcgacgaggagtacgtgaacaccaggatactgcggcgccaagtgcagctgcagtccactccggtggccccggtggtgcccatgcccatatccgccggtagtggcactgccccaccctccgtggatggccgcgaggagcagcccgaattccccggatcctcggctgcatcttaccaggaggagcgaatgcgcaggaagcttcagttcttctttatgaaccccattgagaaatggcaggccaagcggaaatttccgtacaagttcgttgtgcagattgtaaaaatctttctggtgacgatgcaattgtgcctttttgcccactcgcggtataaccacatcaactacacgggtgataaccgatttgccttctcacatctattcctgcgcggctgggattcttcccgggaggtggagagttatccgcctgctgtgggtccctttgctctatacctcaaatcggagttcttcgacactgtgcagtatgcagtcaatggctacgcgaatgtaagccgatctattggaccatacgactacccgacgcccaataacacaatgccgccactaaagctttgcctgcagaactatagagagggcaccatatttggctttaatgagtcctacattttcgatccacatatcgacgaggtgtgtgagcgactacctccgaacgtaaccaccattggggtggagaattacctcaggcagcgcgatgtggaggtcaattttgcatctcttgtctccgcacagttgacgttcaagataaagacggttaatttcaaggcaaatggtggacctctttctgctcctgattgttttcggtttgacatttccataacgtttaacaaccgagaccatgacgggcaaatgctgctctcactggatgcggaggcgacgcggctgaagtgccacggagcaacggacttcatatcagacgccaatttcgattccatgctgcgaagcgtacttaatatattcgtcctactaacatgcgcactatcctttgcactctgtacaagggctctgtggagagcatatctgctgagatgtacaactgtcaactttttccgttcgcaattcggcaaggagctgagctttgacggccgactggaattcgttaacttttggtacatcatgatcattttcaatgacgtccttttgatcattggatcagctctaaaagagcaaatcgagggaaggtacttggtggtggaccaatgggatacctgctcgctttttctgggaattggcaacctgcttgtttggttcggagtgctgcgctacctcggcttcttcaaaacctacaacgttgtgatactgacgctgaaaaaggcggcaccaaagattctgcgcttccttatcgccgccttgctgatctatgctggatttgtgttttgcggctggctgatcttgggaccctatcacatgaagttccgatcgctggctacaacgtcagagtgcttgtttgcgctgataaacggtgatgatatgttcgccacctttgccacgctttccagcaaggccacctggctgtggtggttctgccagatctacttgtactcgttcatatccttgtacatttatgtggtcctgtcgctgttcattgccgtcataatggatgcctacgacacgataaaggcgtattacaaggatggctttcccaccaccgatctcaaggcatttgtcggaacgcgcactgcagaggacattagttctggtgtcttcatgaccgacctggacgacttcgaccagacgagcttccttgacgtggtgaagagcatttgctgctgtggacggtgcggtcggcatcaggagcccgcccagcccaacagtggttacaccagcctttctagtattatgaagtaa

SEQ ID NO: 41817 - protein, 652 aa, DROSOPHILA
MQSYGPGAQTAPAVKRRTDSYEAAQQQQQSPESDEEYVNTRILRRQVQLQSTPVAPVVPMPISAGSGTAPPSVDGREEQPEFPGSSAASYQEERMRRKLQFFFMNPIEKWQAKRKFPYKFVVQIVKIFLVTMQLCLFAHSRYNHINYTGDNRFAFSHLFLRGWDSSREVESYPPAVGPFALYLKSEFFDTVQYAVNGYANVSRSIGPYDYPTPNNTMPPLKLCLQNYREGTIFGFNESYIFDPHIDEVCERLPPNVTTIGVENYLRQRDVEVNFASLVSAQLTFKIKTVNFKANGGPLSAPDCFRFDISITFNNRDHDGQMLLSLDAEATRLKCHGATDFISDANFDSMLRSVLNIFVLLTCALSFALCTRALWRAYLLRCTTVNFFRSQFGKELSFDGRLEFVNFWYIMIIFNDVLLIIGSALKEQIEGRYLVVDQWDTCSLFLGIGNLLVWFGVLRYLGFFKTYNVVILTLKKAAPKILRFLIAALLIYAGFVFCGWLILGPYHMKFRSLATTSECLFALINGDDMFATFATLSSKATWLWWFCQIYLYSFISLYIYVVLSLFIAVIMDAYDTIKAYYKDGFPTTDLKAFVGTRTAEDISSGVFMTDLDDFDQTSFLDVVKSICCCGRCGRHQEPAQPNSGYTSLSSIMK

SEQ ID NO: 41818 - DNA, 3839 bp, DROSOPHILA
aagtgaaagttaattaagttagattaagatttgaacacttattgttagtctcttaacacaaagggaagattcaataaataataaaaattaaaaaaaaaaaaaaaaaaaaagaaatttgcactttactcatcttgagccaagtagaaaagatttgacacaacgtacaagtatacaaattcgtatcaatcatacgcactgtggactattatttaactagttaccctagtgaatttaaatacccgaagtttggaagataccaaaacaaaagtacgtggatacgtgtatgtgggatgataaaaaatgcatttttggcaagtgtgtgtgtgtgtgtttagctgtttgggcacgcccaagtggatcgtttggcctgacacacatccgacaccctgcccaaaatggcgagggctagtccctagagttcgttgccaatcgagagacaccgcagacgttctggaatccgccattacggccagtgcataggtgccatttgccaggcactccaaacttcgcacacttgcagtccacaagcacggcggctacacttctcacctcaccgcagttcgaagtcgatagccgccaccattttgcatataaaagagtgatcgcgtacgtgccgcacttctctcgtcttttcaaccacgatccggtcacgatcggacccagacttgtgcaacacgaacactcacagagctattccggcccaaaagccaattggccagaaagccagaaaggcagaaaagcagaaagccaaacagccaaaaagccgggcttgccagtgatcagcgatcggcgatcggcaatcagtggctcaaagcttttgtggatcgcattgggcactaccccagcagagctttccaaaacccaccacaggtgctcgaaagagacgtcgccgccgccgccgtgtaataaaagaagcaattttgacttcgtctggggctttggtgtcagagaggggttcgagaaattgtgcgcggcatcgtagcaaacagtgtaaatggagctttgatagcgatcggaaggacaagactagagctccaagaagtgtttttttacccaaagtgtgtttgccaggaaaaaagaaacatcgatataagactctaaaaaagtgtgcagctaataccagcgatcgatccaatcccaacaggtccacctaaagatggcaaaactgtttgtggtttttgccgttttggctctggcggcctttaacgaaggtaaggtctccaatgaaacgcacatattttatgcctcgccgtagtcataagttttaattatcgaactgcaatttgcatttggctggcggaagttgttgccaagacatcaattaaaactgctcgacggccttcacagagaaacggaaacaagaaggctggcaattgaaaagccgttttcgagatgcagatgtgagtggagtggcgtggcgtgtcgtaaccttgattatgcgaaaaggactcgtccggctgtgactagttggtaaacaactttcgttttccgaagggacaaacgattgtttaccttgagtcgcgtagaaacccattcagcttgacacttgagctctgtgaatgcagttctctgaaactcaatacgaatctcaatccgagaccacttgactttgacaggccatcgatcatgattagagtcgcagcataaacatcgccgtgttgctgtccgtcaattaacggttatgcaaatgcggcaactccctcgacttcaaaaaattcaaatttaaactgagattcaaatccgaatccgattgcgatttgaaaaatgcgcgacaagtcggctgttgccaagcgtcgcgagatgcaaaatgtcaaagttagagcgcaggcgcagcagcgagtttctaaattcgcttttcagatttcggtttttatttttgcaccgacatttatttgtgtttctgcgctcggttctctggtgacatcgtatttcataatgccaaacgtgtttttttttttcggccaacacaccaagcaaccaaccagcccgaccgcatgccatgtctatttagcccggccaaatccactcgtatctgtatctctgcagctgtagctgtatctgtgtttttgtaacaggaagtgccaggccatggcgacatggaaccaacccaacccaatccaagccaactcaatccacacccaacccacattcgccgtggaaattcttccggttttgcaactccaactgcaattgcatccatttatatttccatttccctcgtttcgacttgcagccagtgccagcgatccgctcctgcgatacaagcgacaggccaccaccgaggagaccaagaaggaggagtccttcgagaaggagctgtgcaaggacaaggacgccggcgagtggttccgcctggtggccggcgagggcgacaattgccgcgacgtcatccaatgtacctcatcggtaagttacaaactatctatagttgtttgtaaatataattgtagatacatggaatgaaagcttattaacatcacttttcatgagggattaccatgtctatcaatacaatatatcttcataaaatatacttaatattattactttgtatttatttatttttaaacagggcctgcaagccatccgttgccctgctggtctgtacttcgatatcgagaagcagacttgcgactggaaggagtcggtgaagaactgcaagtccaagaacaaggagcgccgcgtgaagcccctgctccatacggatgagcccctgtgccaggacggattcctcgcctgcggcgatggaaactgcattgagcgcggactcttctgcaacggcgagaaggattgctcggatggatccgatgagaacacctgtggtgagtactttgaataaatattttgtttttaaggattgccttaggtttttaatagcttttggcacaccttagtcgaagcacttaacagaagtaataaaaagtgtaattagtatgcattagccattttatgcatgatttataaaaaaatccaaaaacttaaattgcaataattagacattaggccaactatggccaaggaccaataaaatggaattaccaaaaataattgcctcaatattggggataatgcgggctcgctccactttttttttgtgagcactttttcatttaagtttgacatttgacaacaataattcagtgtgattcagcagaaattgaggagggcgtcaatagaagtaagccgccgccaagtgttgtttataggattggctttcccaaaagcccgaggttgagtgctattactccatcggctcaaatgatatatgtaagccttcaagtggctcgtgatatgggtgcacactttgtcagataatatgccaatagcataaataattgatcttatgtttcctttcttgatacatccaaatccgaatccgaatccaatatctttctctggtcgaaatttctttagttactccagtcgcaccttaaaaccggttgacggcatttaggcattacctcagcgaaggaggaacacttcaaactccactctcgaaagcactgacacaacggcacacaagtgtctgaatttcgtgtttctttcggtttttggaatttggaaggggtttggggattccaatgacggccacatgcaatggaaccccgtctgcagcacagatcccacgaaccggtttcgcaaagccctttagctccatcgtatctcggagccagctgaaccgccgcactcagctcgacgggatcagctccgatctcgaatggacagcgatctttgggtggaaatgtcaagtgtgaagtggaaacgaaatgtcagacacggctggtggccagctggctaaaacagagggggttgggggaattaaggcagtcatgtatgga

SEQ ID NO: 41819 - DNA, 651 bp, DROSOPHILA
ctttgatagcgatcggaaggacaagactagagctccaagaagtgtttttttacccaaagtgtgtttgccaggaaaaaagaaacatcgatataagactctaaaaaagtgtgcagctaataccagcgatcgatccaatcccaacaggtccacctaaagatggcaaaactgtttgtggtttttgccgttttggctctggcggcctttaacgaagccagtgccagcgatccgctcctgcgatacaagcgacaggccaccaccgaggagaccaagaaggaggagtccttcgagaaggagctgtgcaaggacaaggacgccggcgagtggttccgcctggtggccggcgagggcgacaattgccgcgacgtcatccaatgtacctcatcgggcctgcaagccatccgttgccctgctggtctgtacttcgatatcgagaagcagacttgcgactggaaggagtcggtgaagaactgcaagtccaagaacaaggagcgccgcgtgaagcccctgctccatacggatgagcccctgtgccaggacggattcctcgcctgcggcgatggaaactgcattgagcgcggactcttctgcaacggcgagaaggattgctcggatggatccgatgagaacacctgtggtgagtactttgaataa

SEQ ID NO: 41820 - protein, 164 aa, DROSOPHILA
MAKLFVVFAVLALAAFNEASASDPLLRYKRQATTEETKKEESFEKELCKDKDAGEWFRLVAGEGDNCRDVIQCTSSGLQAIRCPAGLYFDIEKQTCDWKESVKNCKSKNKERRVKPLLHTDEPLCQDGFLACGDGNCIERGLFCNGEKDCSDGSDENTCGEYFE

SEQ ID NO: 41821 - DNA, 4404 bp, DROSOPHILA
ctttatatcagccacacaatacacctgcgctacaccctgagctgtcgctcagattctcaggcagaccaaatacacacccccattgtgtaatatctatgtaattcaataaaggcaggcaaaggaaggaaatgcagggaagtccagttccgggccgagaactcccaggaaacgtagttaaagcccagaaattgtctagtaaattcgttccagtctcttcaactctgttccttcacattgctgcagcccgccctttcaacgaactttagcttgcgtgtaaatcaatttgacgcattttttctcctccgacttgtctgaaacctagtagctgcactgagatcgaggaagagatggaatgaccggatcaaaacaatgagttctataaatagagaagatttctgggcttggcattcacaatccacaaatggttttaaaatccagtattcgttagggaaaactgattcaacccattaatgtaatgcacaaattccgaatgtttcatatattggttgttttgttttttaaaataatgcatttaatgaaatttgaaaagagtaccaatagcatagcctttgcttggaatcgaatagtgcataaatagactggatcaccaaagatattgtttaattaatttgattgaattcaaaaaactttttatctttggctgcaaaagttagttgaaactttttgtaaaagtggtatgtgtagtgcacaagttccttggcctgactaccgcgtaaaaatcgaaataaaagtgaccggatgtaaaaacttgttctttactaggttatatttacccagtcgtatgtgtttttatgagaacaaatagtttttagtaactataaaataatttaaaagatttattaatgtattatgtaaattaaatcctgaatactaaacatttagtaaaacttaacataaaaaataaatattataattcaaagggaaatcttaaaatggcttagaaaaaatcaatctgggtccttaaaactgtgagcctgttgtcagttgagttgaaatttggaaacccgtaatgagtcatccttaaatttattgtaatgcgcttatacttgaccttttttggaatatcaatagtttttttggcgaccttgcttcaaattcttgccatacacagcactgggaattgcaccttcgcaaagaatgtcactctaaagttcgtgtgcaagggaaatgtccccaaggatatgtatacaatgtttcgggacaaccgagctcctcccgacactccctacagtgtttggcagaccgaagaggacgactctgctcttctggtatcgttttacaccacgatgtttccaaactatgataccatcaatctgcaggaaggcgagatggatcttggccaattctttctagccaccaagggaagaaataccaacgatcttttgtttgtgacaccgtctaccctccactgcttccccttcggtctgcgctatacgaatgagctaaaaaggcactgtctgggccaagacataagtgagggaggtgtccttaccaagaagcccattattcactacggctcgcttagcataaaaacccccgacttgccgaagagtgatgcaacttcgacaagtgtgaaaagaaacctgcttcttgtcgtgtgtgcggtgatcacttactaaaatgaaagttttgtacccgaaaaatctaaatttaatgtaaaaatgatattgttcaaaattgaatgaataaattgttgcgctagaagaagcgtcgctttccaaatgtcagccatgatttattagtctacatttctacatgccataccctatggacatcaacctacaaagccatgacatggaaactgtggctgctcccgatcgcatttcttctgtcctcttccgaggcctccttcgactcctgctacttcatgctagaaaacgaaattccatttacgctggtttgtaaggccgaatacagcaccgacctgaagctgagctaccgagacatttggctcagtgccgacgtaccctactggctttggtggagacgactgcccagtgtggagctgctgatctccttttatgagtcgcccatatcgccgtgtgagaacgttagcctgagcctcaactgccttcattgtgctgactccgatgagctaggcatacacattcgaccggagagcatccactgttttgacttctccttctcctacgtgcgggacctgatgaagcactgtggactgtcgccggccacgaagttcgatcgcgtcgccattttgtatgcgcggcgggttcccaatcgtgatattccgtctggggccgccaggactcggccttggaccctgggactcaggcttctctaagaaagtcgatgctaagcggatgctaaacgcagggccgggggcaactagagaatcttctgtcaagcgggggagaagtgatcggaaccgtttttattctcctggaaattcccatcaaatttttcgaaaatgatcaaagaatcatttgcctataagcaatgccagtgcgcctctcaagcgcacgaagcctgaataacaagtggatcgaccgttcgtcgctccgtcctcctcagcatacaaagcaacccaagcatcctcggcacgccctgcgcccggtctgcaacccaccgccttcgactacgactttaccgccgcccaagctcaaaccacatccgccgtgcccgctgttccggccagtgtccttcctgctgctcctgctcatcctcggaccagtgtcggcagcatgcgaggaccagaactgcaccttcctcgagggctacatcctgcagtacgtgtgtcacagcagctacatagaggagattcggctgcagcacaaggaccgcatcccggccatcgggaccccgtacgccatctggaagcgtcccgacacccacgacccgtcctacctgctcatttccttctacgactcgccgcttttctcctgctacacagtggttatgcacaacggcaagttttactgcgacgggcgcaacttcatagagccgaacacggaggtcgagcagatgcactgccttaactatccgttccactacaccttacacctgtacaatgcgtgtgccaagaagccgtgctcggaaggatcgccacccatcgcagtggcgatcgcctacatgaagagcaatatcaggaggactagtgaggctgtacctcgcgttaaacgccctgcggctgtcccccttcttgtgcccataattccccttctcgtatcacgatattttggtattttactatgtcaataaaatggttccgaatagttatattgtcgcttaatgccgggcagggcaacctcaatccttcatctgcggcgcttctatccagccacctaatccgcgtccacatcaatcccctcgtttgccctgtgattgcatgcattatctcgaagctgcttattttactcgggtaaacaaaataggcgggtcctcgccgactagcagttcagcagagtccattgtagttggccttagtttctgtagtgctgtagttgctgttgtggcatgaaattttagacatcccaacaatggcagccagatgcaggcatggacagccgcatacagaggctcagctaactgccattttacgcacacagccggagattcgtcggaaatgggaggatgggggggcatcacatttcattgtcgtcattgtcattggcgttggcgtaatttatgtgcttatatggactgccgccatattggtctgtggtgctcaacacttgcgtgtagatgtttgggaaaggactttaagcgcattcattaagtttatagttttaaagggctctgtgtcgcaaatgaaacaagcagagcaaagctctttttaaattttattggtataaattcacttgggacaaattttgaacagtgtgcgaaacagctccttattctggcgtccttgggagacagacgattgcgtggtcaatggagctgaggatccttccaatcccagcacttcggtattgttgcatccgctcttgacattctccagcttacgaactatgtagagcagcacgaacatcgagcacaagcgcattttgcttcaagctggcaaactggtagttcacttgaatttcaaatatattggatgacagcagtttcaatctttgaagaaagacgcacaccaggcaggccagccagatttccaaaccagggattcccctagaagatccactttttgactctgttttggcagcgtaatgaatcgtagcctctcccttccactcaacattgaagaagcgcagagctattggcttggtgcattcgtataacaagtcatctacgtaggtcattagttccttgtggcagaaaaactgcgtgccggacactattaaaggtgatttactgactccgcaaaagaaatcgagttcatcgtccagctggatcgtggcgttacaactttgcactggagag

SEQ ID NO: 41822 - DNA, 1852 bp, DROSOPHILA
gtcagttgagttgaaatttggaaacccgtaatgagtcatccttaaatttattgtaatgcgcttatacttgaccttttttggaatatcaatagtttttttggcgaccttgcttcaaattcttgccatacacagcactgggaattgcaccttcgcaaagaatgtcactctaaagttcgtgtgcaagggaaatgtccccaaggatatgtatacaatgtttcgggacaaccgagctcctcccgacactccctacagtgtttggcagaccgaagaggacgactctgctcttctggtatcgttttacaccacgatgtttccaaactatgataccatcaatctgcaggaaggcgagatggatcttggccaattctttctagccaccaagggaagaaataccaacgatcttttgtttgtgacaccgtctaccctccactgcttccccttcggtctgcgctatacgaatgagctaaaaaggcactgtctgggccaagacataagtgagggaggtgtccttaccaagaagcccattattcactacggctcgcttagcataaaaacccccgacttgccgaagagtgatgcaacttcgacaaccatgacatggaaactgtggctgctcccgatcgcatttcttctgtcctcttccgaggcctccttcgactcctgctacttcatgctagaaaacgaaattccatttacgctggtttgtaaggccgaatacagcaccgacctgaagctgagctaccgagacatttggctcagtgccgacgtaccctactggctttggtggagacgactgcccagtgtggagctgctgatctccttttatgagtcgcccatatcgccgtgtgagaacgttagcctgagcctcaactgccttcattgtgctgactccgatgagctaggcatacacattcgaccggagagcatccactgttttgacttctccttctcctacgtgcgggacctgatgaagcactgtggactgtcgccggccacgaagttcgatcgcgtcgccattttgtatgcgcggcgggttcccaatccaatgccagtgcgcctctcaagcgcacgaagcctgaataacaagtggatcgaccgttcgtcgctccgtcctcctcagcatacaaagcaacccaagcatcctcggcacgccctgcgcccggtctgcaacccaccgccttcgactacgactttaccgccgcccaagctcaaaccacatccgccgtgcccgctgttccggccagtgtccttcctgctgctcctgctcatcctcggaccagtgtcggcagcatgcgaggaccagaactgcaccttcctcgagggctacatcctgcagtacgtgtgtcacagcagctacatagaggagattcggctgcagcacaaggaccgcatcccggccatcgggaccccgtacgccatctggaagcgtcccgacacccacgacccgtcctacctgctcatttccttctacgactcgccgcttttctcctgctacacagtggttatgcacaacggcaagttttactgcgacgggcgcaacttcatagagccgaacacggaggtcgagcagatgcactgccttaactatccgttccactacaccttacacctgtacaatgcgtgtgccaagaagccgtgctcggaaggatcgccacccatcgcagtggcgatcgcctacatgaagagcaatatcaggaggactattatattgtcgcttaatgccgggcagggcaacctcaatccttcatctgcggcgcttctatccagccacctaatccgcgtccacatcaatcccctcgtttgccctgtgattgcatgcattatctcgaagctgcttattttactcgggtaa

SEQ ID NO: 41823 - protein, 546 aa, DROSOPHILA
MFRDNRAPPDTPYSVWQTEEDDSALLVSFYTTMFPNYDTINLQEGEMDLGQFFLATKGRNTNDLLFVTPSTLHCFPFGLRYTNELKRHCLGQDISEGGVLTKKPIIHYGSLSIKTPDLPKSDATSTTMTWKLWLLPIAFLLSSSEASFDSCYFMLENEIPFTLVCKAEYSTDLKLSYRDIWLSADVPYWLWWRRLPSVELLISFYESPISPCENVSLSLNCLHCADSDELGIHIRPESIHCFDFSFSYVRDLMKHCGLSPATKFDRVAILYARRVPNPMPVRLSSARSLNNKWIDRSSLRPPQHTKQPKHPRHALRPVCNPPPSTTTLPPPKLKPHPPCPLFRPVSFLLLLLILGPVSAACEDQNCTFLEGYILQYVCHSSYIEEIRLQHKDRIPAIGTPYAIWKRPDTHDPSYLLISFYDSPLFSCYTVVMHNGKFYCDGRNFIEPNTEVEQMHCLNYPFHYTLHLYNACAKKPCSEGSPPIAVAIAYMKSNIRRTIILSLNAGQGNLNPSSAALLSSHLIRVHINPLVCPVIACIISKLLILLG

SEQ ID NO: 41824 - DNA, 4175 bp, DROSOPHILA
tacagcagaccgcgcaaaatcgcaactaattcataaaaatactaataacatgcccaaacagtgagtgccataagtttacgctcacttcgttcttcttgcacgaacgacatttctcaagtggctaacctggcatataaaggctgcctcaacaagccaattaagtgccaaataaatctggctaactagcttctgcttctgctagattcaccacctgcgattgcgatccgtaatgtatatatctatctatctatctataaaatgcgaaaatttgcacttctgcctgacttttgaaatgcccagccgagcagaaagccatgcccgcgatcgcaaacaattgaataactccagtccaagtttagaccacttcgcctttgggcccaatgaggaagctcacgtctccgggaggcgaagcaaatggcaggcgattaaaagagcgattaactggtcatacatcgtagttttaaaaagagcgacaaagtaacgaggaaagtgctccgaaaaaatgttgccaaatagtgtagttttacttgggcaatagccataaagcctataactccaccacatgtgtattctcttcaagagaatcccatgtttttagctaacttcagattaaaagtgcatatgagaattggcaacaaatgagaatgacttgtgcaaaatgataaactaatatcaaatcgattcgaaaagaagtgttccaagaattcaatcaacacttttgattaatgaatagattcagctacacattaccgattctcggaagtacgttaagatcccaccgaatttagccaaaaacaaaattccccacaattatttctcggccacaattcatcccaatcttggcaagctcctcttcggcaataatgagccagctcacatacattcggcaatctccgcggcaatctctgcaaaaataaataaaatgagcaaaagccaaaagccctaaaaagtcaataatgccggtggatctggtgaataccgagtgaataccgaatgctgaatgctgaatgctgctgaaccggtccgggatgacataacagccgtctttaacgacagattattggccaatattggcagaaaggaggggaatgaaagcggagccacggcgcaaaaaggtcaacaaagagacaaagccggcaaaatggaaaacacgcaaaaaaaaaaacgagtgaaaaacttgatggacaaaatgctttggcctttacatgccgtgcctgccatttcactttggccaataccaataccaattccaaatgccaaatgagacagcggcaacaataattgcggctaatatctttggaaactttcgcaattgattccgtttgacgagccggcaagtgcaaggcttaccaattggtaattgagtggaccatcatttgcatttggcccgataatcgagcgccatattttcgggatgggtgtggtgtggctaataagcgaacgctatctgcatttcaaagcggcttcgcttgattaacaacacttgaaaattgctcaaaacaaagccaagaaaaatcccaataataataataatgaaagaaacatatgccgatgaaaaactcgcattgtgcagacattttccattcactttgcgtttcggttttcccacctctcttgattgcttttccagaccacttcggttcattgaaccaaccccgtaccccctgcccgccaagctttatcccctcaccgttggctaattgcttaaatatttatatgaaaagttaagtgaacttttgccggccaggtgaatgcaggcagaatatcaattgttgattggttatttgatgggaaaagatgacaggctgtttattgtaatgaatttgtattttacagggtatcgattatctctagttatatccctacatatatctcttgcttacttattttaagaatgtgctttacacaccccatttatatgcaagacttctccttcaattcacttcagtttgaggaatctttcgtaatgtaccttatgatttcctcgtcctaaccccataatttgtaccattttgccccgcccacagatatcgacaacgatcccaaccgtgccccgccctgcgatcccgccgtgtgcgtcctgcccgattgcttctgctcggaggatggtacatcgattcccggcgacctgcccgccaaggatgtgcccatgatgatcaccatcacgttcgacgacgccatcaacaacaacaacatcgagctgtacaaggagatcttcaaggatcgcaagaaccccaacggctgctccatcaaggccacctacttcgtgtcgcacaagtacaccaactactcggcggtgcaggagacggcacgcaaaggacacgagatcgcagtgcactcgatcacgcacaacgacgaggagcgcttctggtcgaacgccaccgtggacgactgggccaaggagatggccggcatgaggatcattacggagaagttcgccaacattacggataactcggtggtgggcgtgcgtgctccctacctgcgcgtgggcggcaacaaccagttcaccatgatggaggagcaggccttcctgtacgactccaccatcaccgctccgctgtcgaacccgccactatggccctacaccatgtacttccggatgccccaccgctgccacggcaacctgcagagctgccccacccgatcccacgccgtgtgggagatggtgatgaacgagctggaccgtcgcgaggatcccgtcaacgatgagtacctgcccggctgcgccatggtggactcctgctcgaacatcctgaccggtgaccagttctacaacttcctgaaccacaacttcgaccgtcactacgaccagaaccgcgctcccctgggtctgtacttccacgccgcctggctgaagaacaatcccgagttcctcgacgccttcctctactggatcgacgagatcctggccaaccacaacgacgtgtacttcgtgaccatgacccaggtgatccagtggatgcagaatccacgcaccatcagcgaggtcaagaactttgagccctggagggagaagtgcgtggtcgagggcaagcccgcctgctgggtgcccaacacctgcaagctgacctccaaggaggttcccggggagaccatcaacctgcagacctgcgtccgatgccccaacaactacccatgggtcagcgatcccactggcgatggtttcttctaagtcagcgatcttagccccatgccccccttgagccccgagctctaacccaaactctaacccaaacttaacccatacctatcacacaccaaaccctaagccctagcccaacacaaactcgatcgattatcgcccatttgaatttgaattgcaagacttttacgagtgcactcgtactctctatttgactgatttcgaggatcaagtctttgctgtgttacggttatgttaaatcaaaaatgaaatgaaattcgacatgaagacaaaacaaaagatattcaaaactgcaagccacaacatccgaacttgtgtttacactcttttttgtagttttacgttaatttgtatgtgtatatttaaataaaagaaaaaaaatgaaataaacgaaaaaaccacaaaaaatcaagaaaaaccaaatactgaatttttaatgccgcctgtcgtttgtttcaaccagtcaaaataacattaagtatttagttaccagctagcaacagaaatatgatttctaagaagccaagagaggagtaaaacattgacagccccggcccatttagtatgccatctacccactgacttactaaccagtttcttcggaattaacgaatttgaataacaataacgcgtttcggtggggctcagtttcggtttcagttggagaatcccctcctatgtgcatttcatatgcaaatttcgcctatgccgagacaggttttggacaccccaaaacgccgatgggcaccaaagtgtcggatccggtctagaatgagatatatcggtctatattatacggccataaagtatgaaaggctccaagattcgctaattcgtatgcgcacaaatcaatgcagagggagatttcaatatgaatgtgaatctgaggatgggcaaacaggttcttgggctgggtattcgtgtattcgattcgattcgattcgatttggttcgaattgacttgacttgggctctttgcgcaatggctaacacatcgaaaagccgctaa

SEQ ID NO: 41825 - DNA, 1263 bp, DROSOPHILA
atgctgaatgctgctgaaccggtccgggatgacataacagccgtctttaacgacagattattggccaatattggcagaaaggaggggaatgaaagcggagccacggcgcaaaaagatatcgacaacgatcccaaccgtgccccgccctgcgatcccgccgtgtgcgtcctgcccgattgcttctgctcggaggatggtacatcgattcccggcgacctgcccgccaaggatgtgcccatgatgatcaccatcacgttcgacgacgccatcaacaacaacaacatcgagctgtacaaggagatcttcaaggatcgcaagaaccccaacggctgctccatcaaggccacctacttcgtgtcgcacaagtacaccaactactcggcggtgcaggagacggcacgcaaaggacacgagatcgcagtgcactcgatcacgcacaacgacgaggagcgcttctggtcgaacgccaccgtggacgactgggccaaggagatggccggcatgaggatcattacggagaagttcgccaacattacggataactcggtggtgggcgtgcgtgctccctacctgcgcgtgggcggcaacaaccagttcaccatgatggaggagcaggccttcctgtacgactccaccatcaccgctccgctgtcgaacccgccactatggccctacaccatgtacttccggatgccccaccgctgccacggcaacctgcagagctgccccacccgatcccacgccgtgtgggagatggtgatgaacgagctggaccgtcgcgaggatcccgtcaacgatgagtacctgcccggctgcgccatggtggactcctgctcgaacatcctgaccggtgaccagttctacaacttcctgaaccacaacttcgaccgtcactacgaccagaaccgcgctcccctgggtctgtacttccacgccgcctggctgaagaacaatcccgagttcctcgacgccttcctctactggatcgacgagatcctggccaaccacaacgacgtgtacttcgtgaccatgacccaggtgatccagtggatgcagaatccacgcaccatcagcgaggtcaagaactttgagccctggagggagaagtgcgtggtcgagggcaagcccgcctgctgggtgcccaacacctgcaagctgacctccaaggaggttcccggggagaccatcaacctgcagacctgcgtccgatgccccaacaactacccatgggtcagcgatcccactggcgatggtttcttctaa

SEQ ID NO: 41826 - protein, 420 aa, DROSOPHILA
MLNAAEPVRDDITAVFNDRLLANIGRKEGNESGATAQKDIDNDPNRAPPCDPAVCVLPDCFCSEDGTSIPGDLPAKDVPMMITITFDDAINNNNIELYKEIFKDRKNPNGCSIKATYFVSHKYTNYSAVQETARKGHEIAVHSITHNDEERFWSNATVDDWAKEMAGMRIITEKFANITDNSVVGVRAPYLRVGGNNQFTMMEEQAFLYDSTITAPLSNPPLWPYTMYFRMPHRCHGNLQSCPTRSHAVWEMVMNELDRREDPVNDEYLPGCAMVDSCSNILTGDQFYNFLNHNFDRHYDQNRAPLGLYFHAAWLKNNPEFLDAFLYWIDEILANHNDVYFVTMTQVIQWMQNPRTISEVKNFEPWREKCVVEGKPACWVPNTCKLTSKEVPGETINLQTCVRCPNNYPWVSDPTGDGFF

SEQ ID NO: 41827 - DNA, 2430 bp, DROSOPHILA
taagtcatactcgaaggactcctaaatatactaaccgaaaccctcacggcagttttgtgcctctggaactcctggcggtagatctcgttcatggcgcgaagggcaaacttggtggccggataaatgtttagcgagggaagctggggtcccaggttgggtacctggtagcccgccacgctgttcacgatgaccacgtggccctcggttcctcgccttttcatcgaacggaaggactcgcggacacagtaaacggtgcccatgatgtttgtttctatggtggatcgcatagcaggaccatcatcccgctcgctgagttctccggtaccaatgatcccagcattgctcaccaacacgtccactccacccaattgccggcaggtccagtcgaaggccttcaaaacctgatcctcctgcgtaatgtcgcacttgattgcgtgaagccgagactgctgttcgagactcagaccactgcgaagcttctcaactcgctcatgccgcctggccagacccaccactatcattcctgctccgatcaaggcacgggtgcatgctgcaccaattccggcactcgctccgctcaccacggccactttattgcaccaacgctccatgttaccgttccacagacgtctaaacaccgaatgactggccatttggcgttcgcataagaccaaaaccacaatgaagccataaaaatcaacgcactacttattaattgcactcgcccacttaagtaggtcactcaccccacgttcaaacgactggtaacctctgaaaactagtcaatttggctataggagtcaagtttacattttatttaattatcattaaaaatgagtgttatgcaggtgtggaatattttggattggatttagaagtgattagaaagctcggcttacaaaagttgacgcaaatgaacataatttgtactataataacaaccaaaatttgtatatcattgaagcaatattttataatattatgctttaactatttgtttatttggttaagttaagttacttcgatttgttcaatatttatttttgcatcatccccaagtttacgttttatctcagacttggcctgaagacttccactcttggacacgtctctgcagagtctgcaagcgactgcccagatcttcggatatttttgggttgttcttggccaagaagttctgctgctgcatgctggccacgttcaaaggacctagtatccttccagtcgttggtcgctctatcttgatgactcgaggctgttgctctgacacaggcatcttgcgccgatttggaatcttaagcataatttggttcgcattcactcgctccaaatggctctatcagttcgaatgattttaaatatacacaaattattttaaacaagattttaatttgccaaggcctagtctgtggtgaagtgttaggtcaagcctactaggattgatttacaactaggatttacagctaaagtaatatgttatatttttaaaatcaatataccgtaaggtatacccttacatactagaaatgaaactagcattggccagtcgaagtttatataccctttcaataataagctatagcttaaaaaaaaaaaagtgggaagtaaaacgatgagtaacgggtttagcaaacatatcttaaccacaatacattgtgatccataaaaagaactttacataaattccggtatctagtaataattaaagttcaactcgtgtaattgtttgttgcttgtcggcttttgttggaaaacggttccaaatggttgcacacggagatggtggcagtgatcaaataagagcaacgagcattgcgccccatgcatgggtttctcttttcagtctccagtttaaaatttttggtggatggacagcgttttcggttttgttttgctaagctaagcgcgacgcttgaaaagtttcaatgagagttacccatcatggggtttgtagagagttacgagcgaattctctgtggtctcttactttcgcttctctgaacttgccacagaatgttgcatctccgcactgtttagtttaaattgtactgtccatggcgtcgcattgaatatatccgaattgaaatacacgggtgctgatttgaagtttcggatttggagtatctacacatctacactgttgagcatgcagtacatccagatatacatcatcgccatcactgatctttgtacatgtcgcaataattgcatttcgtcataaaacgtttggttctaattaagtttgaaagacccacacccgcattgatgtaaacatggcctgctgttttaattacaaatttgtgctcaatctatgtaactttttgtttttggtgagtgactaactaaagtgaaagttgtatagcttcctgctttagcaagtttagtagttcctatatgctatatttattgactaattgcatttttcagata

SEQ ID NO: 41828 - DNA, 430 bp, DROSOPHILA
gcttgacctaacacttcaccacagactaggccttggcaaattaaaatcttgtttaaaataatttgtgtatatttaaaatcattcgaactgatagagccatttggagcgagtgaatgcgaaccaaattatgcttaagattccaaatcggcgcaagatgcctgtgtcagagcaacagcctcgagtcatcaagatagagcgaccaacgactggaaggatactaggtcctttgaacgtggccagcatgcagcagcagaacttcttggccaagaacaacccaaaaatatccgaagatctgggcagtcgcttgcagactctgcagagacgtgtccaagagtggaagtcttcaggccaagtctgagataaaacgtaaacttggggatgatgcaaaaataaatattgaacaaatcgaagtaacttaacttaaccaaat

SEQ ID NO: 41829 - protein, 76 aa, DROSOPHILA
MLKIPNRRKMPVSEQQPRVIKIERPTTGRILGPLNVASMQQQNFLAKNNPKISEDLGSRLQTLQRRVQEWKSSGQV

SEQ ID NO: 41830 - DNA, 6726 bp, DROSOPHILA
ctttctactttctacttaccatttgtcactttccattcctccacaggcacactgtctggtcacgagaaccgcatcacttgcatcagcctgtgccccaatggcatgtgcctggcgtccaccagttgggatcagcaagtgcgtctgtggctctaatctgtgcctctgatctgggttcagtgtcgtccaaaggcgaagacaacgtttatgcgtgcagtttgcttgcaaattacgtatacgtaatatccatagcctgcaagtaataaggatagttctcagtgcagactaacaatattaatacaatattaaatctattgttaaacttgcgaacataagaatagcttgccccctttaagtgctaatttgcaagcaaaacgtgcgtatgaatattattataataattgaatacttgattacctagagaaagtagcctccaataacaagcaagtgccaattggatgtgcgaaataaaatgtatgaatagtacaacaaagtaacacgtctcctccattaaaactccattgcaacttaattttttttatatattttttatatttttcttataaaaaatacttatacaattacgaagatatttttgctgctgcgatttttggcgcttggttttgtttgtttgtggaaattgtctttgagctggtcaaagaggcagctaggtaaattaaaacaaatcacttttgaaatcaacagagagataaagatacaggttcagatacagaatagtcgaaagtatacagatagatagaagatagatagaaagagagagagagagagagagagagatagaaatgaaagtcgcataaataacagatggatagagatagcttaggatcacacaggaagcaggatgcaacgatttgagtattctgtagatggatcagcatagatcagctggtacagtttgtttagtttatcagactctcggtggaactactgtgagttgttctcctgtttgggtagatggaaggatagcgacgacgggacggccttaaacggagaagccatcgccggtgggatccaggatccaggggtagttgttggggcactccatgcacgtgaagagacgcagcgtctcgccgggcagctccctggtggtcaggggacacgcgttgggcagagagcagtagggctggcccttgacgtcgcacttctccttccactcctggaagtcgcgcagcgagttcagctcggtggggttctgcatccactggatcacctgcaggttggtcacgaagaacacgtcgttgcggccgagcatctcctcgatgaatttgatcagctcgtcgcggtactccttcttcgacttcagccacgaagcgtggaagtggagtccaagtggagcacggttgctattgtagtggcggttgaagttgtggcgcagcaggcgtgcgaactggtcgccgctggctacgtttgagcaggagtccaccatatggcaaccgggcagggactcgtcgaaggtgggatcgtcgcgccggtccagctcgttcatgaccatctcccacacggggtggctcctcgatgggcagttgtgcgcgttgccgttgcacttgtgcggcatgcggaagtacagggtgtatggccaaatgggcacgcggccaagggaggcggtgatggaggcgtcgtacacgaagaactgatcggccatcatctcgaactgcttgttgccgcccacgcggaggtagggcgcccgcatgccgatgatggagccgtcggtgatgttggcgaagcgctccacgatcagtcgggagccggccatctcggccagccagtcgtcgtagctgccgccggtccagtagttggggtcatccttgtgcgttagcgagaacacggagatctcgtgtccgcgacgatgaaggtcctgcaccgccgagtagttggtgtacttgtgggacacgaagaaggtgcccttgatggagcagccgttgggattctggcgctgtccgttgaagatgtcctcgtacaggtcgatgttgtccacgttgacggcgccgttgaaggtgatcgtgatcatctggggcacctgttggggctcaatgccgccgggaatgcgggttccgtccgccgagcagaagcagtcgggcagggcgcactgcgtcggatcgcattcgggggcgcggttgggatcctcatcgacagctggaaatggtagatggttggggatcattcttctggatcatttattgaactttgcgctgtaatgtatgctgcatttcctcaacaatttatcatctcaagcaccatttggaattcagttcgaatctgtaggaataatcgtgtgttggacttacagcaggcgttctcatcggattcgtccttgcagtcggacttgccgttgcagaagagctccttgtccaggcactcgccgtcgccgcaggacagcttaccctcgggacagatgggctcatccgtcttcaggatgggcttggccttgcgcggctctgtggaatgtacactcagttagtgggaagctacgttttggagctactggtggatggaggcgtgttagtgacaacaaatgtctaaattttgaaatgagaagtatttacatgagtgtgatggggtttagtagtttaggtggttgttagtttcgagctgggttagggtttgtttcgttcgtggatctaccaaagttccggaagtctaacattgctgactactgtatgtacaggtgtatattggcttgattggttggtttgtttgtttggcttgactgtttggtctggctggttggtcgtcacacttactctctttctcgtcgcaattggtcaccttggccttccagtcgcaggtctgcttgatcacgtcgaaggccagacccgaaggacactgaatttctttcaaacccgacttggtacatctacaaaataaagttcatgttctgatttcgtattggcgttgctagctatagaactttggcaccgattcgggggtggattcagggtgtttatgcaatgactcgatcgattcggggactcggggactccccggttttagtgacacacacagagagagacagagacagatacagacacacacacacacacagggggtgagagacagatagacagacacagcgatagaggaggggtggttgatagtgggctggggatctgggctctcgggaagtatcttgagctttagacatccgcagcggattgggtgatctggttgatctagtcgatctgggtggcgtcacttactctcgagcacatcgcaggacttcacattcgacttccaatcgcaaagttggcgcaaaacatcgaatgccaggccgccggcgcagcgaatcggcgccaaacgccaagtgccatcttcgccggcactgtcgcaccttcgatagcgatacaagaagtggcaagaattggttgtaggagtgctgctttggtcattgcatcgggcatcagccgtctcagctgaacaatcggacaacccagggccacatgtggccgcaattcgacttacctgtacacctcgcggcagtcgccgtcggtctccaggcggaagtactcatccgcgggacgatcggcgcacacctcctccacatcaacgccctccagcttgtcctggccatgtgctgttgggatgggaaagatggttaggcatggctaatgatcgttggtgatcatttagatcaggttacttgactacattgattatgtgcatttgtttagtttctagccataccaacgtagttctagtctctggactttagtgcttgcctatgttggcaatgcgttttaatacgaagtgtgtatactttcgatcggaataaacgggaattggatgttcgatcggaatgatgttaaaggtggtgttttctgaacgaaattcatttgaaactttccacaattttccctacacatttgtaaccatcaatttgatagtttagtgtaagaagcttgtagcaaactttgcgaaaaagtaaataatgcagtattcaatttataattttcgttgctttgtcaattctcataattacgttttctttggtatctccttgaagggtcctgatctatggcgggttcaaatgaatttttaacatacaagccatctggttgaatagaaatgtttacatattatcgtgccaacaaatatatttttttagtgttcggcgagcactgcttaagaaaatctaatttatttttgttttaattttttaatagaatagaatagggacatactgtcaggaagaagaagaggaaatgttttctgaagaaatcgccatgaatttaagcagaattgaaaaaaaagtttgagatacgagacagaagagaaaacaccagagactctttctttaatataagtacttgttatcctattttaatttaaaagtcaataaatactctaaaaaatatataaattaatataagtatttgaaatcaatcaagttctttcctaactccgttcgctgataatttgccgacatcttaattgttaaattgatattgttctcattggcaacttgatcgtgatgggtgccattaatcacagtcgttctatcagttaatcggcgtcttagccagtataattggccgcacctcatggcttaacggttaacttactcccaacaccaacgactttcgaccggtttttggccattggtttgtgtggaaatacgagtaccacttctagccgaccaaaacaactctcggttttgttcaatacagtttgtctacatctcgtttcggctgaaatcgaaagggcaaacgaaagcggcatatcccatttatgggcacaggtccacatatctgggatgatctggggaatgctggcggatcgtatcgaatgcggtatcttacggtagcggttggtcatgtaaggtgtctttccaaacgggttgagagtattggctaaccgcgttgttgttgttgttgttgatgttgattttgtggttattggaaacccgttttcggtttaacattaaaatgatattgcataaacaacgctggcgagtccaaaaatacatatgtacatatatctacatggaaacggaaccgacggcagacagcagacaggctggttttgttcgttttccaatgctaatttcggttttatggccaaccggagtttcgtcctcttgccacagtttcttttttctttattattatttttttttttttgttgctttgtggttcgttttttcctttttttccgacaactgaactcttacatcaccagcgattgaaggataagtttaatcgattgcatgccgctaatgactgcgacttcgacttcgatcaattgtgatgtttttcgagcccacatcatcgcactttttcaagtttattcgccttggccagcgatcgaggttcgtttcagctagtattgtattttttttctttggcaaccttgcgaaaagtggcaaagtttccaccgccaaaggtcaccaacttaactctaggcacaactaatggctacctacgtactaggtgtaatcgaacggagtactcaccaacagcaaggcagaggcacacaacgctcaaaattggccaccaacgcgccatgatagattccagagctctctgcgggcgaaattcgtagaagggttagcaacacactagtcacaattccgtactaatgatactgatggcacatagtacgaggtataggttatagggtggtaactttggaaaactcaactgacttttgcccagactctgagtgggaatgcttggatcgaatggaagtggagtgaacggagctcactcttccaatacacagccacgcttacactaggtgttggccaccagcaacgagttctatttatcaagccgaggtgtcttggtcgggctcgaatccatggtgggtagcgagcaactcaccctctggccaactcaccacgaccgctgcgccggcgccggagctttcgaggggcagtcttgtggaacccattcggaaatgccaaggtacgcgggcgtctcttcgcttctgcgatgtgtgaagaaaggttaattagcatttataggcgcaggtgggagcgggattcggtccgtactttacggccgattgtgcgggggatttgatttgatttctgatttcgaattttttggcttcagacgactgcaccccatgggcttgtttgtttactcctttagttagtcatccgcttagacatacataaatcaaagacgaatgcccatcaatctctttctgccactgaccctgaatttgcgagtcttttgttcgaacatctgcgacgcggctgcttctcggcgattctatcaaaactataaactattctacgataatctcgatttcgtaactgttttttttttttcttatttctttcttttctttctaaaccgttttctacagcacgtttattggccacttcatttttattttcacccaaacgagccgagaatcccaatgggctggagctccgggtcacctggtgcatactaaacagggtctttggctgcctctggaagcttcccagtgcctgtgcagccgatcatttgtatgccaatcgcagctgccgcataaaattcttgttaacgtggctaagacaccaaaaggttattaaacctccgacgactcgagccatcgaaagctcgagtcttccagcagaagagagtcttcttgcgagtgttcgctgagtcacagggataagtccgaatgcactccctgcagcagatcttgagttgcttaattatgccaagccaagtcgatgccgttgttaactgttttgttattcccttctttattttt

SEQ ID NO: 41831 - DNA, 1735 bp, DROSOPHILA
gaagagtgagctccgttcactccacttccattcgatccaagcattcccactcagagtctgggcaaaaagagctctggaatctatcatggcgcgttggtggccaattttgagcgttgtgtgcctctgccttgctgttgatggcttgtatgttaaaaattcatttgaacccgccatagatcaggacccttcaaggagataccaaagaaaaccacatggccaggacaagctggagggcgttgatgtggaggaggtgtgcgccgatcgtcccgcggatgagtacttccgcctggagaccgacggcgactgccgcgaggtgtacagatgtaccaagtcgggtttgaaagaaattcagtgtccttcgggtctggccttcgacgtgatcaagcagacctgcgactggaaggccaaggtgaccaattgcgacgagaaagagaagccgcgcaaggccaagcccatcctgaagacggatgagcccatctgtcccgagggtaagctgtcctgcggcgacggcgagtgcctggacaaggagctcttctgcaacggcaagtccgactgcaaggacgaatccgatgagaacgcctgctctgtcgatgaggatcccaaccgcgcccccgaatgcgatccgacgcagtgcgccctgcccgactgcttctgctcggcggacggaacccgcattcccggcggcattgagccccaacaggtgccccagatgatcacgatcaccttcaacggcgccgtcaacgtggacaacatcgacctgtacgaggacatcttcaacggacagcgccagaatcccaacggctgctccatcaagggcaccttcttcgtgtcccacaagtacaccaactactcggcggtgcaggaccttcatcgtcgcggacacgagatctccgtgttctcgctaacgcacaaggatgaccccaactactggaccggcggcagctacgacgactggctggccgagatggccggctcccgactgatcgtggagcgcttcgccaacatcaccgacggctccatcatcggcatgcgggcgccctacctccgcgtgggcggcaacaagcagttcgagatgatggccgatcagttcttcgtgtacgacgcctccatcaccgcctcccttggccgcgtgcccatttggccatacaccctgtacttccgcatgccgcacaagtgcaacggcaacgcgcacaactgcccatcgaggagccaccccgtgtgggagatggtcatgaacgagctggaccggcgcgacgatcccaccttcgacgagtccctgcccggttgccatatggtggactcctgctcaaacgtagccagcggcgaccagttcgcacgcctgctgcgccacaacttcaaccgccactacaatagcaaccgtgctccacttggactccacttccacgcttcgtggctgaagtcgaagaaggagtaccgcgacgagctgatcaaattcatcgaggagatgctcggccgcaacgacgtgttcttcgtgaccaacctgcaggtgatccagtggatgcagaaccccaccgagctgaactcgctgcgcgacttccaggagtggaaggagaagtgcgacgtcaagggccagccctactgctctctgcccaacgcgtgtcccctgaccaccagggagctgcccggcgagacgctgcgtctcttcacgtgcatggagtgccccaacaactacccctggatcctggatcccaccggcgatggcttctccgtttaa

SEQ ID NO: 41832 - protein, 549 aa, DROSOPHILA
MARWWPILSVVCLCLAVDGLYVKNSFEPAIDQDPSRRYQRKPHGQDKLEGVDVEEVCADRPADEYFRLETDGDCREVYRCTKSGLKEIQCPSGLAFDVIKQTCDWKAKVTNCDEKEKPRKAKPILKTDEPICPEGKLSCGDGECLDKELFCNGKSDCKDESDENACSVDEDPNRAPECDPTQCALPDCFCSADGTRIPGGIEPQQVPQMITITFNGAVNVDNIDLYEDIFNGQRQNPNGCSIKGTFFVSHKYTNYSAVQDLHRRGHEISVFSLTHKDDPNYWTGGSYDDWLAEMAGSRLIVERFANITDGSIIGMRAPYLRVGGNKQFEMMADQFFVYDASITASLGRVPIWPYTLYFRMPHKCNGNAHNCPSRSHPVWEMVMNELDRRDDPTFDESLPGCHMVDSCSNVASGDQFARLLRHNFNRHYNSNRAPLGLHFHASWLKSKKEYRDELIKFIEEMLGRNDVFFVTNLQVIQWMQNPTELNSLRDFQEWKEKCDVKGQPYCSLPNACPLTTRELPGETLRLFTCMECPNNYPWILDPTGDGFSV

SEQ ID NO: 41833 - DNA, 2967 bp, DROSOPHILA
aaccatgagcaccctcaatggacttcgcggaattcagcacccattaaataaataaccgaaaaacttttcagctttcatgaatacagaaggagattcctccatccaaatcgaatgaggtgacgaggaccacagttgagccgtttggtcagcttgggctaaatgtaatatgtgcatttaaattgagtttcttaacgatatcgtggcgattcagcgcacaactacagtgtattaaagagtggttgagatacagtgacattattttattgtataaagggttttaaaagtatttgttgacatacataaaaacctttttaattactttcatattatgacagtagtacaacttagttctagaaaataatatggattcaaaactataagaggagcacatatttaaaaattttctcagcgtgtttctggaaaactctttaaaaatcaaacttataagtgaaactgtgcagtttgcccatatcaacagacttaaatggtcctttaggggtgtaaaaacacaatcaacagatgcacgcgacaacagatggcgaaagatgcaaaatctgagaaagcgaaagaagaggacacagtgaacaaaggacggtgtttacagagcgactggctccacacaactgaatcgcctggatgcattggggagcagcttggagctactttggaacgatatggaaaagaacccatggcgaaactctcttaaatccactctgaaagtccttccgagagagtacaaaaaagtgtcggtggaaaagggtggttgatttggggtatgatccggtgtttgggaatcgaattcgccgacactgggcaatgtgctgcaatttaataggccttagattaaaggctaagaaccaagaaagggatttcttaaaaataaataaatgaaacacaaaacattgtgatcaaattatactatactagtgttgcagtacaaataaaactaaagtatccattcaaattgtcgactgcagttgacagtttatcgtaacagtgattaaaacttttcaccttgcggcttgatagttatattatggacctgtcaacggtaagaaagttatgtgctaataatgttaaatccaaataaaaatccatatattacgatttaattacctgaacattgggtggagtgccaattgcccagagaacggcatcagcgacgtcatcacttcgcagcatgggcatatgttgtttgataataccctgtatctgctccggcaagatgaccgtatcaactatgccgggactgactgtctgcaaaagaaatttaaaaaggacaccgatactcaaagcacaaagaagcaattgaaataagtcatactcgaaggactcctaaatatactaaccgaaaccctcacggcagttttgtgcctctggaactcctggcggtagatctcgttcatggcgcgaagggcaaacttggtggccggataaatgtttagcgagggaagctggggtcccaggttgggtacctggtagcccgccacgctgttcacgatgaccacgtggccctcggttcctcgccttttcatcgaacggaaggactcgcggacacagtaaacggtgcccatgatgtttgtttctatggtggatcgcatagcaggaccatcatcccgctcgctgagttctccggtaccaatgatcccagcattgctcaccaacacgtccactccacccaattgccggcaggtccagtcgaaggccttcaaaacctgatcctcctgcgtaatgtcgcacttgattgcgtgaagccgagactgctgttcgagactcagaccactgcgaagcttctcaactcgctcatgccgcctggccagacccaccactatcattcctgctccgatcaaggcacgggtgcatgctgcaccaattccggcactcgctccgctcaccacggccactttattgcaccaacgctccatgttaccgttccacagacgtctaaacaccgaatgactggccatttggcgttcgcataagaccaaaaccacaatgaagccataaaaatcaacgcactacttattaattgcactcgcccacttaagtaggtcactcaccccacgttcaaacgactggtaacctctgaaaactagtcaatttggctataggagtcaagtttacattttatttaattatcattaaaaatgagtgttatgcaggtgtggaatattttggattggatttagaagtgattagaaagctcggcttacaaaagttgacgcaaatgaacataatttgtactataataacaaccaaaatttgtatatcattgaagcaatattttataatattatgctttaactatttgtttatttggttaagttaagttacttcgatttgttcaatatttatttttgcatcatccccaagtttacgttttatctcagacttggcctgaagacttccactcttggacacgtctctgcagagtctgcaagcgactgcccagatcttcggatatttttgggttgttcttggccaagaagttctgctgctgcatgctggccacgttcaaaggacctagtatccttccagtcgttggtcgctctatcttgatgactcgaggctgttgctctgacacaggcatcttgcgccgatttggaatcttaagcataatttggttcgcattcactcgctccaaatggctctatcagttcgaatgattttaaatatacacaaattattttaaacaagattttaatttgccaaggcctagtctgtggtgaagtgttaggtcaagcctactaggattgatttacaactaggatttacagctaaagtaatatgttatatttttaaaatcaatataccgtaaggtatacccttacatactagaaatgaaactagcattggccagtcgaagtttatataccctttcaataataagctatagcttaaaaaaaaaaaagtgggaagtaaaacgatgagtaacgggtttagcaaacatatcttaaccacaataca

SEQ ID NO: 41834 - DNA, 801 bp, DROSOPHILA
atggccagtcattcggtgtttagacgtctgtggaacggtaacatggagcgttggtgcaataaagtggccgtggtgagcggagcgagtgccggaattggtgcagcatgcacccgtgccttgatcggagcaggaatgatagtggtgggtctggccaggcggcatgagcgagttgagaagcttcgcagtggtctgagtctcgaacagcagtctcggcttcacgcaatcaagtgcgacattacgcaggaggatcaggttttgaaggccttcgactggacctgccggcaattgggtggagtggacgtgttggtgagcaatgctgggatcattggtaccggagaactcagcgagcgggatgatggtcctgctatgcgatccaccatagaaacaaacatcatgggcaccgtttactgtgtccgcgagtccttccgttcgatgaaaaggcgaggaaccgagggccacgtggtcatcgtgaacagcgtggcgggctaccaggtacccaacctgggaccccagcttccctcgctaaacatttatccggccaccaagtttgcccttcgcgccatgaacgagatctaccgccaggagttccagaggcacaaaactgccgtgagggtttcgacagtcagtcccggcatagttgatacggtcatcttgccggagcagatacagggtattatcaaacaacatatgcccatgctgcgaagtgatgacgtcgctgatgccgttctctgggcaattggcactccacccaatgttcaggtccataatataactatcaagccgcaaggtgaaaagttttaa

SEQ ID NO: 41835 - protein, 266 aa, DROSOPHILA
MASHSVFRRLWNGNMERWCNKVAVVSGASAGIGAACTRALIGAGMIVVGLARRHERVEKLRSGLSLEQQSRLHAIKCDITQEDQVLKAFDWTCRQLGGVDVLVSNAGIIGTGELSERDDGPAMRSTIETNIMGTVYCVRESFRSMKRRGTEGHVVIVNSVAGYQVPNLGPQLPSLNIYPATKFALRAMNEIYRQEFQRHKTAVRVSTVSPGIVDTVILPEQIQGIIKQHMPMLRSDDVADAVLWAIGTPPNVQVHNITIKPQGEKF

SEQ ID NO: 41836 - DNA, 6497 bp, DROSOPHILA
aatccaaaatcttgccctgaacttgactgtctgcatgtgatacggttgaacgccttttgcggaaattattgcaattttcttgtcttgtcttctagccgaacacacatagcaccgtacattggggttttgacggtgggtttactttcacttttgccgcacttactcaacaagttgtgggggcccgctgaagtttgctcacaggggaaacattcatcaaaagattgaagagctcgtcttttcgctctaactcaaataagaagttaagtgcataagtgaagttagctgcacataaaaatagttttttattgcagcgcaattttttctagtttctagcgagttttaaaagcgttgtgtttacaatcttttaaaaagaaatttcaaagatttttactacgaagtattctttgcattactccttatataagttctactttatattgagatcaaatattaaagtcttgtcttaaagcttgatagaacttagtaatgacttataagcttcaaattagagtatttaattacacagaataattagttagttaaattgaattcattggtgtgacttagaaagcgccacaattccttttgtttattttccctcacttttccaaacgagtgcaacgtcaaacccttaaacaaagtccactccacactgattgcaactttgccaaagaccaacaaatcatttaaacaaatcaaacatcaacaggcgaccggcgaacaacatggagacctatttgacggagatcaaacagttgcgcataccacgcccgaaatttgagcccaacagttgccatcagcagcaccatcatgcggtgacagccgtcggagccacgcccatccagccgcccccgcccctgcaccaccgtcagtggcgacactttgtgcgaccctttacgccgccacgcgattaccatctgcccatggtggccgagggctcctccatgcacgacaagatgtgaggaggattcacattcagtggatgggcaaacatgatgcattactcccacacatagccccacataatatacgatacctacttaggatagtgcttaagtctagatgttagcttagttaacgtacgatagatacagatacagttgcagatacaaagaattaaagtatacaaaaaatggagatttctttataattcgggtttttaagtaagtgtgctgatcatgaaatgaaacttcatggcatgagcaaatggatttttgagagtgttacttggaactatgttgataatctgttgctctaccatttataaaatattatatttaatacccagagatatcagaacctacgacaaaatcacgatcgtttcgcttactcaccgcatctggttcgtattccggtaaaagggtttcgctgccccggcgagttctgtgctcatcacagccgtattcctaagccgggataaaagaatttacaagatacatttttcagcggcttatgtgcttctttgctcgacgaccaattcggtttggcactggtctaaatgcgacttaacagtattacaacactcaatagccaattggacaacatttaataaggaagtacaacataaccggaaacagagacaaaaacgcaaacatcaaccacattgagcagttggacaaacatggaaaaagattcaaaagtataaaaaacgacaatagacgttacacacaacaagagacaaagatacaaaaagtagatagacagagagagataaaaccactaaagatacaaaataaagtaagacatatacaacagacagacaagagctgcagattgcaaaactcggcgatgtaacagccgaatgtcaatttttttcaataaaagcttagaaaaacttaaaatacagcatattcatcaggcagagatttcggtgccaaaaaaaaaatattgttagaaaataaagaggaaactttatcaggagactcatcgagtaattttcttcaaagagcctagatacgaatgtttcaagataggtatctttgacagattaaaagtttttagaacagcttgcggaacagtgaaattagaccttcagtggtaacaatatacatatatagaactttttcagcttgctaccctattcgcgcgactcgcttcagtcctgacctgttgctgattgtctttggtctgcctgaatttcaattgacttggtcccaacggatggtgatgatgacgaccggatcccacgttgccgccgataccgcccagatgacgcaatgaggcatggtggggttgatagtgttgctgctgctgttgttgttgttgtggaggcgacaatgatgatgaggactggttgctgcctgtctgataatgtgatgctggctgtgagcgatgcagtatgggtcccgccgacatgggacgatggggcaactgtagtgcgggtctagcgtatacatatacacaggtcagttaacggttatgatgggaaatgggtgcttaggggtcagtgttgggaaattcctgaataatattttcgagctatatatctatatagctatatatctatatatatatatctatatatagtatatatatatatacttttataataagtaaaattttaatttacacaatgctaaaattttgtagttccgaataaaagcacttttagttctataagcattaatcatcatcatcttttcttttcacactatgataatgttaaaaacgcatttgtgaatcttttgtaaactactactaccctatccaacactgttcaggatgggatattttggaatatgggattatatggattttaggtaagtggctaggtaccgtttgtatatatccgttacggtcatgcccaggcccgagtccgacgaaggactccgtccggtggcggctattatttccaaatcatcagcagttacctgttggcgaacggaacggaatggtacggaatggaacgaatcgaacgatttggtttgcatacgatttgcgagtgagacagtgacagctgaaaggtttgacagtgagtgagagtgagaggggctctagcctaggcttctgtagaattctaccaagcatagacagagagatgaagagagagcgagtcagagagagagcctaggtagagcgacaaagatagagtgatagggagtgcattcgtacttcgatcggttgttaaatcaattggtattttatatattggtgctgattcatggtgactgttgtggtttcttggttatccttttaagtgcatttttaacgtgggattacatgagatcaatttgatattgtacaataattttattacttagtgtactaaatctaaagattactattaggttgagctttgtcataccccaattatcaaagcagatatgttttttatattccgtatgtatgtacatctacagtttggctcatttggagtcaactgcacttttgaaaataattaaattggattaagtttccacaaagcaatttttccgatcgatttggttttctttttggcttaaaatacataattttacaaacagtcttcttcttattgctataaaatatgtaaaaacttcgccactacaatgtagagtaaagttgtatgtatttatatgtgggtattggttggaaaaattgacattcgatttgattgtttttgttttgaaatgcaattttacttgcaaagggccgaatcagatgtaagcgagtttctgaaagctttctcaaaagtaaataaaagaaaattacatgcatttgttttgtaaatgaaagaagcaataactggtttagagtcgggtgcctaaagaaagtatcaagtgtacgtatctcgttcaacaattaaactacaagttttgttttgattttcttttgtcgagtgttatttgtattttttctacagttggaacaaataagttaaagtaaaagttacaaacatacagtgacaacaattattaacgacaacagcaagaagagaaagatatactaaacaataaacacattgtgggaattatatagtatagtataggtagtagagtaggtatatagacgaatagtagacagtagaccggttgaacagtagtcaaagttatttagagtttatttggctgaacatgctcagtgtgtatttttgggggatatagtcgtgtctccctcttaactaagtgtatatagtgtctgtgtcgtagaataaatcttctaaaaagcttaccggcaaatcacgggcggggtctcccttacgctgtaaaagattataaagtttacatatgggattaacagggtatagagatcaacgggcttaccctatgcctatccacgctataaggatcgcgttctctgcgatagacgagctcatcgtatcgcgtgcgatcctcggggaaaactaattcccgtatttccgtcactagcgtgtgctaagatgggaaattgattgatgtatattaagtttctcttattctcttatcaggtatcccttgactaggttaaacactcaccttttcgtacgtatctaacatctctaacaagacggcaacaaaggcatctatggtcattgctttcgcactatattcggcaatatagtaggaaaggcttgcaaagtgatgacggggcagcagggagcgcgccttctcctccaccatggtcgcaatttgaccttttcggcgtgctctgtaaggcaaaagctagatgttgtagaatctcttgaaaagagattttagatcagtcgagacccaccgtgtgcccgttggactgtaggcgtcccagggctccatctcgatggaggtgcaggagtggggcaccttgcccacgtcacgtatcaccagcgacatgcgtttgtggtacttcaactgacccaccgcctcgtcgtgcgtcacatcgagaaaggattgcccattgacctcgaggatctcgtcgccaatcatcagtccggatcgatctgccacgctgtccttatctacgccggtgacaaagatccccaggccgtactccacgccgccacggatcatcaggcccagagactgaccaggttcgatcagcagctccacgcgacgtatgctatcgggtatagagtgttaagttgttaactaagagctagaagctagatgaggtaggaaaaacaggtatgtatttaagggtaaaccctatatttatcgggacgacattatcaaattttttagttcaatctcagagtagcgaatcctaagtattatgaatattggtacattttagtgccttttgttaaaattttttttttttttttcaaaaaggtctgctttattttgaaatattctatatatactcaccgatcccttcgctcgctgcgcctgcccccgtactccatgggcggggaggcgggtcgtccgtggcggtccatccaggagcaggtctggcggaagggcagacccgccccggaggccgccgccgccgctgctgccgctgccgcctggttctgtgggtgcagggggggagccatcgatgcgtacatggggtcgcgggagggcggaccgaagccgtggagcggggcggtcgagttcagagtgggcggcgctcgcaccgtcatactgatttgacgtgacgatttcaatatctgcacacatctctgcgttaagaaaaaatgtggcaatagaagagacacaaaaaagagaggacagatgcaagcagaacggaacgaaccaacaagagaagagagaaagagagagagagagtgggaaaatggagcaaagtactaaaggaaaattaacaaaatgaaatggaaattcgccaattgcttggacaaaaacgtgtacgtaacgtggtgccagaattttccgatattattaattaacttttactgtgagcgtgttcgttactcgaaataccacccaaaatttcgcctgactttcatttgtcggcggccttttgcggtctgattttgttgtccgttctcagtgaagcttgccacaatttgctgtcattattttaattgtttctgaccaaaaaactaatgtgagaatgtgcaaagttgtgttggtccatggagaaaggggctatgtgcgggtgctttgtgcaaattggtctgtgaattctcgcaggtgttgcctgcttttaggggcttccaggttcggttaaagtcctaatttttcggtttgtggtgaacttttcggccaactgcacttatttttaataaatgtataaggattatatcaaactgaagtgcagcatcatagcatttgtggttagattccttgacatccagcaaggatgtaaatgtgttgtgaaatgcttttcagctcagttttctagttaaaaggatgtgtggcagcgttatggaatcttaaatttataaaattcgagctctctactgtgttggcagaaacgtcagtcctttgcagtcggtcaacagaagctaacaactaaaagtgtgtaaataaaaagcatttaacaataatagaacataccaaaataattctgatacaaaatgcgactaatctattgccaattttttctcagtgtatatttgtattagtgtattattgattttatattcatggtttttctcaaatatatgttcgtatttggtt

SEQ ID NO: 41837 - DNA, 1338 bp, DROSOPHILA
atgacggtgcgagcgccgcccactctgaactcgaccgccccgctccacggcttcggtccgccctcccgcgaccccatgtacgcatcgatggctccccccctgcacccacagaaccaggcggcagcggcagcagcggcggcggcggcctccggggcgggtctgcccttccgccagacctgctcctggatggaccgccacggacgacccgcctccccgcccatggagtacgggggcaggcgcagcgagcgaagggatcgcatacgtcgcgtggagctgctgatcgaacctggtcagtctctgggcctgatgatccgtggcggcgtggagtacggcctggggatctttgtcaccggcgtagataaggacagcgtggcagatcgatccggactgatgattggcgacgagatcctcgaggtcaatgggcaatcctttctcgatgtgacgcacgacgaggcggtgggtcagttgaagtaccacaaacgcatgtcgctggtgatacgtgacgtgggcaaggtgccccactcctgcacctccatcgagatggagccctgggacgcctacagtccaacgggcacacgagcacgccgaaaaggtcaaattgcgaccatggtggaggagaaggcgcgctccctgctgccccgtcatcactttgcaagcctttcctactatattgccgaatatagtgcgaaagcaatgaccatagatgcctttgttgccgtcttgttagagatgttagatacgtacgaaaagcacacgctagtgacggaaatacgggaattagttttccccgaggatcgcacgcgatacgatgagctcgtctatcgcagagaacgcgatccttatagcgtggataggcataggcgtaagggagaccccgcccgtgatttgccggtaactgctgatgatttggaaataatagccgccaccggacggagtccttcgtcggactcgggcctgggcatgaccttgccccatcgtcccatgtcggcgggacccatactgcatcgctcacagccagcatcacattatcagacaggcagcaaccagtcctcatcatcattgtcgcctccacaacaacaacaacagcagcagcaacactatcaaccccaccatgcctcattgcgtcatctgggcggtatcggcggcaacgtgggatccggtcgtcatcatcaccatccgttgggaccaagtcaattgaaattcaggcagaccaaagacaatcagcaacaggaatacggctgtgatgagcacagaactcgccggggcagcgaaacccttttaccggaatacgaaccagatgcggtatcgtatattatgtggggctatgtgtgggagtaa

SEQ ID NO: 41838 - protein, 445 aa, DROSOPHILA
MTVRAPPTLNSTAPLHGFGPPSRDPMYASMAPPLHPQNQAAAAAAAAAASGAGLPFRQTCSWMDRHGRPASPPMEYGGRRSERRDRIRRVELLIEPGQSLGLMIRGGVEYGLGIFVTGVDKDSVADRSGLMIGDEILEVNGQSFLDVTHDEAVGQLKYHKRMSLVIRDVGKVPHSCTSIEMEPWDAYSPTGTRARRKGQIATMVEEKARSLLPRHHFASLSYYIAEYSAKAMTIDAFVAVLLEMLDTYEKHTLVTEIRELVFPEDRTRYDELVYRRERDPYSVDRHRRKGDPARDLPVTADDLEIIAATGRSPSSDSGLGMTLPHRPMSAGPILHRSQPASHYQTGSNQSSSSLSPPQQQQQQQQHYQPHHASLRHLGGIGGNVGSGRHHHHPLGPSQLKFRQTKDNQQQEYGCDEHRTRRGSETLLPEYEPDAVSYIMWGYVWE

SEQ ID NO: 41839 - DNA, 4499 bp, DROSOPHILA
ttacatacttctcaataaacccagtatacccttttaatctacgagttgtttgggtacggcattattattccaatccatctgacaaattcaccctacatcaagaatatttgctctaaaaatatattttcttttttctttgacattgtacgaattggttacaatcgatttggttacaagtatttaaatatttaattgaatttttagttccggttgcgtcagcaccggaagcatcctaagctagtaaacactattttcttccgctattattggatttttgtctatgtacatataacattttaagatccaccctcgcgctggttaagcaaacgaatttcgcttttaaaagttccgaaattttaaagaaagcaagagagaatgctatagtcgagttccccgactatcagatacccgttactcagctagtgtgaatgcgaacgcgaataaaatgagaacaaatttagaaattgtgggcgtgaccggtgtggcggcttttaggacgttgggcgtggcaaaaagttgtttgtcaaatcgatagaaattttagcgactaataaaattatgaaatgatatcaacacatttttgaaaagtgtgggcttggcaggtttgggcggttttagagcgtgccaacatgggtcaacaatcttgcgctgcgtctatgcctccagaatatgtatgctgaatcttaaccttctagcttttatagttcctgagatctcgacgtgcatacggacagacggatatggccggatatggccagaaatatatagactttatatggtcggaaacatttctgcttgttacaaacttttcaacgaatctagtatacccttttactctacgagtaacgggtatagaaatttacaaagatatcaactcgtctagaaattagaaaaacactttgaaataacacttaatgtctagaatgagtcgccctgaaaccgttgatggtccactcaagcatcatactcctctccaggtagccaaaggtcaccagcagcgctagtgattcctcagtgcctcgttgatgacacgcagaatatcaatttgcagttcggtaaaagccaccggctccagctgagcattgcgtatcttcatggacacagccttgaagaacgcacctatctcatcgtcctctccggagttgtggccattgctggagggatactccatatgggtgggtttgctgggcgtaatgggcgccgagtgatagcgagacgtggaagtagagcttggcgtagtggcagcattctggtacctaggcgtggttggagtctgtatctcgatcttctggaactccgcagttgattgaagctgctgattttccaggctggtggccccgtcgctgagctgctcttgcttggacatggcactgccaacgcttggaacagccatgtaaacgggtccatcttcgtgatcgtaagtcattacatgctgatcctgctgctgaggaggttgttccgccgccgttgtggtttccatctcctcatcctcatcgtcttccacatcatcatcattatggtgtacatctccgttgatgtaattctcgatgtccatgtcgtcataggtggccacacagagttcacttgcctgctgttgctgttgttgctgctgatgctgttgttgctgttggtgctgctcttcctgctgttgctgttgttgttgttgctcagccttgtgtggtcccgtcaaatgaggcagggtgggcaagttaagctgggaattcgacgaagacgactctagggtgatctgctgcgtgggcggtgagtgagactgggtcatatggtcctcgagttccctcaccgggtcatttttgggtagcagcatactgagttgcgaatcgctttccctgaagagtaaaaagttatcaatatatgattatgttaaaataaacaaaacctctcttacagcgtcttttgttgtatgtacttctgaaggaaactgagcgaattatagtgcttccaacgcgatgtggcatctatgtgcatcagtgtcctcaatcgcttgtgttcgcgtgcgtattggtcccttaaagccttccacttcagtcgacactgtttcactaaaatagttaatgcttgaaaaatcatcttcatccttcggctgtttaagtttatcaaccacatacccgacttctttagttttctggcgatttcctcccacacctccatcttgagcttggcattgcgatagttctcgttgccgtagttgtagatcatgtcttcctgctggatcagcgtgatcagttccttttcgaagtagctctccatgttgagaaatgtgtgtatgggatcgtcgtcctcctcctcggcgttcgtcgattgattgtgcgctgctgaagtggtggatacattagacgtgattgttgctgccgagctcgactgattggcggcattgacgcagtccactatttcgttgtagagagtgtctaccaccgtggttgtgttggcggttccacactgcactatgattgatggagtagcaccgcctcccgcatccgtcagatagttccagttcgcttccggctgcgagtgcatttgttgctgatgctgctgttgctgctgctgctgctgcagcacggctccaatatggcttgccaagaaagtggctgccggcttcttatcagttgaactaggcgaactgaagctgcagctgtcgagcagcgtggatgcactggcatcctcaattttaatgctgccggaaaggtttagattctggctactgctgttgctgctgaaggaagtagtcatgggcagcgataagggggtcaccgtacccacggcgccattggaagtctgaccagatctccctctgtaactaaagaattgtgggtttaattaaatacggacatatcatttggaagcctgaagaacagaactagtgatagatagctccatatgctgtatagtctgcattggcagtcagcatggcggtgccaacttgaattgctccacgtgctacttactttcttgccagcgcatatggacgcaggaaatccagctctttgaaatacttccacttcactgcttttgagcaggccttggcgcgcttcagctcccggcagtactgatccctcatggccttccacttggacttgcactggacgtctgtggaaatgggattaagtgccaactttttggtggggaaacttaaacgttcacttaccggaccaacccacattgctgccaatctccagccatttctcgtccttgatcttggtgctgcggtagtggggatgcttgggattgtatagcgactgctcctgggagaccagcgaaatgaggatcagctccttgggaatgctgaccacattctcacccagactaggatctatgctgagattcacgtgctgctgctgcggctgctggtgctcctgcagctggttggcacatggcagcgtctccatggcgctccctacttggtgtccatgctggcggtgtgttaatatgggcaattgttataaataaaaacagggaaaacaaaaatgaggtgaccgaacagctgatcctggagagttgtgtaattagagggaccagtttcgccttggctatacaagcatcttttttacattgagtggaacatctggtggccaccgacctggtcaccctgaacagtccagtgctgcaagaggcgcacaccatttcgataagttggcagcccgctcatatgttcgattttaaaattttggcgccaaaaaatcgtctttctatacatttgtatttaacggctaatccaattagctaattgcattaccgctaaggaaaaaagaaaacatcataacattcaggcaaaacaaattgtttaactctcagtttattgtgcgacgcagtgcggttcaaaactagaaactttcttctggcaaatattgcagccgtccttatataattaatgctccataatgccgaaaattgacccagaaacacaaaaactctacgacgaaatcaatggcatgatacagaagtttaaggtgaattaaataaactcaacgtacagcgaagtaaattaaaaatatcagataataaatatagcaacaacaaaagtaacataaaaaagttttccccatataaaataacaatactctaaaaataccgatagccagcttaaaaagaaattcgttgtccttaatttaattttaacaaaaaaatattaatataactttttggaatatgtatgataatatgattgggttttaaatatcttgccagatttcatacttcagtgctaactactcccataatatttcatctcgataatagtcgaacacattatttccaattttgaaaaaattaagtgacttaacttaatcgaaaactgtatgcgtctctaacatttattctggaaattcttgtaataaaaattgtcattcattactatgattttgctttcaggatgaccaaaaaagcaaggctgattgcacgttggccgataaatgcggcgacatgggggatgtgcccaagattcgattctcatccaagaagattctcaagggccacatcaacaa

SEQ ID NO: 41840 - DNA, 2168 bp, DROSOPHILA
ctgttcggtcacctcatttttgttttccctgtttttatttataacaattgcccatattaacacaccgccagcatggacaccaagtagggagcgccatggagacgctgccatgtgccaaccagctgcaggagcaccagcagccgcagcagcagcacgtgaatctcagcatagatcctagtctgggtgagaatgtggtcagcattcccaaggagctgatcctcatttcgctggtctcccaggagcagtcgctatacaatcccaagcatccccactaccgcagcaccaagatcaaggacgagaaatggctggagattggcagcaatgtgggttggtccgacgtccagtgcaagtccaagtggaaggccatgagggatcagtactgccgggagctgaagcgcgccaaggcctgctcaaaagcagtgaagtggaagtatttcaaagagctggatttcctgcgtccatatgcgctggcaagaaattacagagggagatctggtcagacttccaatggcgccgtgggtacggtgacccccttatcgctgcccatgactacttccttcagcagcaacagcagtagccagaatctaaacctttccggcagcattaaaattgaggatgccagtgcatccacgctgctcgacagctgcagcttcagttcgcctagttcaactgataagaagccggcagccactttcttggcaagccatattggagccgtgctgcagcagcagcagcagcaacagcagcatcagcaacaaatgcactcgcagccggaagcgaactggaactatctgacggatgcgggaggcggtgctactccatcaatcatagtgcagtgtggaaccgccaacacaaccacggtggtagacactctctacaacgaaatagtggactgcgtcaatgccgccaatcagtcgagctcggcagcaacaatcacgtctaatgtatccaccacttcagcagcgcacaatcaatcgacgaacgccgaggaggaggacgacgatcccatacacacatttctcaacatggagagctacttcgaaaaggaactgatcacgctgatccagcaggaagacatgatctacaactacggcaacgagaactatcgcaatgccaagctcaagatggaggtgtgggaggaaatcgccagaaaactaaagaagtcggtgaaacagtgtcgactgaagtggaaggctttaagggaccaatacgcacgcgaacacaagcgattgaggacactgatgcacatagatgccacatcgcgttggaagcactataattcgctcagtttccttcagaagtacatacaacaaaagacgctggaaagcgattcgcaactcagtatgctgctacccaaaaatgacccggtgagggaactcgaggaccatatgacccagtctcactcaccgcccacgcagcagatcaccctagagtcgtcttcgtcgaattcccagcttaacttgcccaccctgcctcatttgacgggaccacacaaggctgagcaacaacaacaacagcaacagcaggaagagcagcaccaacagcaacaacagcatcagcagcaacaacagcaacagcaggcaagtgaactctgtgtggccacctatgacgacatggacatcgagaattacatcaacggagatgtacaccataatgatgatgatgtggaagacgatgaggatgaggagatggaaaccacaacggcggcggaacaacctcctcagcagcaggatcagcatgtaatgacttacgatcacgaagatggacccgtttacatggctgttccaagcgttggcagtgccatgtccaagcaagagcagctcagcgacggggccaccagcctggaaaatcagcagcttcaatcaactgcggagttccagaagatcgagatacagactccaaccacgcctaggtaccagaatgctgccactacgccaagctctacttccacgtctcgctatcactcggcgcccattacgcccagcaaacccacccatatggagtatccctccagcaatggccacaactccggagaggacgatgagataggtgcgttcttcaaggctgtgtccatgaagatacgcaatgctcagctggagccggtggcttttaccgaactgcaaattgatattctgcgtgtcatcaacgaggcactgaggaatcactag

SEQ ID NO: 41841 - protein, 690 aa, DROSOPHILA
METLPCANQLQEHQQPQQQHVNLSIDPSLGENVVSIPKELILISLVSQEQSLYNPKHPHYRSTKIKDEKWLEIGSNVGWSDVQCKSKWKAMRDQYCRELKRAKACSKAVKWKYFKELDFLRPYALARNYRGRSGQTSNGAVGTVTPLSLPMTTSFSSNSSSQNLNLSGSIKIEDASASTLLDSCSFSSPSSTDKKPAATFLASHIGAVLQQQQQQQQHQQQMHSQPEANWNYLTDAGGGATPSIIVQCGTANTTTVVDTLYNEIVDCVNAANQSSSAATITSNVSTTSAAHNQSTNAEEEDDDPIHTFLNMESYFEKELITLIQQEDMIYNYGNENYRNAKLKMEVWEEIARKLKKSVKQCRLKWKALRDQYAREHKRLRTLMHIDATSRWKHYNSLSFLQKYIQQKTLESDSQLSMLLPKNDPVRELEDHMTQSHSPPTQQITLESSSSNSQLNLPTLPHLTGPHKAEQQQQQQQQEEQHQQQQQHQQQQQQQQASELCVATYDDMDIENYINGDVHHNDDDVEDDEDEEMETTTAAEQPPQQQDQHVMTYDHEDGPVYMAVPSVGSAMSKQEQLSDGATSLENQQLQSTAEFQKIEIQTPTTPRYQNAATTPSSTSTSRYHSAPITPSKPTHMEYPSSNGHNSGEDDEIGAFFKAVSMKIRNAQLEPVAFTELQIDILRVINEALRNH

SEQ ID NO: 41842 - DNA, 5402 bp, DROSOPHILA
acccaggattatggtgttaagcaccattaggaacagatatccagatattggtaacggatttttttgggatttttttcagatgaaaatttgtgcatgcctaaaaacaatacctcagaaatgataagagttaagcaatattagctacagcatttaattatagtactcgaaaataaaaggtaaacacttatattcagtttcatttgaccatgaatataatctctttaaaataatggcttgttgtcacttcaaagataatgcaattagtaaaagttaaacatctgattattgaccatcaaaaatgcgatacaaagggcttataatcatcaagtggccatacttgtgttgtaaatacatctataatattttttatgggaaacttcccctttacagaacacatctcacaaagccaaagtcattataaagtacttcagttccaggcgttgcgaaaacgtgtgcggaaatttcgatgtttgggttttaacacaatgaaaataccgattctctaattaggtcgaaagtcctgtctgcgtagcaccggaaaagggttttttaggacctaagcgccgggtaaaacagaaacagagaaggatagcgggatcacgtaggatcgcaggtagtaaaaaaattgctcaattggtgttcgtgagcctgagtacaatcacacatatgggccttgacactggaagttcctcggggctcagcaaccagcttggaattccgacttgacgaggaaaaacgcgccagatctttggcatttctaagtttaatcaaagcgccatgacagggtccataaattcgggcgattgtcagccgcaccggcactcgttccctacatatgttccggctaatacccaaaaagcagctcatcgactcgcgattagattagcaatctgcaaacgcagtcagtcaattaagatataggggcccacttgagattcccccactacataacctgtcgctattttaccaaggagaacgcttagttgcgctttggactccgctcgtgccggattaacgtgctatgattgtcaccgcgaagttggtggccattgggctgggcctcgcgctcacggccttcaccgtatcgaccattgtcctggccgtccagaaggcgaatcttaagagtgatttgcgcgatgcccaggagaagttggatctcctggaagcgggatatacgagcacagctgctccgacaacagcgagtactgcgaatcctggaagcacagcttctccaggaagcacagctgagccgggaagcacagctgaacccggaagcacagctgagcccggaagcacagcttctccaggaagcactgtgacacctggttccactgcttcaacaagtgaacccggcactactgcatcccccgaaaaaatcgactaccgactgcccggaactctgaagcccacccactatgatctctatctgtttcccaacatcgaaactggtgaattcagtggacaggagacgattactattacagttgaagaggccaccgaccagatcgtcctgcactccctcaacctaaacatttcgagtgtatccataatgaatactggcagtgatactttggagatcctggagacaacagtagatgctgtgagggaatttttaatattccagctgaacgaaccactgacaaaaggtaggacagtaaggctgcacattggattcgaaggatcgatggccaacaagattgtgggactgtacagttcgtcgtatgtgaaggaggatgagacccgcaagtggatcgccacctccaagttcgaacccacctacgctcgccaggcttttccctgctttgatgagccagcattgaaggccgagttcaccattactctagtgcatccttctggggaggattaccatgccctgtccaacatgaacgtggactcgagtgtcagccagggagccttccaggaggtcacgtttgcaaaaagtgttcccatgagcacttacttggcctgctttattgtctccgacttcgcctacaagcaggtgagcattgacactaagggcattggagaaaccttctccatgagtgtctacgccactccggagcaactcgacaaagtggatctggctgtgaccattggcaagggagtcatcgagtactacattgactacttccaaatcgcttatccgctgcccaaactcgatatggctgctattcccgacttcgtctcgggcgccatggagcactggggattggtcacctacagggaaacatcgcttttgtacgacgaagccacgagttccgccaccaacaagcagcgcatcgccagcgtaattgcccacgaattcgctcacatgtggtttggaaacttgggtaagctaaatggcggtttgcatagatcggaattcgtattcttaaccgtaactccaattatcttccataagtaaccatgaactggtggaacgatctgtggctaaacgaaggatttgctagtttcgttgagtacttgggcgtagatgccgtctatccagaatggaaaatggcaagtgcacctaggttaattaaggttacatccaacttatttacatatcatatcaatagcgcgatcaattcacggtgagcactttgcacagcgtactcaccttggacggaaccctcggatcccacccgataatccagaccgtggaaaatccggaccagatcacggagattttcgataccatcacgtactccaagggttcctctctcgtccgaatgctggaggatttcctgggggagacaaccttccgccaggcggttaccaattatttaaatgagtacaagtactccacggcggaaacgggtaacttctttacagagatcgacaaactggaattgggatacaatgtcacagagattatgctaacatggacggtgcaggtaaacacatagacgtttacttctaagttcgcgaatatttcaacaccccattccttttttgcagatgggtctgccagtggtcacgatcgaaaaggtgtccgatacggaatacaaattgacgcagaagcgcttcttgtccaatccaaacgactatgacgccgatcacgagccctcggaattcaagtgagtgtgcagaacttattgcctggacgctatctgatcgcgaatttcgcacatacattatatagctaccgttggtcgatccccatcacatatttcaccagctcggattcggtggtgcagcgtctgtggttttatcatgaccagagcgaaagtaagtggtgtcgtctgtatgctggagcacggctccccagatctttgatctctaacttgttatatattttgtttgacagtcactgtaactgttcccgctgccgtcgagtggattaagtttaacgccgatcaggtgggctattatcgcgttaattacgataccgatctgtggaatgatctggccgatcagttggtggtacaaccaagtgcattcggctctgtggatcgcgctcatctcctcaacgatgcttttgccctggccgattccactcagttgccctatgcaacggccttcgagttgaccagatacttggacaaggagaccgattatgttccctggagtgtggctgcttcccgtctgacttcgcttaagagaacactctactacaccagcacctatgccaagtacaagaagtacgccacagctttgattgagcccatctataccgcactcacctggacagtcggcgaggatcatttggataagtgggtagattctttaagagatgtgtgtattttttatatcattcccctgcatctctagccgccttcgtgtcactgctttgagtgccgcctgttctctgggtctggaatcctgtctcactgaagccggagagcagttcaacgcatggctggccaagccggaggatcgtccaaaggccgatgtccgtgaaactgtctactactacggaatacagtccgttggaagccaggaggattgggatgcagtctgggagctgttcgtcaacgaatccgatgccagcgagaagtccaaactgatgtatggcctgtctgccatccagattccctggattttgcagcgctacattgacctggcgtggaacgaggaatacgtgaggggtcaggactacttcacctgccttacctacatctctgcgaatccagttggtgagtccctggtttgggactatgtccgggagaactggcagcgactggtggaccgattcggactcaacgagcgttatttgggcaacctgattccctcgatcactgcccgctttagcacccaaaccaagctggaggagatggagcaattcttcgccaaatatccggaagctggagccggcacagctgcccgggtgagagctctggaaacggttaagaacaacattgtttggctggccgagaacctggagggtgtggacgcctggctggacaagcagccactgtaaaaagtccaaggaagtggtcttgcgaccatggttaccattaaacatgtactcatctaattgccattataaagcaaaaatttgccgaacaagtggaaataaagataagcttagttattggaaaaactgaaattacacctccataaataagcaattatccattggactgattggtaacatgggttgataatcaagtttgggtgggtgccactattggacacgaaaacttttgattgacatttattgcacgtccaaattttcgcactaaatttgacatccaatggaaatttacttcatatatgataaacccccattaattgattgaaatataattttatagttttattgttacgccttttaaattatctaaagtcatttaaaactaaaatatttaccaaattgagcaatatacgcagacttttaatctttaatagttctattaagcaatgaatatgtaaaataaaaatcttttttctatttttctcagtgatgtggagagaatctaattaatatggctaattaccaatagcacagatttgcgttagggaaagagtaaaagtggcttaaatgatgttattaaacccatagcacaattatggtgtcataagccacgcgaattcataccctaccgctccgtattttcccactttctctggctttaaccctatcgcccatttgaccgtaatcgcgtcaatttggccaatcactatcgcaatcgccgaagcgaacataaaccatttccagtgcacacactatcaactaatcgaatattgggcaacaagtggtaagagttggttcgaatgacctaacgctagttagtcgctcgcgacaggtgcgattgctaagatgttcctcagtggctattggttgcaggtggtgctctcctgggcggtggtggcctttgccacggccacggttgtggtggcggtgcagaaggctcagctggaaagggacctccgcgatgtgcaggacaagatcgatgtgttcgaggagtggagcggag

SEQ ID NO: 41843 - DNA, 2988 bp, DROSOPHILA
ctcgtgccggattaacgtgctatgattgtcaccgcgaagttggtggccattgggctgggcctcgcgctcacggccttcaccgtatcgaccattgtcctggccgtccagaaggcgaatcttaagagtgatttgcgcgatgcccaggagaagttggatctcctggaagcgggatatacgagcacagctgctccgacaacagcgagtactgcgaatcctggaagcacagcttctccaggaagcacagctgagccgggaagcacagctgaacccggaagcacagctgagcccggaagcacagcttctccaggaagcactgtgacacctggttccactgcttcaacaagtgaacccggcactactgcatcccccgaaaaaatcgactaccgactgcccggaactctgaagcccacccactatgatctctatctgtttcccaacatcgaaactggtgaattcagtggacaggagacgattactattacagttgaagaggccaccgaccagatcgtcctgcactccctcaacctaaacatttcgagtgtatccataatgaatactggcagtgatactttggagatcctggagacaacagtagatgctgtgagggaatttttaatattccagctgaacgaaccactgacaaaaggtaggacagtaaggctgcacattggattcgaaggatcgatggccaacaagattgtgggactgtacagttcgtcgtatgtgaaggaggatgagacccgcaagtggatcgccacctccaagttcgaacccacctacgctcgccaggcttttccctgctttgatgagccagcattgaaggccgagttcaccattactctagtgcatccttctggggaggattaccatgccctgtccaacatgaacgtggactcgagtgtcagccagggagccttccaggaggtcacgtttgcaaaaagtgttcccatgagcacttacttggcctgctttattgtctccgacttcgcctacaagcaggtgagcattgacactaagggcattggagaaaccttctccatgagtgtctacgccactccggagcaactcgacaaagtggatctggctgtgaccattggcaagggagtcatcgagtactacattgactacttccaaatcgcttatccgctgcccaaactcgatatggctgctattcccgacttcgtctcgggcgccatggagcactggggattggtcacctacagggaaacatcgcttttgtacgacgaagccacgagttccgccaccaacaagcagcgcatcgccagcgtaattgcccacgaattcgctcacatgtggtttggaaacttggtaaccatgaactggtggaacgatctgtggctaaacgaaggatttgctagtttcgttgagtacttgggcgtagatgccgtctatccagaatggaaaatggcaagtgcacctagcgtactcaccttggacggaaccctcggatcccacccgataatccagaccgtggaaaatccggaccagatcacggagattttcgataccatcacgtactccaagggttcctctctcgtccgaatgctggaggatttcctgggggagacaaccttccgccaggcggttaccaattatttaaatgagtacaagtactccacggcggaaacgggtaacttctttacagagatcgacaaactggaattgggatacaatgtcacagagattatgctaacatggacggtgcagatgggtctgccagtggtcacgatcgaaaaggtgtccgatacggaatacaaattgacgcagaagcgcttcttgtccaatccaaacgactatgacgccgatcacgagccctcggaattcaactaccgttggtcgatccccatcacatatttcaccagctcggattcggtggtgcagcgtctgtggttttatcatgaccagagcgaaatcactgtaactgttcccgctgccgtcgagtggattaagtttaacgccgatcaggtgggctattatcgcgttaattacgataccgatctgtggaatgatctggccgatcagttggtggtacaaccaagtgcattcggctctgtggatcgcgctcatctcctcaacgatgcttttgccctggccgattccactcagttgccctatgcaacggccttcgagttgaccagatacttggacaaggagaccgattatgttccctggagtgtggctgcttcccgtctgacttcgcttaagagaacactctactacaccagcacctatgccaagtacaagaagtacgccacagctttgattgagcccatctataccgcactcacctggacagtcggcgaggatcatttggataaccgccttcgtgtcactgctttgagtgccgcctgttctctgggtctggaatcctgtctcactgaagccggagagcagttcaacgcatggctggccaagccggaggatcgtccaaaggccgatgtccgtgaaactgtctactactacggaatacagtccgttggaagccaggaggattgggatgcagtctgggagctgttcgtcaacgaatccgatgccagcgagaagtccaaactgatgtatggcctgtctgccatccagattccctggattttgcagcgctacattgacctggcgtggaacgaggaatacgtgaggggtcaggactacttcacctgccttacctacatctctgcgaatccagttggtgagtccctggtttgggactatgtccgggagaactggcagcgactggtggaccgattcggactcaacgagcgttatttgggcaacctgattccctcgatcactgcccgctttagcacccaaaccaagctggaggagatggagcaattcttcgccaaatatccggaagctggagccggcacagctgcccgggtgagagctctggaaacggttaagaacaacattgtttggctggccgagaacctggagggtgtggacgcctggctggacaagcagccactgtaa

SEQ ID NO: 41844 - protein, 988 aa, DROSOPHILA
MIVTAKLVAIGLGLALTAFTVSTIVLAVQKANLKSDLRDAQEKLDLLEAGYTSTAAPTTASTANPGSTASPGSTAEPGSTAEPGSTAEPGSTASPGSTVTPGSTASTSEPGTTASPEKIDYRLPGTLKPTHYDLYLFPNIETGEFSGQETITITVEEATDQIVLHSLNLNISSVSIMNTGSDTLEILETTVDAVREFLIFQLNEPLTKGRTVRLHIGFEGSMANKIVGLYSSSYVKEDETRKWIATSKFEPTYARQAFPCFDEPALKAEFTITLVHPSGEDYHALSNMNVDSSVSQGAFQEVTFAKSVPMSTYLACFIVSDFAYKQVSIDTKGIGETFSMSVYATPEQLDKVDLAVTIGKGVIEYYIDYFQIAYPLPKLDMAAIPDFVSGAMEHWGLVTYRETSLLYDEATSSATNKQRIASVIAHEFAHMWFGNLVTMNWWNDLWLNEGFASFVEYLGVDAVYPEWKMASAPSVLTLDGTLGSHPIIQTVENPDQITEIFDTITYSKGSSLVRMLEDFLGETTFRQAVTNYLNEYKYSTAETGNFFTEIDKLELGYNVTEIMLTWTVQMGLPVVTIEKVSDTEYKLTQKRFLSNPNDYDADHEPSEFNYRWSIPITYFTSSDSVVQRLWFYHDQSEITVTVPAAVEWIKFNADQVGYYRVNYDTDLWNDLADQLVVQPSAFGSVDRAHLLNDAFALADSTQLPYATAFELTRYLDKETDYVPWSVAASRLTSLKRTLYYTSTYAKYKKYATALIEPIYTALTWTVGEDHLDNRLRVTALSAACSLGLESCLTEAGEQFNAWLAKPEDRPKADVRETVYYYGIQSVGSQEDWDAVWELFVNESDASEKSKLMYGLSAIQIPWILQRYIDLAWNEEYVRGQDYFTCLTYISANPVGESLVWDYVRENWQRLVDRFGLNERYLGNLIPSITARFSTQTKLEEMEQFFAKYPEAGAGTAARVRALETVKNNIVWLAENLEGVDAWLDKQPL

SEQ ID NO: 41845 - DNA, 5326 bp, DROSOPHILA
accaagctggaggagatggagcaattcttcgccaaatatccggaagctggagccggcacagctgcccgggtgagagctctggaaacggttaagaacaacattgtttggctggccgagaacctggagggtgtggacgcctggctggacaagcagccactgtaaaaagtccaaggaagtggtcttgcgaccatggttaccattaaacatgtactcatctaattgccattataaagcaaaaatttgccgaacaagtggaaataaagataagcttagttattggaaaaactgaaattacacctccataaataagcaattatccattggactgattggtaacatgggttgataatcaagtttgggtgggtgccactattggacacgaaaacttttgattgacatttattgcacgtccaaattttcgcactaaatttgacatccaatggaaatttacttcatatatgataaacccccattaattgattgaaatataattttatagttttattgttacgccttttaaattatctaaagtcatttaaaactaaaatatttaccaaattgagcaatatacgcagacttttaatctttaatagttctattaagcaatgaatatgtaaaataaaaatcttttttctatttttctcagtgatgtggagagaatctaattaatatggctaattaccaatagcacagatttgcgttagggaaagagtaaaagtggcttaaatgatgttattaaacccatagcacaattatggtgtcataagccacgcgaattcataccctaccgctccgtattttcccactttctctggctttaaccctatcgcccatttgaccgtaatcgcgtcaatttggccaatcactatcgcaatcgccgaagcgaacataaaccatttccagtgcacacactatcaactaatcgaatattgggcaacaagtggtaagagttggttcgaatgacctaacgctagttagtcgctcgcgacaggtgcgattgctaagatgttcctcagtggctattggttgcaggtggtgctctcctgggcggtggtggcctttgccacggccacggttgtggtggcggtgcagaaggctcagctggaaagggacctccgcgatgtgcaggacaagatcgatgtgttcgaggagtggagcggagagagccgcactcgcatgaagcgtgaagatacggtgtgtaatcacttgctaatcagttgaatccatttactaccataatctaaccctgaagacggattaccgcctgcccacgaatctggtgcccacgcactacgagctctactggcatccggatctggagacaggaaacttcaccggacaacagaggatcagcatcaaggtggtggaggccactaatcagattattctgcactcatatctcctggatatcacaagtgtctatgtgctgaatagagaggtggaaaagtttgagcttgaggaggaacgtcagttcctgatcataactttgacggaagagctggcggtggacgccagcattactctcggaatcatttttggtggacagatgaaggataagcttgtgggtctctacagcagtacatatctaaacgaggcaggagctaccaggtatttcggatatttttacgttatgcccaaaagtatgcaatgtgttcttatgaccagatctggatttgttgttttgttttgaatttttatttgaatactttttcaatatataaattaatattttccttatgcagaaccatttctacgacgaaattcgaacccacttacgcgcgtcaggccttcccatgcttcgatgaaccagccatgaaggccacattcgccattacagtggttcatccatcgggatcctaccacgccgtttccaacatgcaacaaacggtgagctcaagtaaacaaacaatttaaatgggttaaacaaaatttaaataataggaatccaattatctgggtgactatactgaggccatcttcgagacgagtgtgtcgatgagcacctacctggtatgcatcattgtgtccgacttcgcttcccaatcgaccacggtgaaggccaacggaattggcgaggacttctccatgcaagcctatgccacctcgcatcagatcaacaaggtcgagtttgctctggagttcggacaagctgtcacggagtactatattcagtactataaggtgccctatccgctgaccaaactggacatggccgccattcccgactttgcatctggggccatggagcactggggattggtgacttacagagagaccgctctgctgtacgatcccagttacagttccacagcgaacaaacaatcgatagccggaacactggcccatgagattgcacaccagtggttcggaaacctggtcaccatgaagtggtggaacgatctgtggctgaacgagggattcgcccgctacatgcagtacaagggagtcaatgctgtgcacccggactggggaatggtaaggaaatggataataccgatttgaatcctcaaagaaaatatcttatatttaccaatcagctggagcaattccaaatcgtggccctgcaacccgtgttgttatacgatgccaagctatcatcccatccgattgtccagaaggtagaaagccccgatgaaattacggccatattcgacaccatcagttacgaaaagggaggatccgtgatccgcatgctggagacacttgtgggcgccgaaaagtttgaggaggcggtgaccaattacctggtcaagcatcagttcaataacacggtgaccgacgatttcctcaccgaagtcgaagctgtggtaactgacttggatatcaagaaactgatgctcacctggaccgaacagatgggttatccggtgttgaatgtctccaaggttgcagatggtagttttaaggttacccagcagcgattcctctccaatccagccagttacgaggaagccccttcagatagcgcatacggatacaaatggagtgttccgattacctggtttgctgatgatggttcagagaacagcttcatatacgactacgatgtggactctgtgggtattgccgtgcccagcgaggtgcagtggatcaagttgaatgtcaaccaaacgggctactatcgggttaactacgaggagagcctgtgggccctgctcatccagcagctaaccaccagtcccgctcgattcgaaatcgccgatcgtggccatcttttgaacgatgccttcgccctggcggatgccaaccaactatcctacaaaattcctctggatatgaccgcttacttggcccaggagcgcgacttcgtgccctggtatgtggcctccaataagctgaggtcgctccatcgcagtctcatgttcagcgagggatacgtgtcgtacctcacctatgccagaagtctgatcgctggcgtatacgaggaggtgggttggactgtggacgccgacaatcacttgaagaagtacgtatataagtaccaacttgtttttctgaaaacattactcaaactactgttattcaaacaatctttattcctttgcagccgcctgcgtgtttccattttgaccgccgcctgtgccctgggtgttccagattgtctgcagcaggcttccgagcgcttcagcaccttcctggagaatccgaccactcgaccttcccccgatcttcgcgagattgtctactactacggcatgcagcagtccaccagccaatcgagctgggatcagttgttccaactctttgtggccgaaaccgatgccagcgagaaactgaagctgatgtacggattgtctggcgtacggaacagccagtatctgttcgacttcctggcacaggcctccagtgatgagagcatcgttcgctcccaggactatttcacctgtgtgcagtacatagccgccaatcctgtgggtgaaccggtggtctgggaattctaccgcgaacagtggccccaactcaccacccgttttggcctgaacaaccgcaactttggacgacttatcgcccagattacggccaactttgccagctccgtgaaactggaggaggttcagcacttcttctccaagtaccccgaatcgggagctggagctaactcccggttggaggccgtggaaaccatcaagtacaacatcgaatggctatccagaaacgaagctgacatcaccgactggctaagtggaacggcctcgccgctgaccaagaaaaaccaattgtaaaattgtatattgtatataaactggccatttagccaataattagagttgcataagcgaaaattccgttcgagttcaataaaatgaaatttcaaaatcaaaccataaatacaacccccatattttcattcattttatccgaggcaagtggggatttctatagcttctaggaaataattggagatagggtctttgagtatatggtcaatgcggaatcatgaccatgcgtaattatcctgagtaattagagtgtccagtcataatagtcgatatatggccttgttcgaatcgtaaaagtaatggtctagcataaaacgattttatctggacacgaagctatatagtatatagtctagatatcggtcagcaatctgatcaggtttatcaagtccaaattgtggggtcagattcgcaacttgcattcagtttccaatttggcttccagcctagtggaagcagtcgagtaattttcatcgaaaaaagaatatccctaaaaatggttgcctgtgagtcttctatatagagtagcatatcccgaaggaacagtaactaatgtgaactcattttagggctgacggttaagtcagtggccatctttttgggcctggcctctactgctttttgtgtggccacgattgtgctggccgttcagaatgcggacctggagaacgatctgcaggatgccctcgataagatcgacgcattgacggtggacaccacgtccacgtcctccacctctaccagcacttccacgaccaccaccactgcaaatcccaatgggcccacggatgacaccgagcctggctctaccaccacacctggcgtaggaggtgacacaacccccagtgcaggaacatctccgggtggtgaaacttcgccatcatccagtacaggaagcaccaccaatcccatctatccgacattgccgacaggacttcctgatcctgaaaaggtgagtgaagtgcaagaaaaatatatttcacggctataaaagatgttagttcagaaaaaccctcacacagagtgggaaaattttcagcgattagacgtaaagtcggcatggctactaatttcgaatttattaagttccaacttagtcttactgg

SEQ ID NO: 41846 - DNA, 3018 bp, DROSOPHILA
ctaagatgttcctcagtggctattggttgcaggtggtgctctcctgggcggtggtggcctttgccacggccacggttgtggtggcggtgcagaaggctcagctggaaagggacctccgcgatgtgcaggacaagatcgatgtgttcgaggagtggagcggagagagccgcactcgcatgaagcgtgaagatacgacggattaccgcctgcccacgaatctggtgcccacgcactacgagctctactggcatccggatctggagacaggaaacttcaccggacaacagaggatcagcatcaaggtggtggaggccactaatcagattattctgcactcatatctcctggatatcacaagtgtctatgtgctgaatagagaggtggaaaagtttgagcttgaggaggaacgtcagttcctgatcataactttgacggaagagctggcggtggacgccagcattactctcggaatcatttttggtggacagatgaaggataagcttgtgggtctctacagcagtacatatctaaacgaggcaggagctaccagaaccatttctacgacgaaattcgaacccacttacgcgcgtcaggccttcccatgcttcgatgaaccagccatgaaggccacattcgccattacagtggttcatccatcgggatcctaccacgccgtttccaacatgcaacaaacggaatccaattatctgggtgactatactgaggccatcttcgagacgagtgtgtcgatgagcacctacctggtatgcatcattgtgtccgacttcgcttcccaatcgaccacggtgaaggccaacggaattggcgaggacttctccatgcaagcctatgccacctcgcatcagatcaacaaggtcgagtttgctctggagttcggacaagctgtcacggagtactatattcagtactataaggtgccctatccgctgaccaaactggacatggccgccattcccgactttgcatctggggccatggagcactggggattggtgacttacagagagaccgctctgctgtacgatcccagttacagttccacagcgaacaaacaatcgatagccggaacactggcccatgagattgcacaccagtggttcggaaacctggtcaccatgaagtggtggaacgatctgtggctgaacgagggattcgcccgctacatgcagtacaagggagtcaatgctgtgcacccggactggggaatgctggagcaattccaaatcgtggccctgcaacccgtgttgttatacgatgccaagctatcatcccatccgattgtccagaaggtagaaagccccgatgaaattacggccatattcgacaccatcagttacgaaaagggaggatccgtgatccgcatgctggagacacttgtgggcgccgaaaagtttgaggaggcggtgaccaattacctggtcaagcatcagttcaataacacggtgaccgacgatttcctcaccgaagtcgaagctgtggtaactgacttggatatcaagaaactgatgctcacctggaccgaacagatgggttatccggtgttgaatgtctccaaggttgcagatggtagttttaaggttacccagcagcgattcctctccaatccagccagttacgaggaagccccttcagatagcgcatacggatacaaatggagtgttccgattacctggtttgctgatgatggttcagagaacagcttcatatacgactacgatgtggactctgtgggtattgccgtgcccagcgaggtgcagtggatcaagttgaatgtcaaccaaacgggctactatcgggttaactacgaggagagcctgtgggccctgctcatccagcagctaaccaccagtcccgctcgattcgaaatcgccgatcgtggccatcttttgaacgatgccttcgccctggcggatgccaaccaactatcctacaaaattcctctggatatgaccgcttacttggcccaggagcgcgacttcgtgccctggtatgtggcctccaataagctgaggtcgctccatcgcagtctcatgttcagcgagggatacgtgtcgtacctcacctatgccagaagtctgatcgctggcgtatacgaggaggtgggttggactgtggacgccgacaatcacttgaagaagtacgtatataagtaccaacttgtttttctgaaaacattactcaaactactgttattcaaacaatctttattcctttgcagccgcctgcgtgtttccattttgaccgccgcctgtgccctgggtgttccagattgtctgcagcaggcttccgagcgcttcagcaccttcctggagaatccgaccactcgaccttcccccgatcttcgcgagattgtctactactacggcatgcagcagtccaccagccaatcgagctgggatcagttgttccaactctttgtggccgaaaccgatgccagcgagaaactgaagctgatgtacggattgtctggcgtacggaacagccagtatctgttcgacttcctggcacaggcctccagtgatgagagcatcgttcgctcccaggactatttcacctgtgtgcagtacatagccgccaatcctgtgggtgaaccggtggtctgggaattctaccgcgaacagtggccccaactcaccacccgttttggcctgaacaaccgcaactttggacgacttatcgcccagattacggccaactttgccagctccgtgaaactggaggaggttcagcacttcttctccaagtaccccgaatcgggagctggagctaactcccggttggaggccgtggaaaccatcaagtacaacatcgaatggctatccagaaacgaagctgacatcaccgactggctaagtggaacggcctcgccgctgaccaagaaaaaccaattgtaaaattgtatattgtatataaactggccatttagccaataattagagttgcataagcgaaaattccgttcgagttcaataaaatgaaatttcaaaatcaaaccat

SEQ ID NO: 41847 - protein, 969 aa, DROSOPHILA
MFLSGYWLQVVLSWAVVAFATATVVVAVQKAQLERDLRDVQDKIDVFEEWSGESRTRMKREDTTDYRLPTNLVPTHYELYWHPDLETGNFTGQQRISIKVVEATNQIILHSYLLDITSVYVLNREVEKFELEEERQFLIITLTEELAVDASITLGIIFGGQMKDKLVGLYSSTYLNEAGATRTISTTKFEPTYARQAFPCFDEPAMKATFAITVVHPSGSYHAVSNMQQTESNYLGDYTEAIFETSVSMSTYLVCIIVSDFASQSTTVKANGIGEDFSMQAYATSHQINKVEFALEFGQAVTEYYIQYYKVPYPLTKLDMAAIPDFASGAMEHWGLVTYRETALLYDPSYSSTANKQSIAGTLAHEIAHQWFGNLVTMKWWNDLWLNEGFARYMQYKGVNAVHPDWGMLEQFQIVALQPVLLYDAKLSSHPIVQKVESPDEITAIFDTISYEKGGSVIRMLETLVGAEKFEEAVTNYLVKHQFNNTVTDDFLTEVEAVVTDLDIKKLMLTWTEQMGYPVLNVSKVADGSFKVTQQRFLSNPASYEEAPSDSAYGYKWSVPITWFADDGSENSFIYDYDVDSVGIAVPSEVQWIKLNVNQTGYYRVNYEESLWALLIQQLTTSPARFEIADRGHLLNDAFALADANQLSYKIPLDMTAYLAQERDFVPWYVASNKLRSLHRSLMFSEGYVSYLTYARSLIAGVYEEVGWTVDADNHLKKYVYKYQLVFLKTLLKLLLFKQSLFLCSRLRVSILTAACALGVPDCLQQASERFSTFLENPTTRPSPDLREIVYYYGMQQSTSQSSWDQLFQLFVAETDASEKLKLMYGLSGVRNSQYLFDFLAQASSDESIVRSQDYFTCVQYIAANPVGEPVVWEFYREQWPQLTTRFGLNNRNFGRLIAQITANFASSVKLEEVQHFFSKYPESGAGANSRLEAVETIKYNIEWLSRNEADITDWLSGTASPLTKKNQL

SEQ ID NO: 41848 - DNA, 4376 bp, DROSOPHILA
gggtttaattaaatacggacatatcatttggaagcctgaagaacagaactagtgatagatagctccatatgctgtatagtctgcattggcagtcagcatggcggtgccaacttgaattgctccacgtgctacttactttcttgccagcgcatatggacgcaggaaatccagctctttgaaatacttccacttcactgcttttgagcaggccttggcgcgcttcagctcccggcagtactgatccctcatggccttccacttggacttgcactggacgtctgtggaaatgggattaagtgccaactttttggtggggaaacttaaacgttcacttaccggaccaacccacattgctgccaatctccagccatttctcgtccttgatcttggtgctgcggtagtggggatgcttgggattgtatagcgactgctcctgggagaccagcgaaatgaggatcagctccttgggaatgctgaccacattctcacccagactaggatctatgctgagattcacgtgctgctgctgcggctgctggtgctcctgcagctggttggcacatggcagcgtctccatggcgctccctacttggtgtccatgctggcggtgtgttaatatgggcaattgttataaataaaaacagggaaaacaaaaatgaggtgaccgaacagctgatcctggagagttgtgtaattagagggaccagtttcgccttggctatacaagcatcttttttacattgagtggaacatctggtggccaccgacctggtcaccctgaacagtccagtgctgcaagaggcgcacaccatttcgataagttggcagcccgctcatatgttcgattttaaaattttggcgccaaaaaatcgtctttctatacatttgtatttaacggctaatccaattagctaattgcattaccgctaaggaaaaaagaaaacatcataacattcaggcaaaacaaattgtttaactctcagtttattgtgcgacgcagtgcggttcaaaactagaaactttcttctggcaaatattgcagccgtccttatataattaatgctccataatgccgaaaattgacccagaaacacaaaaactctacgacgaaatcaatggcatgatacagaagtttaaggtgaattaaataaactcaacgtacagcgaagtaaattaaaaatatcagataataaatatagcaacaacaaaagtaacataaaaaagttttccccatataaaataacaatactctaaaaataccgatagccagcttaaaaagaaattcgttgtccttaatttaattttaacaaaaaaatattaatataactttttggaatatgtatgataatatgattgggttttaaatatcttgccagatttcatacttcagtgctaactactcccataatatttcatctcgataatagtcgaacacattatttccaattttgaaaaaattaagtgacttaacttaatcgaaaactgtatgcgtctctaacatttattctggaaattcttgtaataaaaattgtcattcattactatgattttgctttcaggatgaccaaaaaagcaaggctgattgcacgttggccgataaatgcggcgacatgggggatgtgcccaagattcgattctcatccaagaagattctcaagggccacatcaacaaggtgaattcggtgcattttgccggggactcgcggcactgcgtcactggatcgctggacggcaagctgatcatctgggacacctggaccgccaacaaggtgcagatcatccccttgagatccgcctgggtaatgacggtggccttttcgccgtcgggtaactttgtggcctgcggaggaatggacaaccagtgcaccgtctacgatgtgaacaatcgcgatgcctccggagtggccaagatggtcaaagagctgatgggctacgagggattcctcagctcctgtcgcttcctcgacgatggccatctgatcaccggctcgggagatatgaaaatgtagggctttgcttaactttttggagtaaaatctaagtttcctatgaccaacagatgccattgggatctggagaagggtgtcaagacaatggatttcaatggacacgctggtgatatcgctggcttatcgctttcgccagatatgaagacctatatcactggctctgtggacaaaactgccaagttgtgggatgtgcgagaggagggccacaagcagatgttcttcggtcacgacatggacgtgtcatccgtctgcgtgagtacacatatatgttttaataataatagcttatattaattaccaagaacaactataagcagctaatctatttagtacttgtaatttaatacaaatgtattcattacacccacccaattatcattatcggttgcagtaccatcccagtggcttcgggttcgcctcctgctcggaggaccaaacggcgcgcatgtacgacctgcgggcggaccagcaaatcgcccagtatgaaccgccccagaagaacactggcttcacgtcgtgcggtgggttctcgttctccgtcttggtggaacacggtcgccttgacttttgacgggtttttaatctgattttgtgtccccaccagctctatcgaccagcgggcgctacctcatgtgcggcggcattgagggcaacgtgcactcgtgggacacgatgaagcagcggcacacgggtgggtattgggaattgggtagttcgtattgggtattggatatccattgcacttgggggattcggtgataaagaacggggaaatggaggcgaagctaatgctcaggctggcacttgacttacatcgatttgctgaccttcttctccactttctactttctacttaccatttgtcactttccattcctccacaggcacactgtctggtcacgagaaccgcatcacttgcatcagcctgtgccccaatggcatgtgcctggcgtccaccagttgggatcagcaagtgcgtctgtggctctaatctgtgcctctgatctgggttcagtgtcgtccaaaggcgaagacaacgtttatgcgtgcagtttgcttgcaaattacgtatacgtaatatccatagcctgcaagtaataaggatagttctcagtgcagactaacaatattaatacaatattaaatctattgttaaacttgcgaacataagaatagcttgccccctttaagtgctaatttgcaagcaaaacgtgcgtatgaatattattataataattgaatacttgattacctagagaaagtagcctccaataacaagcaagtgccaattggatgtgcgaaataaaatgtatgaatagtacaacaaagtaacacgtctcctccattaaaactccattgcaacttaattttttttatatattttttatatttttcttataaaaaatacttatacaattacgaagatatttttgctgctgcgatttttggcgcttggttttgtttgtttgtggaaattgtctttgagctggtcaaagaggcagctaggtaaattaaaacaaatcacttttgaaatcaacagagagataaagatacaggttcagatacagaatagtcgaaagtatacagatagatagaagatagatagaaagagagagagagagagagagagagatagaaatgaaagtcgcataaataacagatggatagagatagcttaggatcacacaggaagcaggatgcaacgatttgagtattctgtagatggatcagcatagatcagctggtacagtttgtttagtttatcagactctcggtggaactactgtgagttgttctcctgtttgggtagatggaaggatagcgacgacgggacggccttaaacggagaagccatcgccggtgggatccaggatccaggggtagttgttggggcactccatgcacgtgaagagacgcagcgtctcgccgggcagctccctggtggtcaggggacacgcgttgggcagagagcagtagggctggcccttgacgtcgcacttctccttccactcctggaagtcgcgcagcgagttcagctcggtggggttctgcatccactggatcacctgcaggttggtcacgaagaacacgtcgttgcggccgagcatctcctcgatgaatttgatcagctcgtcgcggtactccttcttcgacttcagccacgaagcgtggaagtggagtccaagtggagcacggttgctattgtagtggcggttgaagttgtggcgcagcaggcgtgcgaactggtcgccgctggctacgtttgagcaggagtccaccatatggcaaccgggcagggactcgtcgaaggtgggatcgtcgcgccggtccagctcgttcatgaccatctcccacacggggtggctc

SEQ ID NO: 41849 - DNA, 1486 bp, DROSOPHILA
tgcggttcaaaactagaaactttcttctggcaaatattgcagccgtccttatataattaatgctccataatgccgaaaattgacccagaaacacaaaaactctacgacgaaatcaatggcatgatacagaagtttaaggatgaccaaaaaagcaaggctgattgcacgttggccgataaatgcggcgacatgggggatgtgcccaagattcgattctcatccaagaagattctcaagggccacatcaacaaggtgaattcggtgcattttgccggggactcgcggcactgcgtcactggatcgctggacggcaagctgatcatctgggacacctggaccgccaacaaggtgcagatcatccccttgagatccgcctgggtaatgacggtggccttttcgccgtcgggtaactttgtggcctgcggaggaatggacaaccagtgcaccgtctacgatgtgaacaatcgcgatgcctccggagtggccaagatggtcaaagagctgatgggctacgagggattcctcagctcctgtcgcttcctcgacgatggccatctgatcaccggctcgggagatatgaaaatatgccattgggatctggagaagggtgtcaagacaatggatttcaatggacacgctggtgatatcgctggcttatcgctttcgccagatatgaagacctatatcactggctctgtggacaaaactgccaagttgtgggatgtgcgagaggagggccacaagcagatgttcttcggtcacgacatggacgtgtcatccgtctgctaccatcccagtggcttcgggttcgcctcctgctcggaggaccaaacggcgcgcatgtacgacctgcgggcggaccagcaaatcgcccagtatgaaccgccccagaagaacactggcttcacgtcgtgcgctctatcgaccagcgggcgctacctcatgtgcggcggcattgagggcaacgtgcactcgtgggacacgatgaagcagcggcacacgggcacactgtctggtcacgagaaccgcatcacttgcatcagcctgtgccccaatggcatgtgcctggcgtccaccagttgggatcagcaagtgcgtctgtggctctaatctgtgcctctgatctgggttcagtgtcgtccaaaggcgaagacaacgtttatgcgtgcagtttgcttgcaaattacgtatacgtaatatccatagcctgcaagtaataaggatagttctcagtgcagactaacaatattaatacaatattaaatctattgttaaacttgcgaacataagaatagcttgccccctttaagtgctaatttgcaagcaaaacgtgcgtatgaatattattataataattgaatacttgattacctagagaaagtagcctccaataacaagcaagtgccaattggatgtgcgaaataaaatgtatgaatagtacaacaaagtaacacgtctcctccattaaaactccattgcaacttaa

SEQ ID NO: 41850 - protein, 346 aa, DROSOPHILA [sequence omitted]

SEQ ID NO: 41851 - DNA, 10997 bp, DROSOPHILA
aagatggctttcaaatccatatctatttccaaaaatggttaaagcaataaagcaataaaggcaaacggataagaaaccaaaatacgcttaggtttcaatatttgtgtagtagagctattgttgtttgatatctgaaattgcacctaataaattaggaccctaatttcacaacatttagccactatatccagctaaggcatatttgttgcaacgacgtccacttggtttacgacctgaccacaacagtgctatttcctatcgccaccttatcaacgcattgctcacttaatagggccaaagcccattatcgatggcgtggatattaaataaactttacgaccccgcagatcgaatggcgcctgcccacggaactgacgcccatcaagtacaaggtgtactaccatcccgacttgacgaccggcgcctgtgagggaaccgtgtccattcagttccagctgaacgcgatcaccaacctgatcgtcctgcacgccaaggagctcaatgtgcacagcatcagcatcctgaacatgatggcgcgcatacgcgtggccatcgatagcatcaacttggatgagtcccgggagctgctcctgatcacgctaagagaggtcctcagtatgaacaaggcctacacactgtccgcaagtttcgactgcgatctgagcagtctggtgggcagctacatcagcaactacacgaatgccgatggagtagataggtgagtaattttaaggtatatcttgcgatgacaaacattttgttagcatgtctagactaagatgtcaggtatctttattatatcgtactatttatgtagctaagatcgtatctagtgcactgtccgcaactagtacgattgcaagcacacttgtgaatacccccaatgcattggagatcatcgcatgttggggccataaaaaagccggtctcagctgatgagagagctttccggagaagctcgagtgccgtgacaactttggagcccgcttcagtcggaagttcagagcagagcgcgacggtcgcgatagaaaagagcggactccgtctgcaaatacgatctcaattacgattctcgcgattcccctttcttttcgcttttcttcgttttctcggatttctcgagtgcgcgcctacgatttgaatcaagaatgatagctgtccggcaattgccgttatcaaattagccgagtgaatattcctcggacccggcaaagttacaattaatgccattcgtagacaaaagaaaaacgaaaaacgagacacgaaaagctgtgatttcaactgtaaatcaagtaaaaggcatagtgcgaaatgtgacgggaataatagataataagtggcccatatcaatcagataccgttgagtccgctccaaaagctccacgccaatacaaaatgaccattgtcaccgcatcgccgttatgcgatcaaaattctagttttaattgggcgcattgaggcgatcactatttttaatattcgctgaaatgtgaccaccggattctatgccaactttgactttcaacgggtattcgtttcgataaacaacgggccatcgcaggctggccaagagaactccacatggctgaatcaaacaggttgcaccgctcccttcccctcccctccttctttcccacacccctttgggaccgctgcaaacaggcttggagccaaatgcatacatagttcacttgccgcgcaagttcttggccttaaatcggccacaatcgatgcacagcaaaaaaaaaaagaaaagaattatatctatcgtagcccattatcagattatattggtatgtctcttatcaacgagaagtagattctgttcgtagttgcattctttgacatttatcaacaattgttaccaatctgattataagaaaaattaatatcacagtttttttaattatcaatattatcaatattataaattgtatatataaatacaattacggcaattagacattttacttcttcattagatcttcaatttgtatcttcgattttgttggtaatcatttgcttatgattttttttgctgtgtatctgtggttgttggccagcaaatgcgtcgtgtttacatcttcaatgcggcaaatactcaatggccgctgagaaaatactttcttcaaaaagccgcaacaaaatgggtcgacatcattgactgccaagaaacttgttgtcatagtagcttcccctacccgtttctcgctgtgtttcctgggtttgttttgttcttgaaagttcagtcaaagctcggtggtcaaacctttttttcattttcattgacactgatttctttttcgttcttcttgggcgaaatagaaatttttttatttccaaacggtgggaaagaaccttcgaaagtggagggctttttaattggatttttgtgctaataatgtaaattaacggctgttgttggcagaattgataaggcacttgacacctttggcggtgtgtaaattatacaatttaacaccttgaagttcattgatctacatgctgaaatataaacaatttcattgatcttctatttataaaatatttatttatttatatttcaatgaactgttgataaagcttacataaatatttgtaaatatcgcatggtttcgagtttcctattttccaatattgaagttatttataaagtgtatatcatgaaatctatagcattaaattaagcaagtcaaggccgaagtttcctctccgattttatagtttatttgtgttgaaagtgatgcaacccattgattaatagtaaatttatttcgcattccgttaaccccaaacatgcaaattgtggcaatcatttctttgtcaacgcatcttccttttatttattgtttttatttgaattttccctttgtgtatatcataaattgcaggcacgtatagtcgaccattgtcaatttcatcccaccgcgggtgttatgggtagtatttcttccatgtctgggattcactttgagtttttgggtgtttctggggcgcacttgtcacgtataactttgtgtttattgtgaaagttatgaccttaaaaagcccgaagaacgtgtttcaaatgtaagctttcagtttcgaattccaaaatttaaaagcatctctgctctgaagtaaacaaacatataatggagtgacaaacagggatatttatctgaatgatctgaatctgaatttatctgacaacacaaattgttactgtttagcataagaaatgatccacgtttcttatatcaaataatgtttagattaattcctttttaagctgctgtattgcgcattagttttttttttctgtgtgctttcgactcgatctacaaagtagtgaaatttatgcgactcattagcgaagtatgagaactgttatgttatggcttgtgcccccgcgatcatcgcttcatcggcttcagaatgccgagatattcacatctgtgcaatggggcgtgtccgattggctgttggaagtcggagatatatgaactcatatggtacatatgtatataccaaccattgtctgcagatcttctggttgctttttttccggcgctcataaggtggtagtcatgcaattttgttgactccgatgtgcggtggctttgtgcgatgtgcgctccctaattgagtcagcattacatcatccgcggaagatgcaagggggcgtatacgtattataccatgtgtatcagagacaattgcctgccggctggtgaaaattagcatattctgcagcctcgaattcctcaattcgcacaattccgagtgaatggtgatccgtgtgatacttcagctgcatcgcgtattgttcttttttttttggcttaatactcctatatcctgacatcattttcgaaaagcaagccgtggatcatgactctgcgggcaactcaattcatttccaatgctaataatggcatctgtaatttcttgccatcgcacaacctgcggagatttgtgcaacagactccgtaaattgacaggcaaaaagccaacaaccttttgtgatccgtcaatcaatcgtacacagcgagaaaaactatacactatgattaaaaaaatgctattaagtaatcatcattgactatctagagagacataaaattgagatgttataaaagtattgtatgctactgaatttcttagcgttattgtgtagagacgcctccatagaaagtcgtatcattgcaacaaacccggggattcgaattgcaactcttgcggttagccagcccagttccaacaccaactttataaaccaaactaaaaaatggcttcgagtatttgtagtaacaatttcacaaaatgaccaacttcattacgtgaccgttggaggggactgggggacaaaaataacaggcatctgattgatctgcagcgagtcgaaattgaggcaatctccacctggagatagagtgaaatgtgacggaagctgtgctgccccgcctccttcacctggcacctccataaaagccgggtccataagcccgggtttgtttataagcagctcggagattattaaaacagaaaaaactgatgatggcagcggagacgcatgtaattcagtacgcgacttttatgatgctctcgaattaccccgccgatgacacaatagattgtatgaagttatggcgttgtgggacagccccatagttggccgaaaaaactactgttagagtgaagcttaccgatcgtgacatttaataatgttttccagtgatttactgttgttgaacgcaccgagcccagtaatataggactagaaacagcaaaaaaatagtacaattaagaaggaaagaaactaaaagtcatgtatgcagcgaaaaacgtacgcccgcgcagcagtctctccacagacgacaatcaccggatcaaggacaccaatcggccccacaaggcccgcagcaacacgatcctgaccctcgccgcattctgcgtctttctgctagtcctctgcggcttcctgctgggcgccctcgtctacgtcggcaagaatatagccgaggagcaccagaggcagcagcacgcgaatgcttcccagtgggccttgaactccaccatccgcacagtttacgtggatcgggaccagttgctatccaccaagcccattatcagcgtactttcaggttggtttgtgtagggggaaacaaaagcaccattggaatttatgaaaactaaatgaaccagtcaattcaatcgcttgtataagatcggaatttagagatctcttacaattgtttgttatttgtcaccatagttggcaaatatttatagtgctctctaattttcatttgaatttcgaactgggtttgtataaatataccaccttttgataatcttgcataacatacaaagctgaatacttatttacgtattatgcatgtatctttccttcaattgtcaaatttttgagttaacttcagaaaaatgcaagaaaaaattcttagtggcttgaaatcatgtttgaatttggcgcgcattctgtgcggtaaaaataccaaatgcacctatccaagatcacaaccttgctgctctctgtttggtatattcaagggagtatttaacattaccaagcacatttaagtaaatcattttcgacccactgtcacactgttctgtgctttttagagactgatagaattaataatattggccttcttattgataatttattcgcacacaaaacctagataatcgcttttacacgactcaagtgccaaccagcaaaaaatcgagcataatggcaactgtggcgcccgctgtaaaagccgcgagcaaggtgctccagaatctgggattccggctgcccaaacagattaagccaagcaagtaccgccttcatttgcgccccgatctcgaacgaaagaactattccggcaatataagcatcagcctgcaagtactggagcccatagccttcatcccagtccatgtgaagcaactgaatgtgagcaccgttgaggtgaagcgcctggatgaatctggagcgccgcttaaggacatcacccccacgctgacctttgcccatccggagtttgagtactgggtgaccgagttcgaacagccgctggaggcgggaaactactcactgctgctcaactttacgggatcgcttgtagatcggattacggggatgtaccagagctcctacttggataagctgaaaaaccgctccaggtagcccgtctactaaccatcaaaagccgcgaaagccactaacccagacataaaaccctaaattctatttgtatattcttatttaactaaaaaaacaactttttttttacttttttttcagcgcattagtgtttgttatttagactatgataaattaacaatagtgataacgtcattaatcccatttcagatcaatcatttccacaaagtttgagcccacttatgcccgccaagcattcccctgcttcgatgagcccgcccttaaggctcagttcaccataacggtggcccgtccaagtggtgatgagtaccatgtgctgtccaacatgccagtggccagcgagtatgtcgatggcgatatcaccgaggtgactttcgcggagaccgtacccatgagcacctatctggccgcctttgtggtgtctgattttcaatacaaggaaaccactgtggagggaaccagcatcgctctgaaagtctatgcgccaccagcgcaggtggagaaaacccagtacgccctggacactgcggccggagtgatggcctactacatcaactatttcaatgtttcgtatgccctacccaaattggatctggttgccatacccgatttcgtgtccggtgctatggaaaactggggattggtcacgttccgggagacggctcttctgtacgacgaatctaccagttccagcgtgaataagcagcgtgtggccatcgtcgtggcccatgagttggctcaccagtggttcggaaacctggtaaccatgaactggtggaacgatttgtggctaaacgagggtttcgcatcattccttgagtacaagggagtaaagcaaatgcatccggaatgggatatggacaatcagtttgttattgaggaactgcacccggtgctgaccattgatgccaccttagcctcccatccgattgtcaagtccattgagagtccagccgagatcacggagtacttcgataccatcacctattcaaagggagccgccttagtacgcatgcttgagaatctggtgggcgaggaaaagttgaggaacgccaccacccgctatttggtgcgtcatatctacagtactgccaccaccgaggattacctcaccgcagtcgaggaggaggagggcctggaatttgacgtgaagtaagtaaaatatatgcctgatagaagacgtattctttactttaaaaatgtcatgtaatttgcaggcagatcatgcagacctggacggagcagatgggtcttccggttgtggaggtggagaaaagtggcagtacttataagctcacccaaaagcgtttcctggccaacgaagatgactacgcagccgaagctgaagcatcgtccttcaagtaagtagaatcataaaaagctgatgattaggtttaaaaaaaaaaatagcttacacgcccaactttaacaatatctctttaaacagctaccgttggtcgattcccattacctacacgagcagcatcaacagtgaagtccaatcactaatattcaaccacaatgacaatgaggccaccataacgcttccggaagaggccagctggattaagattaacacgaatcaagtgggctactaccgggtgaactacggcagcgaacagtgggcggaactcatatcggccctgaagaactcccgggaaaccttcagcaccgccgatcgcgctcatctgctgaacgatgccaataccctggccgctgccggacagcttaactactccgtggcactggatctgatatcttacctggagagcgagcaggactacgtgccctggagcgtaggcacctccgccctggctacgttaaggaaccgcgtatactacacggacttgtacactaattacaccacctacgcccgtaaactgcttacgcccatcgtagaaaaggtcacgtttaccgtggcagccgatcatctggaaaagtaatgcactttagacactgacgttcttacacttatataattcattatattttacagtcgcctccgtattaaggtgctgagctcagcctgcagcttgggacatgagagctccttgcaacaggcggtcacgctcttcaaccagtggctagccagccccgagacccggcccaatccggatatccgagacgttgtctactactatggtctgcaacaggtgaacacagaggctgcctgggatcaagtttggaagctgtatctggacgagagtgatgcccaggaaaagctgaagttgatgaactgcctaaccgccgtgcaggtgccatggctgttgcagcgttacatcaactgggcctgggatgagagcaatgtccgccgccaggactacttcaccctgcttggatatatatccaccaatccggtgggtcagagtcttgtgtgggattacgtgcgtgaaaactgggagaagttggtggatcgtttcggcatcaatgaacgcaccttgggtcgtctgatccccacgatcactgcccgcttctcaacagaaaccaagctggaagagatgcagcagttctttgccaaatatcccgaggctggagccggaactgcggcccgtcaacaggcgttggaagcggtgaaggcaaacatcaaatggctagcggccaacaaggcccaggtgggcgaatggttggccaattacgttcaacagtccagcgtcaccaaccgcattcagtgagccctaaactcggccatttgcaccttgtaaaatatcagtaatgtaaaaactaccaatggaagtgactatagtcttagctaattagtgaagcaaaagcatttcaaatgtaaacgaagaattgtgattgcttatgatatttttgaagaaaatacaagtgaaaaaataatttcttgaatactttttcctaatcaattaaagctaatccctttaaaatactgatcattttcaccgaaagaaatggtataatttgatgcaactaaaatatttttaattttgttaaattttgattactttccaccatcacttccactagaacttccaccatcacttccactagaacttccaccagaacttccactggaacttccactagaactaccactagcacttttcttggtggtcgccgttgtaatccatgggcatattggtgaccgcaacatgcaggcgataataatgaaagttccctcagttgccggagtgctgaacagcatgagtagagaaaccgccaagatggccatcaggaaagtgaaaggctgcatagtgatgctcgattcagaactaaattttcatccgatcgattccccatttatacgaagtccgagtctggggagcaattgttttaaacagacccagcaaatttgctaattgtttataaacacatgccacaagataatatgaaagtaatacttattataacaaaacgtgctagccatgtggctaaacgagtttttcgcatcattccttgagtacaagggagtaaagcaaatgcacccggaatggaatatagacaatcagacaatcattcgggaactgctcctgatggtgaccattgaccttagcctcccatccgattgtcaggtccatttagagtcctgccaagatcacggagttcttcgataccatcaccaagggcgcagccttagtacgtatgctgaagaatctggtttggtgcgtcatatctaccgtactgaggattacctcgccgcagtcgagaagaaatagggcctggacggatcatgcagacctggacgaagcatatggctcagcgacaatactactttaacaaaacttctttaaacagctaccgttggtcgattcccattatctatacgagaagcatcaacaatgaagtccaatcattaatattcaacaatgaaaatgagaccaccataacgctttcggaagagaccagctgggtaaggattgacacaaatcaattgggcaactaacgggtgaactatgccagggagcagtggtcggaacatatttcccggaaaaccttcagcaccgccgatcgcgctcttctgctaaacgattccaaaaacttgtccgcagccgtacagctccagccggaactacttgttattaaaaagttttggaagcggggatcgcaaacatcaaaaatcaaattgtcaacaaggatcaagtggtcaatgatttccccacaagaattctgattgcttatgatatttttgaaaaaaaatacaattgaaaaagaatttctgtaatattttttaagaagggataggtttttttttttttttttttttattatttattgaatcttccctttgtgttaagagactaacaataagtgttcaaatcttaatctaacttaattaactttcacttagtgatagttttttttttcattaatgccctaataagtttatttctgggctgggaggtcgttgcggtgcagccggctttgactgcatactcggattagttttcttgcgaggggatttgtatgggtggtcagcttttcgttatacttcgtttttttctcagctattacttcgattactaatttgatttttaggtctctgtgtatgttttcgttccgaaggtaccacggcgctccagtgataattctcagaattcttgactgtgctcgctgaataatgtctatgttacttctggatgcgttgccccacagctcggagccataagtccagataggttttaagacggagttgtatagaagagctttgaactccagactaagtggagagcgagcatttatgagccagtggaggttccttgctttaagtttaagatgtttcgatttggcttctatatgtttgccccaagtgagccgcctgtccagatgaactcccagatatgttacctcgtcggcttgtgga

SEQ ID NO: 41852 - DNA, 3409 bp, DROSOPHILA
tcagagcagagcgcgacggtcgcgatagaaaagagcggactccgtctgcaaatacgatctcaattacgattctcgcgattcccctttcttttcgcttttcttcgttttctcggatttctcgagtgcgcgcctacgatttgaatcaagaatgatagctgtccggcaattgccgttatcaaattagccgagtgaatattcctcggacccggcaaagttacaattaatgccattcgtagacaaaagaaaaacgaaaaacgagacacgaaaagctgtgatttcaactgtaaatcaatgatttactgttgttgaacgcaccgagcccagtaatataggactagaaacagcaaaaaaatagtacaattaagaaggaaagaaactaaaagtcatgtatgcagcgaaaaacgtacgcccgcgcagcagtctctccacagacgacaatcaccggatcaaggacaccaatcggccccacaaggcccgcagcaacacgatcctgaccctcgccgcattctgcgtctttctgctagtcctctgcggcttcctgctgggcgccctcgtctacgtcggcaagaatatagccgaggagcaccagaggcagcagcacgcgaatgcttcccagtgggccttgaactccaccatccgcacagtttacgtggatcgggaccagttgctatccaccaagcccattatcagcgtactttcagataatcgcttttacacgactcaagtgccaaccagcaaaaaatcgagcataatggcaactgtggcgcccgctgtaaaagccgcgagcaaggtgctccagaatctgggattccggctgcccaaacagattaagccaagcaagtaccgccttcatttgcgccccgatctcgaacgaaagaactattccggcaatataagcatcagcctgcaagtactggagcccatagccttcatcccagtccatgtgaagcaactgaatgtgagcaccgttgaggtgaagcgcctggatgaatctggagcgccgcttaaggacatcacccccacgctgacctttgcccatccggagtttgagtactgggtgaccgagttcgaacagccgctggaggcgggaaactactcactgctgctcaactttacgggatcgcttgtagatcggattacggggatgtaccagagctcctacttggataagctgaaaaaccgctccagatcaatcatttccacaaagtttgagcccacttatgcccgccaagcattcccctgcttcgatgagcccgcccttaaggctcagttcaccataacggtggcccgtccaagtggtgatgagtaccatgtgctgtccaacatgccagtggccagcgagtatgtcgatggcgatatcaccgaggtgactttcgcggagaccgtacccatgagcacctatctggccgcctttgtggtgtctgattttcaatacaaggaaaccactgtggagggaaccagcatcgctctgaaagtctatgcgccaccagcgcaggtggagaaaacccagtacgccctggacactgcggccggagtgatggcctactacatcaactatttcaatgtttcgtatgccctacccaaattggatctggttgccatacccgatttcgtgtccggtgctatggaaaactggggattggtcacgttccgggagacggctcttctgtacgacgaatctaccagttccagcgtgaataagcagcgtgtggccatcgtcgtggcccatgagttggctcaccagtggttcggaaacctggtaaccatgaactggtggaacgatttgtggctaaacgagggtttcgcatcattccttgagtacaagggagtaaagcaaatgcatccggaatgggatatggacaatcagtttgttattgaggaactgcacccggtgctgaccattgatgccaccttagcctcccatccgattgtcaagtccattgagagtccagccgagatcacggagtacttcgataccatcacctattcaaagggagccgccttagtacgcatgcttgagaatctggtgggcgaggaaaagttgaggaacgccaccacccgctatttggtgcgtcatatctacagtactgccaccaccgaggattacctcaccgcagtcgaggaggaggagggcctggaatttgacgtgaagcagatcatgcagacctggacggagcagatgggtcttccggttgtggaggtggagaaaagtggcagtacttataagctcacccaaaagcgtttcctggccaacgaagatgactacgcagccgaagctgaagcatcgtccttcaactaccgttggtcgattcccattacctacacgagcagcatcaacagtgaagtccaatcactaatattcaaccacaatgacaatgaggccaccataacgcttccggaagaggccagctggattaagattaacacgaatcaagtgggctactaccgggtgaactacggcagcgaacagtgggcggaactcatatcggccctgaagaactcccgggaaaccttcagcaccgccgatcgcgctcatctgctgaacgatgccaataccctggccgctgccggacagcttaactactccgtggcactggatctgatatcttacctggagagcgagcaggactacgtgccctggagcgtaggcacctccgccctggctacgttaaggaaccgcgtatactacacggacttgtacactaattacaccacctacgcccgtaaactgcttacgcccatcgtagaaaaggtcacgtttaccgtggcagccgatcatctggaaaatcgcctccgtattaaggtgctgagctcagcctgcagcttgggacatgagagctccttgcaacaggcggtcacgctcttcaaccagtggctagccagccccgagacccggcccaatccggatatccgagacgttgtctactactatggtctgcaacaggtgaacacagaggctgcctgggatcaagtttggaagctgtatctggacgagagtgatgcccaggaaaagctgaagttgatgaactgcctaaccgccgtgcaggtgccatggctgttgcagcgttacatcaactgggcctgggatgagagcaatgtccgccgccaggactacttcaccctgcttggatatatatccaccaatccggtggaaaccaagctggaagagatgcagcagttctttgccaaatatcccgaggctggagccggaactgcggcccgtcaacaggcgttggaagcggtgaaggcaaacatcaaatggctagcggccaacaaggcccaggtgggcgaatggttggccaattacgttcaacagtccagcgtcaccaaccgcattcagtgactaccgttggtcgattcccattatctatacgagaagcatcaacaatgaagtccaatcattaatatt

SEQ ID NO: 41853 - protein, 985 aa, DROSOPHILA
MYAAKNVRPRSSLSTDDNHRIKDTNRPHKARSNTILTLAAFCVFLLVLCGFLLGALVYVGKNIAEEHQRQQHANASQWALNSTIRTVYVDRDQLLSTKPIISVLSDNRFYTTQVPTSKKSSIMATVAPAVKAASKVLQNLGFRLPKQIKPSKYRLHLRPDLERKNYSGNISISLQVLEPIAFIPVHVKQLNVSTVEVKRLDESGAPLKDITPTLTFAHPEFEYWVTEFEQPLEAGNYSLLLNFTGSLVDRITGMYQSSYLDKLKNRSRSIISTKFEPTYARQAFPCFDEPALKAQFTITVARPSGDEYHVLSNMPVASEYVDGDITEVTFAETVPMSTYLAAFVVSDFQYKETTVEGTSIALKVYAPPAQVEKTQYALDTAAGVMAYYINYFNVSYALPKLDLVAIPDFVSGAMENWGLVTFRETALLYDESTSSSVNKQRVAIVVAHELAHQWFGNLVTMNWWNDLWLNEGFASFLEYKGVKQMHPEWDMDNQFVIEELHPVLTIDATLASHPIVKSIESPAEITEYFDTITYSKGAALVRMLENLVGEEKLRNATTRYLVRHIYSTATTEDYLTAVEEEEGLEFDVKQIMQTWTEQMGLPVVEVEKSGSTYKLTQKRFLANEDDYAAEAEASSFNYRWSIPITYTSSINSEVQSLIFNHNDNEATITLPEEASWIKINTNQVGYYRVNYGSEQWAELISALKNSRETFSTADRAHLLNDANTLAAAGQLNYSVALDLISYLESEQDYVPWSVGTSALATLRNRVYYTDLYTNYTTYARKLLTPIVEKVTFTVAADHLENRLRIKVLSSACSLGHESSLQQAVTLFNQWLASPETRPNPDIRDVVYYYGLQQVNTEAAWDQVWKLYLDESDAQEKLKLMNCLTAVQVPWLLQRYINWAWDESNVRRQDYFTLLGYISTNPVETKLEEMQQFFAKYPEAGAGTAARQQALEAVKANIKWLAANKAQVGEWLANYVQQSSVTNRIQ

SEQ ID NO: 41854 - DNA, 14428 bp, DROSOPHILA
tctgacatcactcctgccttatctcattacatatgtacgtatgtgaattcggtttttacattcctttttgtacttgttaatcattttcatttgatacttgatgaacgtgagctggggcttcgcttcgatttatgcttttgtcggcaaattgtaatcagcttgaaaatttccactgtcaaattgatagagcttaaaagcttcgacagtcccgaatttttcaattgttgtgtttgtttatcacaaaaatatacctatcattataattggaatcattgttgcttccgatcacattacgctgagataatctcgaaattccacacttgctggtgtgtaaggggtatctgatagtcgagacagtctttacctgcgtttactctagtttaaattttctcttaattcaaatatcttaacggaataagaatatattattattaaaatagtttacctaactacttacttttgcttaatccattgacagtcgacctagtcgttccataataatttcacgtatttatttgatttctcattaataatttatgggcttaagaatttacaactagtttgcttagagatgataattattctcatttatcgtatattgtttgtttcgttatcaatcaaacatttaacaattatagcacgttcagggaaactacgagtagtacatacatactgatattacataatacgaccgttgagaaggcaactcaaaaattgcactaaaacattcttttacacagaaccaattccattcgaaatgaaaacaaaatcaattttacatgtagaatttatacagggcaaaaacattgggattccaccacactctttttttttttttttttttttttttggtgggcgtggctggtgttgcctactttggggatgccccattaaccacttcggctcgtcgcgtttcattagctacctcgaatacaatatgttcttaattaattttaataaattcacgctttgattgctattatcccatccactcctccgctcactccatggcctgcgaaacgctctgctgcggagattgggcaggtgaaaggctgcggggcgttgccgtggcgccgcccgaatccccaattccgatcccactgccatttccgtttccgttggcggccgccctctgttgattctgggcctggctgagaagctccttgttcagccggtagctgctcatgacgttggcacaactctggtggaagtaaaagttacggccgcgcagaaacgcatccgtgttgagatcctttaagcctgtcttgaaatacacaagaaaagcggtcgcaaattatagaagttagagatgaagatttacgtcttaagtgtgcattgactagttaaaattgctagagtggaaagcgaaagttaggggttctcgggattgtgcatagatcgagctgatcgaggtaaagtgaaaactgaagcaaactgagaaattaccttacaaatgaaacatttgttttcatcgtccggttttaaatccgaactaatccccacctttgtgtccaattgcgttaatcccggcacgcccatcgacgacaactgcgacaggctgttctccatgctctctgcgtatttcgtcgacggattgttgttgttattactgttgctattgttgttgttgttgttgttgttattgttgttgttgtgagatatgtccatgggtccgggttcggtgctgctcacctgcggctccgaccgcggtcgctcctccaccggtgagatgttctcgagggatctgtaagtgataaatattttgggataaatacttggcgcagaacatgcccaccagcagctatcgtgcacaaaaaaagatactgattccaaaagcaataagaatatgcagaaaaagcagactttaatctttatctttttttttttaacaaatgttaaccttttgaataaataaatacaccagaagtgtcctttgttacgcagtatgcacaagtttgaataaactgtataaacctaaacatatttatataggtatctccgtacttaagaaatctttaaacgctttaaatctttcagtaagcattacttatatacaaataataagatttgatttcatcattatcgaaaaaatcttgcaatacaccaccaagcaagttactaaagttttggtttctaggaagtaattgttattattcgaacgactggaacgaccgcctcacctgctgctgccgacgttctgctcgtcctggcggcgctgaatcttgccatagttgattttgctcgtcagcttcacggtgtcgtcgtcgtccacaatcacgtcctcgtcgctgtcgttttggcaggaggccgtgtccatcatcagatccttgttgctgccaccgccgttgttgtgggtgctgctgctgctgttggtgtcgtttacgcccacgccgcatgagtccgcgttgtagtagtggtgtgtggtggatgacagctcgctgacggttttaactgcgggttaagtggaatgggacaatttgcataagttgcgggacatagatataagtctcataaaacaaaccaaatctaaataactgatatggttttggaaatctttggatttggttcatttcaacttctaatcagtaatattctttgataaaactaagcttatattttgaatgtagattttggattcaagcaatataggacatttgaatctgacaactggaaacccaccactgatatgtgcctgggttggtgcctctcccggccaactactgctgctcgccgttgtcacattggtgctcacgtcatgctcgtcgggatgcggatccttctggctgagcacacagcccgtccggtagagaatcccgtccagcttgcccggctgcgagttgctgttgtgcatactggagggcggcataaccgtgccggatgacccagaactcggagtagccagctccgaacctgagtcgggcacttcgtcgttgcagctctccacatccaccgtttcgatctcctcctgcgatttggcatcgtcctggaaatataaaggagttcattttaatattaatattgagatattttaatatctagaactttgtattcctttaaatttaatttaagactgatatttattgtaggacattccacttacctccggaggaatcttccccgtctccaaggcgtacttcctcttgcagatcggacaactgctacagtaaagactctccatcatgtacatttcgccgtacttgcgctttcgcactttgagtctcagtcggttctggcgattgttacgtattctctgaaaggtctggggaaatcgagaagataaatggttagattcgcaccagattagctcctgaggaacacccacctcccagcggttgtgactggtgcgaatggcgttctcctgcgcgggacatggaggagcaaacatgtaggtggcctgcagactggccctctcgaatcccgcactcagcttgtagagcctgtccagttcggtgaggaagtgggtgtgccactcctcggcgctcagcttcagtccgcaaacggggcacatctcgggaatagcaccgccggcagctgccgcctgcagcccactgaccaggctcaatccgccgggaactgctcgcagacccgccatgctcaagctggccaaggccgcgtggtgggcggcgtggtggtgcgacagcggatggggatgggccatgtggtggtgcgtcgtcaccgccgtggacaccggaggtgcccccacatggtggcccacgtggtgatggctatgggcgtgcggatgggccaacggatgcgggtgcgagtgggcgtgcgtgtgggggtgatggtgcggcgaggaggcggccaggtggctggccatcgaaacggcaacgctgctggtcgccgtgctgatggcgggattgctggtggagcaggaggaggacgaggagctggacgccgacgaggaagtggccagtgcctggtggctcttccccgcattatgcagatctgtgtgggcgggaagaggagaagacatcgttgaattccagtcaagtgcgcaatcattaatcatgagttgatacaattgaaatggaaaacacaatctagcatggattggctggcacttaaagaaatattaaatagtatctacaaatttctagaatctagaattgttagctaaccctatatactttaattaaagctcaaatagaagtaaatttataatggatcaatcttatatgaatttatcttaaatcgatttttccagtgcaatttccaccttttttttccagccaataaatctgccaggcattttctaattgcctcatgcctcttttcagcacatcggtggaaattaattggagctcgtaattcttaaagcgaatctggttgccaccaactggggatcagggaatccaggagtccgctgcaggcttcctgatgtcagacacacgtcgaccccatgtattccggggtcgaaataccactggcgaaaaaatgaataaaccaccggcaaccacaataaatacaaactgtttgctgcgaacccagcaaacaaaatgtgtccgccgttctgcacgtgactgcggccggcaattaaaataatattacaataaacatatcgcagtacgttccgaacaggcccagtctagcagcggtccaacagtaaaacagttttatttatattcttctaaattattgcccaacaaaatatgtcggttaaccgcgcccatcaccgccactcgaatggatatgcttaacataaatggagatacattcgagtcgtgactccggttcaaattagctggcagtttggtgctccacatctctcactttagctggggttgctcctggttaccatttagctagttcataaacttcacttttgagatcagaatttggaaaactaagcgaaatttaatttttgtggctattttgttgtatgtatttcataagaaaatttagctctatattaaaacagcaactgttgaaagaagaaataccatttgagtaagatacaatcgagagcaatacagattacaactagtttcagtagttttatttttgtgattagctaaatctgcataataacttcttggaacccatggggcattgtataaactctttgtagtatgcaatatatatagtactcatgactggcataactgaaaatatgtccaggttcgatgaccacccactccacgccgatttgtgacacgtgctcaacgatgctatttcataatcctccccgtccaaggaatgggcgtttcatatatcgccggatgaaatatgactttgccattaatattacggaaattaatatgaaaattccaagtgtgcattcaatataatacatcatcggcgaacaaaaaccgcggagcagaagtaatagcaataataacgctcgtcataacaatggcaaacaatgcaatcaaagcgattcgcaacacttgcgcatcctttgagccaacaaatcgcagagtaaaccgaaaaagtgtgtcccccagccggcgataaatgagcaaacattatggaatctcgagggtggctacacaatgcctccggaagagttgcggcaatgtcctggatgagtaattagccgccactggagaggacgtcttcgtgtgccgagcacgagccgcccgaaaggatgtgcggtcggtttgactttgtagtcaagtggtcgggttgcctggaatggggttgttgtaacatttcattgggaccactccagtcaagtatccttgtatccttacacgtatatatccttgtgccatttaaaacacttacgacatgcaccccttctcttaaccctttgccgccctctcattcctcggatgcccttttgacttctgccccgcagtggggttaaattggcctgttcgtcgctaaccttcagttagtttaacccattgatgaatgctggcctgcgctgcagcttcagctaattaaaagtgtattatttatcgaaattaatttatggcgctcctgtctatccacgactacacgctaatctaaaagttaaacacaaatatccacatgttgagtatgggtggtgggttcatgtggcgagggaaaactggttttccggcttaagttgaaaggcaaataatggccgaaagataaacagagttgtcactgttttaagcagaggtgttggaaagggggggtcgacaagtgaatatcattaaataaattttacattttatgtgtaatatttattgcaaaaatctaacatttcatgttccaactcccggttttcaactgaatattctaattggtatatcttctaattagagtgccttataatgcctacataatgtaacatttaggaaacccttttgaactctcttggcactacgcccctgtcatttatcccatttgctttattcatttgcattcatatttatcattttcatatgctgcagcccgatttttgtcataaggcgcttaactcgatcagctttactagaccaattagcaacgcatttgcagacgagacggtttagcctactttttggtaaggttgggatggaaatttggggaaaacggaaaagctggaacagaaaccacccccaggtaaataaaagagaatttaagcaacatttatctggactcgagaaaactaataaaaaacgaattgaagtgcaggagatgagaggtcctgtcgctgtccttacgcctgccagtcaaagttaacctactgaagcgttaaaattgctcggcaaaagtaaaattgaaacaaatacgcccggcgatttttatcagcaaaaaaaaaaacgggagttcgaaagggcagaactttccaatttttccttttatcgcaaacatgcaaatttttttgtgcgatgtcgatgtaaatttgctaaataaataaatgcggtgcaagcaaccctacttacgtctcaaatccctgggatcctgagaattattgctgcgcggactttcacccttttcaacggcatcgtaatcctgtgatccctccatggattcgtgcgatgtgcatgtggggctggccgaatccgtgcgaaatgattcgctgccattgaacagattctgccggatggaaatcgaagtgcaaatcccattatgacacgtgtcaatcttgcgccgattaacagctcatagcatcagcggattccgcagcggattccgattggataccatcccaacccgatcccaactcacctgatccagggatatgccgatgtacttgggcggcgagaaggccgacggcagcgagaagttggacagcaccgacggcttgcccagcggcgagcggtcactggcaaagtagctggccggtcccgctcccgccgccgccgctgccgccgccgctccgttggccaccagcatcccgtggttgagcagcaggtgcggattgaagtagttgccgactagtgacatattgtgcagatctttggcgtcgggtagctgcaagagggggaaatcgaaagggattacctaggaagcacagttggggcgagagaaatggggaaagtattgtagaatcgtggcattagcaagttttcattcattttatattactggattttcgttgggtaccattatacatatatcaaggtcgatgcatctattcagtttatgagtgggagcaaatccaacaaaatatttaccaaaaatttatagatacttctttgtgtgagagaagaaagcaaaactttaatactgctaactaaaactgctaacttaaacaaatttatatgtattcaaataaatttgcatacatatttattatatacttttaatactattgttaaataacaaatcgatttattaaaccgaagtggaattttatagttaagctaatgccaaaaatgtattgtattcgttgcataattaagaaatagtaatagtagttgttataatctagattaagttcctttaaagaatccttcaggtattttatcctaccttcccttatctaagcttgtaattctttaaaacgtgagaatctaaatatataaatatgagatctaaatatctataaattacaagaggatatttaaccgcaaataagaatggaaataaaaatgctaggaagcatgcttagtaagcatctaagcctagagtttttaaaagttaagtgagcgtataatttaagcgttaaatatgcgcattactcgagtctgagcatcggaacgcgcaacaaattatgggagctacatgacttggcgttaaaattagccaattatggaaggtggaggcccaaacgcggatgtgtgtaacatatgccaaggcttggaaaggtttggaaaagcaggaaaactgcgatacctaatcccattcccctggagaaaagatggaagaatctgcgaagggcggcgtcgatttgcatcgatacaaattgtgaacaaaaatgtttaatttacgacgaataaatgttaaattgagagattttagaattacgatatcgaacattgccataaactgtgtcaatatcgaagggaagtggcggatagctcacttccaatggggtgtaaaataacgagaaaaacgctttggcccccgccccaaactttctccgatccaaaattcacacaaggactctggtaaatgatatgggtgaagtgggcagggtgagtccgctgtagtccgtggtctggggcagataacccacaggactcacagacagcgttcccaacaaattgaggctgacgagtgagctaagcggcggttgccgcacagacaagatacgaagatacgagtagaacataagcggcgacatgtgtgacaagtattaaccctcacccacaccaccgtcactccaacgacccctcagccacggcaaacttgggaacagcaaaatttacatacaaatttgtctgccaggaagtatttttacggcgaaaaatgcgagcaaattatgggatcaatgtttttgcaggaaactgtaggttattccatttaaaatccaatctaaatattatccataacgaatatatttaactggttatagtaaatagtagtggttagtagtagttctaaacttatgtgctacttgataaactaaaaaatcgattatagttgtattgaagttatgttttcagtacggaattgacactttagtcaatcaatctcattaattacagttgattaatctggtcccaagtccatcgtaatcctggtcacacgctgcacccaaggcgagtccaataaattggggattatcaagtgaaattagcaccttcacttgggcgcatatgttgccacatcggatctgaataatcaccacatcacatcatccccatcttcattaggctcgaatgttacaagtcagtgggagcaggaggagattggggtattgcaaccgcatgagttgcactttgtctaagtctgtacattggtccacgcgtgtttaggggctccattccggggttggaatcgaaaaccccaacagaagtggtcagccacttggcactcccattccaaacgactttttaatgcaatgcgtgatggaggattttcagcgtgactttcgccgattgatttatgcccgttaatcagtgcaataaatgccatgcacagggaaatgcttctgattaaccaatttggatagtgcactgaaagtttaaatgttctaatggcttaatggtatctattgtatatttcaaagtttgattcatttagagtgtgattgtgtaactttagacaaaggcattaaaatagttaagagataaaaaacaaaatctaaaatgtttaaattctcatttaactaagcactttggatgtctacaattcagatttgaaacccattctccatagaggtgaatacaaaagtattataagatggcactatggattaattcatttttcccagtgcaggagcaggtgctcgttttatcccttggctggagtgaggagtttggttctactcccgctttgtttgcttttctattagcgccgggcgggtgatttgttatcccaaattgtagcattccttatccggcgagggggatgatgactgcgaccagatttgcataaattcgttctgtttgcccttagcacttgagttattggcgtttgccactcgccccgcggaggggacgcacttattcggtgcaactctcagctgcatcacatacataccagcaacaacaataacagcttaattacaacaacacgataacgagtggcaaatagcaattgtccacatacaattgccaatttcgcttaacttggccataaaacacggaaagcgacggcagacggcccagaagagcaaagcaaacaacttggcctccgcgccactccgcaaataaatctcaatttgtggcactaacacggagtaaacgaggctcaaatcgaaccgaagagcggctggcgatgctaaaaacgcttagcaattggcaattttcgcaaactaaatgtttatggctggcctcaacctgttcgactttggccttttccgtgccccaaagctacggaactcaaggagcagaaaattgcgatgccagtggatggcgtagcatacctctgggcgtcttttaagtttggcgagagcgacgggagttgtgtgttactttaatctaatacttttaaattaaaaatattgtatttgattaatgtttcagttcacaaacaatctttgccagcatagatgacaaaaaagccaagaatgtgcaacgcttttgtttagtttcattatagcatcatcataaatgcgtatacgtaataataataattttaagttggcaactaacttgcggatgtgcataggcaacaaggcctatttatatatgaggattattccgatttgatggttaagttcatatgatttaacccaaaaataaaacggtcccgatattaattcgcctggtgataaaataaagttgctgtgaccaactcaaaacaacaccatttctaacttcataactgagttggggttttcaattaggtgatacgactttaacacttgcaaatttcttttttgatattgatattttccttaattcatgtatttgtacatacatatgttcatttcaaataagaaaccgcttgtaaggaacatgatatcacctctccctatctctacattctgttggaattctcttggctaactatcactgaccatttggacataatactccatttggtagtaagtactgctggttaaacgcctcgctgcctccgcatttcgctgcttggttcctagctgccttcctgataaattgccataaattaaattaggctcagacacacacacacacacacacacagataaatatagagacacacactcgcatatgcaacacaactcaactactcatacttagtggcaataagtggcaaaaaaatgaattatttttcatatgttggcccgcctcagtgccataactctgcccaacccaacttgactgccattttctgaaggggtcagtctgtttaccttttgttgttcctgctgccgtcgtggttacagaattgttatggtgcctggtgggtttcttttccgctgcccttcacccacccaaacaatcaggtcggtggttgaaggttcgttggcaagcggagtggaggagtggaggaggcagttccactggaagcaggcccatattaaaccatttgacattgcttttaatatgctcgctcggcttgtttttattaatttttatggtttgccccatgcccaattgtaatcggtttcataaattatgctagataagcgacttgtgcagtggccttagaaggaatcgtcattggaagaagaaatggcaaagaaagctgaagaaactaatactcagctatggaatgcagagaaagctagctgaagatgtatgtatgctaaaagatatttaaagatattgaaaagtaaaaatttacttcttgttcttcttatataacagatttaaacctatatctagtattgcattttatgatgattatttattaagaactttattgaaaatatttaagtgacattgaggcggctaaaacttgataggtatcaatataggccctgtttcgcgacaagaattcctcaaaagcaaggtaaatacttgatctttctaagcgatattcctgcttttccactgtcttccgtggcgaaaatcggttcctcacaacccaactcgcatctgaacgccgaggacatattgttgtcatgtttaacatatcttaacgctactcaatgctatgcagggcagagatacatatgtacgttcctattcggactgcagctccgatcggaataaccagtttcgccaagcggactgttcgaacatcatcagcgcccgagttcttcatcatttgtagcatcagcgtcaagatcattgctcatgtttacaatgatgacaggcagcagaatgagcagaagctggccgggaatcgacttccagccaaatcaaatgggtctgctctgtgggatcggtattgggactggaatcggaatcgggccagtagttaactgcggcccgcttccacttccactccatcaggcccgactcgcagttcggaattgaagctatcataaatctgttcgtcgcaaaaatctacacacaatggggcgtttgcaaacgcattcgccgatcggaatgcgaagacgaactctctgaatctgcctcttgactgactgccgcattggaaatgcgatcgtgatcgggcagttcttttgggatataggaaagaacagaaattgtatgagaggatggaaaaattcgactattgaactatttagaagtgttcctatagagcttttatctttgctttaaataggaacgcgaaataaaaacacccatattctctcaatggagaagttcattcaaactatgttcaatttagggtccagataccgaaaatttgattatcgttgtagttgtttcttttttttttttgtaaattaacattatgagatctatcattttgaacaaggatactggcttcctttatgtacatattatatataataactccattttaacctatgctccatctaaataaagtagctcacattatacactgcacttaaacgagctctcacagctttctcctcactttctctctacgtaatggatccttaattgagtgcatgatcggcaatcacgctgtcatccctaggcgcatcgccaactggaagttcacttggaacttctggtcggatttgttgttttacaatgcagcattgttttgcttgctgttggggttttggccgccgtttcgcgattcctttgcctcgctagcggtgtgctgatttatggcatctttcggcatttcggctaccggcccccagtctttatgatttgtcataaatatgtcccctctccgtccgatcagaatcgatcggctgggcgattccaatcagcggctgtccggatggtttgggctgaggttgagtttctgggctctacttactctcgatggaaacggacgttgtccacgtagagcctcgtgcagaccggaagcggcttccgagaggacaacgagcgcttgggacggcaaatggctgctgccaaatgcgttgctttccatctgcagctcgtttgtgttttgttttggttttggtttagactaatttggcactagggggcactcataacctcactttcgcttgtgtttcaatgttggcacatgcaaagatcactcggtatcggtgataatcggttgggaattgtatttgcgcgtcggtaaaacggtaaagctcggatcagctgacagctcgctcgctctccttctctctaaaactctctcgctcgctcgacacaggacacccgcacgtacgcgctgcagaaatccaactgaagccaaatggaaaccagttgccgttagttggcccgtgttcttcctcttctccagccttgccgctgcgcagtcggcgtcggcgtcgccgcgtaacgcctcacgacctctgattggccagcggccacaaccggtttgtctacactgtcgccatcccgctctcgcgcacgcccactcccactgcggcagtgtctttacattatgttctcacctccttgggcgcgcagtttgttgttgccgctgcattattatcccaaaatggttgcgtttgtccatccgttggccattgaacgcctgtttgtctggcagcacctggtactcgcactcgaactggtactggcactggtactggcactctccgggtttccccgcccccacaaccattttccacctcgatcagctcccctcccttggacgtaaacttctgacattttgtgtaaataaaccgtatgggaaacatttttacttttggctttggcattttgttgttgtttgtcggacactgtcccggacaaaagtatcttggaagtagtctctttccttttttctgcccctgcagctgggtttttgcacaccgtccacttaatatagcgcattactgtggtatttattgggcgcgaagtggcgaaaatatttcggaagcagggtgtcaagaaaattggaatttaataggccgcgactgctattctggttaaaagaaccaagtcaattgcacaacgacaaaatattgtta

SEQ ID NO: 41855 - DNA, 2382 bp, DROSOPHILA
atggaaagcaacgcatttggcagcagccatttgccgtcccaagcgctcgttgtcctctcggaagccgcttccggtctgcacgaggctctacgtggacaacgtccgtttccatcgagactacccgacgccaaagatctgcacaatatgtcactagtcggcaactacttcaatccgcacctgctgctcaaccacgggatgctggtggccaacggagcggcggcggcagcggcggcggcgggagcgggaccggccagctactttgccagtgaccgctcgccgctgggcaagccgtcggtgctgtccaacttctcgctgccgtcggccttctcgccgcccaagtacatcggcatatccctggatcagaatctgttcaatggcagcgaatcatttcgcacggattcggccagccccacatgcacatcgcacgaatccatggagggatcacaggattacgatgccgttgaaaagggtgaaagtccgcgcagcaataattctcaggatcccagggatttgagacatctgcataatgcggggaagagccaccaggcactggccacttcctcgtcggcgtccagctcctcgtcctcctcctgctccaccagcaatcccgccatcagcacggcgaccagcagcgttgccgtttcgatggccagccacctggccgcctcctcgccgcaccatcacccccacacgcacgcccactcgcacccgcatccgttggcccatccgcacgcccatagccatcaccacgtgggccaccatgtgggggcacctccggtgtccacggcggtgacgacgcaccaccacatggcccatccccatccgctgtcgcaccaccacgccgcccaccacgcggccttggccagcttgagcatggcgggtctgcgagcagttcccggcggattgagcctggtcagtgggctgcaggcggcagctgccggcggtgctattcccgagatgtgccccgtttgcggactgaagctgagcgccgaggagtggcacacccacttcctcaccgaactggacaggctctacaagctgagtgcgggattcgagagggccagtctgcaggccacctacatgtttgctcctccatgtcccgcgcaggagaacgccattcgcaccagtcacaaccgctgggagacctttcagagaatacgtaacaatcgccagaaccgactgagactcaaagtgcgaaagcgcaagtacggcgaaatgtacatgatggagagtctttactgtagcagttgtccgatctgcaagaggaagtacgccttggagacggggaagattcctccggaggacgatgccaaatcgcaggaggagatcgaaacggtggatgtggagagctgcaacgacgaagtgcccgactcaggttcggagctggctactccgagttctgggtcatccggcacggttatgccgccctccagtatgcacaacagcaactcgcagccgggcaagctggacgggattctctaccggacgggctgtgtgctcagccagaaggatccgcatcccgacgagcatgacgtgagcaccaatgtgacaacggcgagcagcagtagttggccgggagaggcaccaacccaggcacatatcagtgttaaaaccgtcagcgagctgtcatccaccacacaccactactacaacgcggactcatgcggcgtgggcgtaaacgacaccaacagcagcagcagcacccacaacaacggcggtggcagcaacaaggatctgatgatggacacggcctcctgccaaaacgacagcgacgaggacgtgattgtggacgacgacgacaccgtgaagctgacgagcaaaatcaactatggcaagattcagcgccgccaggacgagcagaacgtcggcagcagcagatccctcgagaacatctcaccggtggaggagcgaccgcggtcggagccgcaggtgagcagcaccgaacccggacccatggacatatctcacaacaacaacaataacaacaacaacaacaacaacaatagcaacagtaataacaacaacaatccgtcgacgaaatacgcagagagcatggagaacagcctgtcgcagttgtcgtcgatgggcgtgccgggattaacgcaattggacacaaagacaggcttaaaggatctcaacacggatgcgtttctgcgcggccgtaacttttacttccaccagagttgtgccaacgtcatgagcagctaccggctgaacaaggagcttctcagccaggcccagaatcaacagagggcggccgccaacggaaacggaaatggcagtgggatcggaattggggattcgggcggcgccacggcaacgccccgcagcctttcacctgcccaatctccgcagcagagcgtttcgcaggccatggagtga

SEQ ID NO: 41856 - protein, 793 aa, DROSOPHILA
MESNAFGSSHLPSQALVVLSEAASGLHEALRGQRPFPSRLPDAKDLHNMSLVGNYFNPHLLLNHGMLVANGAAAAAAAAGAGPASYFASDRSPLGKPSVLSNFSLPSAFSPPKYIGISLDQNLFNGSESFRTDSASPTCTSHESMEGSQDYDAVEKGESPRSNNSQDPRDLRHLHNAGKSHQALATSSSASSSSSSSCSTSNPAISTATSSVAVSMASHLAASSPHHHPHTHAHSHPHPLAHPHAHSHHHVGHHVGAPPVSTAVTTHHHMAHPHPLSHHHAAHHAALASLSMAGLRAVPGGLSLVSGLQAAAAGGAIPEMCPVCGLKLSAEEWHTHFLTELDRLYKLSAGFERASLQATYMFAPPCPAQENAIRTSHNRWETFQRIRNNRQNRLRLKVRKRKYGEMYMMESLYCSSCPICKRKYALETGKIPPEDDAKSQEEIETVDVESCNDEVPDSGSELATPSSGSSGTVMPPSSMHNSNSQPGKLDGILYRTGCVLSQKDPHPDEHDVSTNVTTASSSSWPGEAPTQAHISVKTVSELSSTTHHYYNADSCGVGVNDTNSSSSTHNNGGGSNKDLMMDTASCQNDSDEDVIVDDDDTVKLTSKINYGKIQRRQDEQNVGSSRSLENISPVEERPRSEPQVSSTEPGPMDISHNNNNNNNNNNNNSNSNNNNNPSTKYAESMENSLSQLSSMGVPGLTQLDTKTGLKDLNTDAFLRGRNFYFHQSCANVMSSYRLNKELLSQAQNQQRAAANGNGNGSGIGIGDSGGATATPRSLSPAQSPQQSVSQAME

SEQ ID NO: 41857 - DNA, 6617 bp, DROSOPHILA
gttccgttacttggtctttgacttcttaccccagaatatgattcttggcagcaggagaaaccagtacgacttgttttggtcgtattatgagtgaaatattaccactcatgtcattttgaacgtctttaaagctcacacccttatggacccattataagaatatggcgtggcaaaatttcccatttttatcgaggctggaaaaacttttccacacatgcaatcatgtttcgtttcacttatcatggctaaaacctagcaaatagaaaaagtttttttttatccacaaacatatctgtattgagtgccagcaatctgtattgctttagcttaagatgtttactattaatagagccaagtggcaaatgacatacggcttacagagaaaataatttccaattcaattacatttacgtacatatattccttcctacaagcagacaggattattgatctaaatataaataaatatataataattattttaataatataatattaaaatgtagattaacagaatatattttttttgtatgaaagcctctagggtatttgtgtgacttttttctctctgcataagtgaagatgtttactattaatagagccaagaggcaagagaaaagtggcagcaatcaagtgcttttatttcgggactgcatgttaaaggcgatttcctgatcgaagactttggatacctgatgccatccgtctgaatgtgacgtcagcctggctggggattcaatttaaattcatccttgagtctaatgacttttaatgttgtttgcttcacaggcgagtgcgcaatttttgggcctgtcgtcgactgcttatcggctatgtgccaccgcagccgcaaaggatacgacagacaatattaataacgcattgatacgagtgggcggccgatttgcttttgtttttctttcccaacttggcggtggaaaggagtggtgtggcgtggcgtggagtggatagagtccacaattaatcgacgacagctagtatgttgcaaggcgtcgccatcaccatagccaacgacagcaacgatgatggcatcaatcaatcattcatggctcatgtgtcgcccagtcccaatcagagtccctccattggagtgggcatcggtatcgcctcatccacaatggcgaatcccagcgagagccccgagatgttgctgctgaagaacgacaaattcctaacacatgtcgcccatctgctgaacataacgaccgagaatctttcaaatctcctgggttccacgaacggcacaaatgcgagcacaatggcagcggattcgccggtcgacgagtccctgaccctgcgaacagccctcaccgtttgttatgcactcatttttgtggccggcgtgctgggtaatcttatcacctgcattgttatatcgcgaaataactttatgcacacggccaccaatttctatttgttcaacctggcggtttccgacttaatactgttggtctcaggtgagatggcatttttgagggacaccattgcgtatgcgtaatgcggcaaatatcctgcaggcatcccccaggagctgtacaacctttggtatccggatatgtatcccttcacggacgccatgtgcatcatgggcagtgtgctctcggaaatggccgccaatgcaacggttctcaccatcacagcattcactgtggagcgatatatagcaatctgtcatccattccggtgagtttttaacatttaaacgttatatatattttaaatatttatttacattattaaacaaatgtataatttcttcagtgttattgcctcgctctcattaacaaagtggatcatgcataattaggacagagaatatgaatagataaattaaacttgataagcgtcagtcggaaacattatgatatgaaacaacaaaagtacctcacaaattatgggcacaataattattcataactaaacagtctggctgtggaatgataaaacaagttaggcttgacaaccaaattcccatcgtttttaaatataccaaattcattagctttcatttatagacactaattaaagtcaggtccataaatgaaccaagttcattacagactatgtaattaagttccaataaatgcgttgtaaagatagaaagttagttagtcaattaattgcttagtaccaacatatttgcatttttggaatggtacaacaaaacttttccttatacaggtatcaccagttccttccaaatgttctgaccattttgcggtcaaagaatacaacagcttccttaagcgaaagcgtctggttttcatttacgatgttgcatttcctttagttcagaaactcttgaatagctagaagaaatgaaacttaaaaaccttacattgttgttttcaaacacaatttccgtttcttagcatttttcacaaattaattgttacgaatacaatcacttggagtatgtccttaagaatatgcagacacaaaagggtggttttctataagaagggattccaagtccgattacaaagttaaggcaaaaaactttcatgtctctgaagttgggattaaatattgttgtcgaaaagagtaaaaggtttctatgtttgccatttaatagtattatagttattttgaaacgaaaggatattcggacatgtgcttagcatgaaaaaggtctgaaacccattgcagtcactttaccaaaagaagttaaaagtgatgtctattaaatttggtatgaaactgtttgaattccttcccatttacacccacattcaaagtaaatatttatgttgcactcaatatcccaaaccttaaagagaaagttaaaaagcgtaaaaagtgtaggtggtcactgcgtgtactttacaaccgtaatattttccatcttatatctgcccacgtttatccgaaacatcgacatcatcttgtccttaatacttaacatataatgtagcctaatctttccgtcatttgtaggcagcacaccatgtcaaaattgtcgcgagccattaaatttatatttgccatttggctggcggccttccttttggcccttccgcaggccatgcaattttcggtggtctaccagaacgaaggatactcgtgcacggtgggtgggactgaaatgtgaaaaccaactgacgcatcatcgagtgtccttttcgctgtttattcccttagatggaaaacgacttttacgcccatgtgttcgccgtttcgggatttattttcttcggtggacccatgacggcgatttgtgtactgtacgtgctgatcggagtgaaactgaagaggagtcgactgctgcaatcgctgccgcgaaggactttcgatgcgaatcgcggcctaaatgcccagggacgagtcatcagaatgttgggtaggtgagttaagttggcggcttgattgattaaagacagcaatatgccccaccgccaaccagaaacaacaagaacatccacggctgtcaaaactttttccgccgaaagtcttaaattgaaaattactgtcaacgtatttgcgttggcgaacatcaaacagggaattcgtcatagccccgccctcattgccttccgcccacttcatttgcacttgcgtcatgtgggctgaacgtgcttctgtttttttccctcttttccctcaacggtgtcgttaatttttcgcaaacatcggtgcgtatgtgtaaagctcttaaatggccatctagcctatgaagcaaaggtgaagccaggtgtcacctcaaaagtaatcaagccggggcacttaaatgaactcaagactgctgggtgcacacagcaagcttaaatatttgtaaaaagtgtttcttgaatctatagacatatgtccgttaacgtgccacgttataagctgttaaattttaaaggaattcagcacacatctcgtgtattattcacatattttatttatataattagaaattcttatcaaaccatacagtgaataaatttaagtgtaaatccaggcccaattttagatcccaataagccgttttttcttacagcctacgaaacaacgtttaatttactgttgcttttaactgaaacaccgaccattgatttcgaaatttaccattggccctggcctgccaaatggaaattgatggaccaattcagattaagcccagagccttaaccataaattaatttggccagcaagagtggaaaaaaaacacacccgttctcagggcttagttattcatagatagtgggatattatttatcgtttgctaagaggtaataccttggcttttatcaaaatgtgatattttaccaaaggcccgtttgcgcaaactattcgatttcgggggatataaaagattaagaccactttcagtgtgagagagccccttttccggtgacctagttgttcaggggtcttaatacgttgcttatccttacttgaccgtatttgcagtagctgtagccgtcgccttcttcctctgctgggctccattccacgcccagcgactgatggcagtttacggactgaatctgattaatataggcatcagtcgggacgccttcaacgattacttccggatacttgattacacgtccggggtgctctactttctctccacctgcatcaatccgctactgtacaacatcatgagccacaagttccgcgaggccttcaaggtaagcccatgggatcaacccttctcagttaaccacttcataatagtaatctattattaattgggtccttcgcatgtttgtgaggacggtcacaaatgcagatgcttttaaagttaaatttaagctttaattattcaaaattgtttttcgtaaattaatgaattggtaatctatgtattttttacacttttaagatcactctgacgcgacagtttggtctggccaggaaccaccaccaccagcagagtcagcaccaccagcacaactacagtgcccttctccgccagaatggatcaatgcgtctgcagccggccagttgcagtgtaaacaacaacgcgctggagccatatggatcctaccgagtggttcagtttcgttgccgggatgcgaaccaccaattgtccctgcaggacagcattcgcaccaccaccacaaccacgacgataaacagcaacagcatggcagccggaaatggagttggtggtggtgctggtggcggtggcggtgggcggcgtctgcggaaacaggagctctatgggccaggtccgggtacagcagttccccatcgaatgctgcaggcccaggtgtctcaactctcgtcgctgggcgatgccaattcactgctggaggcggaggtggtggacagacactacgcatccgggcgagccaaaagagctctcttggccaccaaaagtggtgccctgctggtgacaccacctcaaagtggtgacccatcggaagtcagtcagcccgccactcgtctcaagctgactagggtgataagtagaagggatgaggtggccaacacaagcactccgcccttttgtgggagccacagtttgccggatccggagacttgtcaatcggcatcggtggctggtcgaagctcccgtaagtttccgtggcgaaaacgaaggcaaaaaacggaggatcccagcagcgagggcttgacctatggctcacccaaatcccagtgatttcagctggctggtagctagagttatacttagttaggcattgtttagttagcgcaataaacttttctatctgtaaataagccagaaaaagtcctgcgatttgaatgcaaatttcgggtgaccataaaaaatttaacgaatgggcatggtccagacaatttatgagagtcataaagccgggataatgaggctacggcgtatcgtgacgaatacacgccccacatcattttgcaatggcaaccgcatagcactcataaattaagtgttaagctaccagctaaataatgtgaataaataaaaattgttctcaatattacagcaaaatccttttaaatgcgttttcctttcacaatgcatgccagttacattcaagttcgcctgcattccaagttgtccaggatcaaagggaaaatcaaaaaaaacagtttacatctcaagttttgcaggtgcagcgtttccaagcaatctgttcctaccttttgcgacatttttcctgcagattgcctggcattctgttgatttcccacacaaaaactaaaagcgctgaaaaaaataaaagaagcataaaataaaataaagtgccaataaattagcagtcttaatattttcagagcccctcagaagcaaatctaggaaggaaaacatgacataaattttaaatggattgctcatcaggatatcgtgttgcagtagatatatatattttcgcagtgtaagtcacgactccacttgcacctggcaacaaagtttcagtttgcacctggcccattgccggaggtccattagtcaagagggctttgtaggctaggaagtccggattgaaacgaatgtgcagagagtggcacgaatgggcttatcctgcggtgaattggcacgtggagtgcatggagagtggtgtcggtgccacaaaataaatcaacttaaaagtagcatacaaatttaaggacccgactgatgttatgtccaaagggaattattaatggttctttaaaggcaggca

SEQ ID NO: 41858 - DNA, 1983 bp, DROSOPHILA
atgttgcaaggcgtcgccatcaccatagccaacgacagcaacgatgatggcatcaatcaatcattcatggctcatgtgtcgcccagtcccaatcagagtccctccattggagtgggcatcggtatcgcctcatccacaatggcgaatcccagcgagagccccgagatgttgctgctgaagaacgacaaattcctaacacatgtcgcccatctgctgaacataacgaccgagaatctttcaaatctcctgggttccacgaacggcacaaatgcgagcacaatggcagcggattcgccggtcgacgagtccctgaccctgcgaacagccctcaccgtttgttatgcactcatttttgtggccggcgtgctgggtaatcttatcacctgcattgttatatcgcgaaataactttatgcacacggccaccaatttctatttgttcaacctggcggtttccgacttaatactgttggtctcaggcatcccccaggagctgtacaacctttggtatccggatatgtatcccttcacggacgccatgtgcatcatgggcagtgtgctctcggaaatggccgccaatgcaacggttctcaccatcacagcattcactgtggagcgatatatagcaatctgtcatccattccggcagcacaccatgtcaaaattgtcgcgagccattaaatttatatttgccatttggctggcggccttccttttggcccttccgcaggccatgcaattttcggtggtctaccagaacgaaggatactcgtgcacgatggaaaacgacttttacgcccatgtgttcgccgtttcgggatttattttcttcggtggacccatgacggcgatttgtgtactgtacgtgctgatcggagtgaaactgaagaggagtcgactgctgcaatcgctgccgcgaaggactttcgatgcgaatcgcggcctaaatgcccagggacgagtcatcagaatgttggtagctgtagccgtcgccttcttcctctgctgggctccattccacgcccagcgactgatggcagtttacggactgaatctgattaatataggcatcagtcgggacgccttcaacgattacttccggatacttgattacacgtccggggtgctctactttctctccacctgcatcaatccgctactgtacaacatcatgagccacaagttccgcgaggccttcaagatcactctgacgcgacagtttggtctggccaggaaccaccaccaccagcagagtcagcaccaccagcacaactacagtgcccttctccgccagaatggatcaatgcgtctgcagccggccagttgcagtgtaaacaacaacgcgctggagccatatggatcctaccgagtggttcagtttcgttgccgggatgcgaaccaccaattgtccctgcaggacagcattcgcaccaccaccacaaccacgacgataaacagcaacagcatggcagccggaaatggagttggtggtggtgctggtggcggtggcggtgggcggcgtctgcggaaacaggagctctatgggccaggtccgggtacagcagttccccatcgaatgctgcaggcccaggtgtctcaactctcgtcgctgggcgatgccaattcactgctggaggcggaggtggtggacagacactacgcatccgggcgagccaaaagagctctcttggccaccaaaagtggtgccctgctggtgacaccacctcaaagtggtgacccatcggaagtcagtcagcccgccactcgtctcaagctgactagggtgataagtagaagggatgaggtggccaacacaagcactccgcccttttgtgggagccacagtttgccggatccggagacttgtcaatcggcatcggtggctggtcgaagctcccgtaagtttccgtggcgaaaacgaaggcaaaaaacggaggatcccagcagcgagggcttgacctatggctcacccaaatcccagtga

SEQ ID NO: 41859 - protein, 660 aa, DROSOPHILA
MLQGVAITIANDSNDDGINQSFMAHVSPSPNQSPSIGVGIGIASSTMANPSESPEMLLLKNDKFLTHVAHLLNITTENLSNLLGSTNGTNASTMAADSPVDESLTLRTALTVCYALIFVAGVLGNLITCIVISRNNFMHTATNFYLFNLAVSDLILLVSGIPQELYNLWYPDMYPFTDAMCIMGSVLSEMAANATVLTITAFTVERYIAICHPFRQHTMSKLSRAIKFIFAIWLAAFLLALPQAMQFSVVYQNEGYSCTMENDFYAHVFAVSGFIFFGGPMTAICVLYVLIGVKLKRSRLLQSLPRRTFDANRGLNAQGRVIRMLVAVAVAFFLCWAPFHAQRLMAVYGLNLINIGISRDAFNDYFRILDYTSGVLYFLSTCINPLLYNIMSHKFREAFKITLTRQFGLARNHHHQQSQHHQHNYSALLRQNGSMRLQPASCSVNNNALEPYGSYRVVQFRCRDANHQLSLQDSIRTTTTTTTINSNSMAAGNGVGGGAGGGGGGRRLRKQELYGPGPGTAVPHRMLQAQVSQLSSLGDANSLLEAEVVDRHYASGRAKRALLATKSGALLVTPPQSGDPSEVSQPATRLKLTRVISRRDEVANTSTPPFCGSHSLPDPETCQSASVAGRSSRKFPWRKRRQKTEDPSSEGLTYGSPKSQ

SEQ ID NO: 41860 - DNA, 4084 bp, DROSOPHILA
gaggagaagatattggcttcggctctggaggcatgtacttaacctgcacaagctcaactaaaagaggttcggatgtctccggcgttttaccagcttccattaccgagaccggcatctgtggttctatgttatcccctatattcaggcaatactctatatcgtccagctccttcatcatcagacgcagctgttcaaagtactgatggctctttcggcattgccgtcttagccgataggcatttcttacggcctccgcacactccacgcagatgaactgcggcattccgtcctccttatgcacgctgcatccgctgcattccctcagcattgtggccaagaccggctcctgctcctggacccgattggaggaggcatatggctctgtatatatatccaacaggcagtcggattcgtccctgcaaacgcggcacatttgcgaaatgtccatcgtggccgagctccagagtttcgtaggcaggatcaaaaatatacaatatcaacaaaatgcaactattaaaataccaatcactggaatataccaacaaaaaaataccgaataatcagctgtgcttcgcatcttattaatttatcagctttgatttatgatttaaagttgtttttttaagttaaaaatgggtttttcgtattttttaaatattttattttaatctggctcttagagcatcagaatattccccacttatcgatataccttaaagctgtacaatgggcgcgaagcttaaaatgtaacgctgttttgaatatgagtaattttttgaatttgtatgaaatcacggaaaaacatagtttgacaataattgaattgaacttaagaacttgcttgtacaaataaataacaaaatatgtagtctacaagcgtaaattgatttgcttcgcaaactttacaaaattagatgcatacctattttatagattatattcaaaaactaaacaaaaacattcaacattaaaatctaggaatgcaaattcgtcccaaactctacttggtattgtacatggatgcaattgcaggatcttcggtttcgtaaatgataagcacatccctgaatttatcaagcaattgcagcagttgcgaacgtcgcaggttctcgaagtacatgatctcctccagatgatgctcgctcttaaagtaacccatctgatacagcttcacaagcagagatagatcatccacgttggcagaggcgggaattcgacggatggcggctcgatccgcatcgctgaaaacctgtagcagctccttcagcttctgctcatcctccatggaatcgaggctgtcgcaattgtccgtgctcatcgaggcggtgatgctgaaattggacttgtggctggatgatggctgcacggcgatgttgtccgaggccagtgatgaatggtcctcggacgcctcacgacgatgtccgcccaccaataccgctggcactggcaacggatgactggacatgctaagcatggagccatgcaactcgtccgcatctggttcttggtctccttcttcatcgctaatggcatcccttagatggttgctgcaggaggccgaatctccgaattcatcctcgctgggcataaactgaacgtacgtgtgcaactgcatgagcaaatggtgctgcagcatccaaatcaccatttgtgcgaggataccctgtcgcgctggctgctgcagtggcgtggttaagtgtccaattgaagtgggcaatgaaaaatcggagatcacctcgaacagcgacataccggcaaaacgggccgagaacttctccaccaggtgggacttggtgtgcaatggtgcatccggcgcgatcacatagacatttgtctcgcagagtggataaataatagttgccttagcccagtagaccaaatgcgagacgagcttataaacatgctcgatactcaagtctgcattggaggacatgctctgcagactgatcagtgggtcgtagacgtcgactagctgccatagcatgcgtgccccagtcggtggaacgcagtccaacaattcggcaaagtcgaccagcagcaacatgccatgatagggcttcagtgcacgaaggcaccgatctatggtctctggatccaccatgctgcccttcttatggagctggtgtgccttagcgggcagacagaagcacaacgttaggttgtgattcagcgaggtactcagcagtccagtggtgcatagatcatggaagatggagcgcaaggcctgtgccaagctgcagcgctctgcaatcagctccagtgtgcgttccagcggctgttgctgctgctcgtcgtgtgtgcgagccatttgagccgtctgctcggtgagatagccactgcgctgctcctcgaacttcagcgccagtccaaggcgcttgctcagttcgtggtagcacttaacaatcgagtagctggcctgtgcatgcagcgcaaaaacaatgttgatgagcatctgttgcttggccattggaccacttctctgctccttttgcggtatcagagtgggatgactgacaaagcgtacgtcgttcagtttgagttcaaacttttggttgcatagctgtggtttaacagcaaacagagcggacaggacctcatctgcgaatccctgcagttgtccttggctcttggcagcacccaagtgggtgggtgtctgcagcagatcgtccgtattggccacggcatagggattgcgctttctgtgattgaataaatcggtatagtcaagctgagtgccctttgaattaataggtagtacctggacttccgctgctcgtcgttggccacctccgtttggccgagagtctggtacggatacctgtacagtaaccgatcccccttgctatcgaagtaaaccaggattacggccaggggattcacattagtttccatggcacacagacacttccccttttatgtaaattaaaatatgaacatttgcattatcaactggggtcagggtcaacaaatagttggctatgttttcaaaaatactttataaatcgtagtttgctacagaaactacctcaacaactctttatttatttattagtacctcaatttgacttcattgagaaatggaagcaaagtaaataaatgtaaaatataaaatatatttacagcagtgtggctctcttttagtttgcataaaataccaaaaacttatttaaaatagtagtcatgtcagttttcattttgcaggcgaaacaataatataaatgcaacgcaatggaatttttttaaatcgtttaaatttaccatagataccttagataatatattcaaaaactaaaaaatactaaacgaaaaacggtcttactatataaataaatatatatcggcaaggctaatagtataggatccctggtcgagcgataacgatctatcgctccgctgtagtgtgaccgtcttcggttggtcagtctctaattttttagaagcggaaagttgtgagcaaaacgtgtggaaattgtgctcgaaacgtcaacaaaaaatttgtgaaaataactgggagcgtagtatgcgaacgcggcaatcgcagaactatgaaattcccctgtgaaacatgttagtttggctgtaaaagcacttttaaaaatgacgatttcttattagcgtgttggaaaagaggaaaacacacacattgtgagaggcaaaatacgtgcggatcgtaggtgggagcgagacgacgctaaacgtgtactagccgcggtctatatatacatatatataatatttgtgtgagtgtaggagaggtataactaattctacaaaaaaatatagtttacttggctgagtggttcgcttctgaattagtttcgcactcttcggcagtatggtggccaataagttaatttcaactaattgtcatttacttgtaggtttgtttttctactatgtcttcgtttctgtatctattccttgtattttggaaaataggattaataagtgcctaaaatgtaaatagcttgtggttaaatagttaataacataactattttactttttgtgtatatgtgcgccaacatccgtgtgtatagattttacacatacctacgtagaaaggcatgcacagatatacgtt

SEQ ID NO: 41861 - DNA, 2025 bp, DROSOPHILA
cttccatttctcaatgaagtcaaattgaggtactaataaataaataaagagttgttgaggtagtttctgtagcaaactacgatttataaagtatttttgaaaacatagccaactatttgttgaccctgaccccagttgataatgcaaatgttcatattttaatttacataaaaggggaagtgtctgtgtgccatggaaactaatgtgaatcccctggccgtaatcctggtttacttcgatagcaagggggatcggttactgtacaggtatccgtaccagactctcggccaaacggaggtggccaacgacgagcagcggaagtccagaaagcgcaatccctatgccgtggccaatacggacgatctgctgcagacacccacccacttgggtgctgccaagagccaaggacaactgcagggattcgcagatgaggtcctgtccgctctgtttgctgttaaaccacagctatgcaaccaaaagtttgaactcaaactgaacgacgtacgctttgtcagtcatcccactctgataccgcaaaaggagcagagaagtggtccaatggccaagcaacagatgctcatcaacattgtttttgcgctgcatgcacaggccagctactcgattgttaagtgctaccacgaactgagcaagcgccttggactggcgctgaagttcgaggagcagcgcagtggctatctcaccgagcagacggctcaaatggctcgcacacacgacgagcagcagcaacagccgctggaacgcacactggagctgattgcagagcgctgcagcttggcacaggccttgcgctccatcttccatgatctatgcaccactggactgctgagtacctcgctgaatcacaacctaacgttgtgcttctgtctgcccgctaaggcacaccagctccataagaagggcagcatggtggatccagagaccatagatcggtgccttcgtgcactgaagccctatcatggcatgttgctgctggtcgactttgccgaattgttggactgcgttccaccgactggggcacgcatgctatggcagctagtcgacgtctacgacccactgatcagtctgcagagcatgtcctccaatgcagacttgagtatcgagcatgtttataagctcgtctcgcatttggtctactgggctaaggcaactattatttatccactctgcgagacaaatgtctatgtgatcgcgccggatgcaccattgcacaccaagtcccacctggtggagaagttctcggcccgttttgccggtatgtcgctgttcgaggtgatctccgatttttcattgcccacttcaattggacacttaaccacgccactgcagcagccagcgcgacagggtatcctcgcacaaatggtgatttggatgctgcagcaccatttgctcatgcagttgcacacgtacgttcagtttatgcccagcgaggatgaattcggagattcggcctcctgcagcaaccatctaagggatgccattagcgatgaagaaggagaccaagaaccagatgcggacgagttgcatggctccatgcttagcatgtccagtcatccgttgccagtgccagcggtattggtgggcggacatcgtcgtgaggcgtccgaggaccattcatcactggcctcggacaacatcgccgtgcagccatcatccagccacaagtccaatttcagcatcaccgcctcgatgagcacggacaattgcgacagcctcgattccatggaggatgagcagaagctgaaggagctgctacaggttttcagcgatgcggatcgagccgccatccgtcgaattcccgcctctgccaacgtggatgatctatctctgcttgtgaagctgtatcagatgggttactttaagagcgagcatcatctggaggagatcatgtacttcgagaacctgcgacgttcgcaactgctgcaattgcttgataaattcagggatgtgcttatcatttacgaaaccgaagatcctgcaattgcatccatgtacaataccaagtag

SEQ ID NO: 41862 - protein, 610 aa, DROSOPHILA
METNVNPLAVILVYFDSKGDRLLYRYPYQTLGQTEVANDEQRKSRKRNPYAVANTDDLLQTPTHLGAAKSQGQLQGFADEVLSALFAVKPQLCNQKFELKLNDVRFVSHPTLIPQKEQRSGPMAKQQMLINIVFALHAQASYSIVKCYHELSKRLGLALKFEEQRSGYLTEQTAQMARTHDEQQQQPLERTLELIAERCSLAQALRSIFHDLCTTGLLSTSLNHNLTLCFCLPAKAHQLHKKGSMVDPETIDRCLRALKPYHGMLLLVDFAELLDCVPPTGARMLWQLVDVYDPLISLQSMSSNADLSIEHVYKLVSHLVYWAKATIIYPLCETNVYVIAPDAPLHTKSHLVEKFSARFAGMSLFEVISDFSLPTSIGHLTTPLQQPARQGILAQMVIWMLQHHLLMQLHTYVQFMPSEDEFGDSASCSNHLRDAISDEEGDQEPDADELHGSMLSMSSHPLPVPAVLVGGHRREASEDHSSLASDNIAVQPSSSHKSNFSITASMSTDNCDSLDSMEDEQKLKELLQVFSDADRAAIRRIPASANVDDLSLLVKLYQMGYFKSEHHLEEIMYFENLRRSQLLQLLDKFRDVLIIYETEDPAIASMYNTK

SEQ ID NO: 41863 - DNA, 4551 bp, DROSOPHILA
ataagcgtttatttctcattcgattctcttggtgcgcaaacttttaattagctggaaaagtcttgctccccctcattttcacgccgattgctttccaattgtaataatcgaacaaattgtacaccagaagtacccaataaaaatcaaataccaatcgaatgcccccttacttcgtgttattttccccgcgagggatgtttagcctacttacgggcatcatttgaattgtcacctgttgttccgcgccctggtttaaatctttaaaatcaatatgccacgcgtcaagttaaactgatggagctccttggtaaacaaggggagttctggcgcgaagttgggcaagttttgggtaagggaagtgggggtggtgacaccgagtgggcggaattccaagttgactcctgcaagtcaacaagagacgcctttgggcatcagacagacgagcaaattgaaatggtttagattacatttgacttttataagcggatttgtcacagttgcaggtgggttgaaaaatagagggtcaggcggggtctagatttaaaaaaaaaataatatattttcagtgaaagatctagcctattcacacataaataactaccaaatttgaatgggccaagctagaatgcaatgttaagcacttaagatacagatgaaggttgttcactcagagaaaaaactgttctcaacgatctcgattcgagaatttcgatctcaaaatctagacaagatcgaatcatgctcagcatactcagttcgagatcgaaccattctcagattgcaaataactttgcctctcgctctcattttttcagcctctaggagcctcacgtttcatctcgaaatcaagaagttttcctatcatgagaatgattgatgccactgagtacgctgtgcacaaccattctcgttttcttgtcgttcccgatttctctgggaattataattgttgcctctaaaagtgcatattgtaaaattctcacatgaaaaaagcaccattctggtataaaaagtattaaaagtgtattttatttcagactttccacaaaacttaatttacattctgttaaacgctattcgctatacatgagcggtgctccactgacaccaaaatctacatggacagaatggttttcctgattatgtcgatgctctcgcgcatttgggtctcattgatgaccagtggaggagcgaagcgaataatgtcgccatgggtgggcttggccaggagtccgttctcctttagcctgaggcacacctcccaggcatcgaactctgtaaaggatcgtagatcagatggggacaacttgggcagaactaatggaacctactctggttaataacgatggcgttgagcagaccctttccgcgcaccaccgacaccacatccttgggcagcgtggacagctcgttgcgcagcaggtcacccattttgaaggcgttctccgccagcttctcctcctgcagaacctccaaggcggccatggccactcggcagcccagggggttgcctccgtaggtggatccgtgctcgcccggcttgatgcacagcatcacctggtcgttgcagagaaccgccgacacgggatacattcctccggacagtgcttttcccaggatcagaatgtctggctgcacctgctcgtagtccacggccagcagctttccagttctggccaatcctgtctgcacctcgtcggcaatccagagcacattgtacttggtgcagagctctcgcaccttcttcagatagccatcactgggcaccaccacgccagcctctccctgaatgggctccaccatgaaggcgcacacattcggatccttgagggactcctccagcgctgacacattgtcgtactcgatcagctcgaatccgggcatgaagggtccgaatccctcgtagctactgggatcattggaggcggacaccgccgacagggtgcgtccccagaagttgttgcgcgcgaagatgatctttgcctggttggcaggtatcttcttctccaggtagccccacttgcgggccaacttgcaggcggtttctccgccctcaacgcccgtgttcatgggcagcaccttgtcgaagccaaagagcttggtcacgtactcctcgtactctccaaggacatccgaatagaaggcactgcacagcggaaaatagaaaagacaatttagaaaaattatttaaatgattaatatattgtattattgtatttaattgctacgtcacgttttgtttttaaactgcccaagtaggacaataaccatttggatcaaccaaaaataaaccgctaatatttttccattggcttatccgtaatcattcccctccaatttccaaatttagaaattgcaacaaacaataacaagtcatcgaaccctcgatttgttatcaacgaacctcttttgactttatagacccactcaacctgacaatctggccctggcaacccaagagaaaccaaataaaaccggcatcaaaaattgaaaaacaagtaaagtacaattattaaataaattccctgtgacaaatgtagaatcactaggtaaagtgagaatttatacatgtactgactgctgataagattccgtccacttcatggggggttatcactgtcagaaatgtatatatggtaaaaacataaacaaatgatgtgtgtttccgattgtaagctttttattggtctaggcgaaaaagtcttaatccatcgcatgacatctttaaaaataagcagttgctttcgaaatgtactttttataatccggaaattgtatttatagcctatgtaatcttgtccagacgtactaaaataagcatcggcgacattcgaatctctattttcaagttttattattcagtaaaaaaaaaagttattaatcaaatgatgagttcaattcttcagttggaaacagcaatttagcagcgagtgatcgcttctaaatattttaattgcgcatacgcctcgtgtgacatgatcaatttaaatgcacagtattgtaaaacgatttatgagcataaatttgtggaacaaagtccaccctaaagtgcacacaacactaaacaaatacatataactgataaagcacagatccgataatttttcagggggcacgtctctttgttctctgattgtattcccattttcctatttacttaccgcgatgtcaaggccaacttggaggcctgtgctgtgagtgccgctacgatcttgggatggcagtgaccctggttgaccgccgagtaggcgctcagatagtcgaagtagcgcttgccctccacatcccagacaaacacgccctcgcccttggtcagggccacgggcagtgggtggtagttgtgggcgccgtacttgttctccctggcatagacgagttcggaacgggatccggcggcggccgtcgtctcctgggaagctgtcttctgtgccaagaagctcatgcgggtggcgatcccgcgggctgatagcttggcgaacatgttggcgatagtatgtatgtatgtatctcgcgagtcgatggggtatggcacttgtactcgcggatcgcggctgatgctaactgaaagtccgctgcttgagggcgggtgctttttatacccggagagcagtgtgtggagaaccccatggaagcttgcttctctttgtagtaatgtagcactataggttatatgtatatgtatgtacgctctgacatcactcctgccttatctcattacatatgtacgtatgtgaattcggtttttacattcctttttgtacttgttaatcattttcatttgatacttgatgaacgtgagctggggcttcgcttcgatttatgcttttgtcggcaaattgtaatcagcttgaaaatttccactgtcaaattgatagagcttaaaagcttcgacagtcccgaatttttcaattgttgtgtttgtttatcacaaaaatatacctatcattataattggaatcattgttgcttccgatcacattacgctgagataatctcgaaattccacacttgctggtgtgtaaggggtatctgatagtcgagacagtctttacctgcgtttactctagtttaaattttctcttaattcaaatatcttaacggaataagaatatattattattaaaatagtttacctaactacttacttttgcttaatccattgacagtcgacctagtcgttccataataatttcacgtatttatttgatttctcattaataatttatgggcttaagaatttacaactagtttgcttagagatgataattattctcatttatcgtatattgtttgtttcgttatcaatcaaacatttaacaattatagcacgttcagggaaactacgagtagtacatacatactgatattacataatacgaccgttgagaaggcaactcaaaaattgcactaaaacattcttttacacagaaccaattccattcgaaatgaaaacaaaatcaattttacatgtagaatttatacagggcaaaaacattgggattccaccacactctttttttttttttttttttttttttggtgggcgtggct

SEQ ID NO: 41864 - DNA, 1480 bp, DROSOPHILA
ccgcgatccgcgagtacaagtgccataccccatcgactcgcgagatacatacatacatactatcgccaacatgttcgccaagctatcagcccgcgggatcgccacccgcatgagcttcttggcacagaagacagcttcccaggagacgacggccgccgccggatcccgttccgaactcgtctatgccagggagaacaagtacggcgcccacaactaccacccactgcccgtggccctgaccaagggcgagggcgtgtttgtctgggatgtggagggcaagcgctacttcgactatctgagcgcctactcggcggtcaaccagggtcactgccatcccaagatcgtagcggcactcacagcacaggcctccaagttggccttgacatcgcgtgccttctattcggatgtccttggagagtacgaggagtacgtgaccaagctctttggcttcgacaaggtgctgcccatgaacacgggcgttgagggcggagaaaccgcctgcaagttggcccgcaagtggggctacctggagaagaagatacctgccaaccaggcaaagatcatcttcgcgcgcaacaacttctggggacgcaccctgtcggcggtgtccgcctccaatgatcccagtagctacgagggattcggacccttcatgcccggattcgagctgatcgagtacgacaatgtgtcagcgctggaggagtccctcaaggatccgaatgtgtgcgccttcatggtggagcccattcagggagaggctggcgtggtggtgcccagtgatggctatctgaagaaggtgcgagagctctgcaccaagtacaatgtgctctggattgccgacgaggtgcagacaggattggccagaactggaaagctgctggccgtggactacgagcaggtgcagccagacattctgatcctgggaaaagcactgtccggaggaatgtatcccgtgtcggcggttctctgcaacgaccaggtgatgctgtgcatcaagccgggcgagcacggatccacctacggaggcaaccccctgggctgccgagtggccatggccgccttggaggttctgcaggaggagaagctggcggagaacgccttcaaaatgggtgacctgctgcgcaacgagctgtccacgctgcccaaggatgtggtgtcggtggtgcgcggaaagggtctgctcaacgccatcgttattaaccagaagttcgatgcctgggaggtgtgcctcaggctaaaggagaacggactcctggccaagcccacccatggcgacattattcgcttcgctcctccactggtcatcaatgagacccaaatgcgcgagagcatcgacataatcaggaaaaccattctgtccatgtagattttggtgtcagtggagcaccgctcatgtatagcgaatagcgtttaacagaatgtaaattaagttttgtggaaagtctgaaataaaatacacttttaatactttttataccag

SEQ ID NO: 41865 - protein, 431 aa, DROSOPHILA
MFAKLSARGIATRMSFLAQKTASQETTAAAGSRSELVYARENKYGAHNYHPLPVALTKGEGVFVWDVEGKRYFDYLSAYSAVNQGHCHPKIVAALTAQASKLALTSRAFYSDVLGEYEEYVTKLFGFDKVLPMNTGVEGGETACKLARKWGYLEKKIPANQAKIIFARNNFWGRTLSAVSASNDPSSYEGFGPFMPGFELIEYDNVSALEESLKDPNVCAFMVEPIQGEAGVVVPSDGYLKKVRELCTKYNVLWIADEVQTGLARTGKLLAVDYEQVQPDILILGKALSGGMYPVSAVLCNDQVMLCIKPGEHGSTYGGNPLGCRVAMAALEVLQEEKLAENAFKMGDLLRNELSTLPKDVVSVVRGKGLLNAIVINQKFDAWEVCLRLKENGLLAKPTHGDIIRFAPPLVINETQMRESIDIIRKTILSM

SEQ ID NO: 41866 - DNA, 5174 bp, DROSOPHILA
ttattaaatcgggcgtatatcgtatccgtagcacatagttgtagtatacaacattaggtctgtctaacaattttcctttaaatctattatttaaagcaacttagagtatacaaaatatcaatatattcaactgtcacagaaatgtttttgtttaacgcacttcacggcgacttaataattaatactgcatctgattcccctgatgacagtgcgcttcgaaaacagcttgcattaatttaaatctaaaaactgtgtcagaacatagatactgtggaaagtaagtcaaattaaacgattccgatttaagaaacgcactgaatatcaattatgtgagtgggaacttcctgctaattgaactcacatgtctagttaatcccaattcataaatattgtctttttcacactactctttcttggtggaggagcttatatttacttttgccagcttgcaaatgagaccatagggagggttaactttccgaattcttgtagaactcttgattttgtaattattatgtacaggttaattcagagaaatcctattcggaggtcttacagagatttcttagagcattacaggccacacaaatggattcaaccaatgccactgctgtccttaccatttcctactaagaataccatttttttgctttaattgggttaagtttgtttggggaaaattgaatatcgtattaaatagattatttatgtttctgctgtaacgtctatgtttcaatatctgattttatgttttaaggaatatgtttgtttaccctgtagacattcttttctattttttctatttttcctgttcgacgcccaacgctctgagcctatggttatatatgttagttgatatattctcaggtacgcgctgcatttctctagttaacattccccttccgtatatcgaaatctgcttaaaggaacatttgatattttctttaaatgtatcgattaggcgagcaacaatataagctttctggtaagtagattatttctaaaatctctggggattatcgttggactgtggctgctcgcccgcctccagctgctcccgttcccgcagctcatgctcctgatcctggtcgttgttctcctcatcgctggagtcaacatagttgcgcatggccagcgcctggaagtcgttcaaggcctgctcgaagagatcaatggtgtgctggttgtgggcaatcacctgttgggtgttcctcaggtcacgcgtgatcagatcctgcatggaacttgaggcaggcgaggaggcaggcgagcgccctgcatcgtttgaatttgtggagttggattgctcaccgctgctgctgagatcatcgttgagattgctagccgtcagtccccgagttagttcatctgcatgagccagcgttgagcctattatgtcgctagcgattctaatggccgcatctgtggctgctatggtggatatgaaactggaggcagctgctgccacggtggttggattggctgtgttggttggcctgctgaagacggtgtcgctggtcacctggttgccttcgatccgcagaccggccaccccctttttgggtatggtggctaggtctcgcttaaccctccggcagcgagtgggctcattctggcgctgctggactagctgctccaagtccacaatgtagacgtagccggctaccaaaattgtacaggatttgtcgcccttcttaaaggcatcttcgatgtcctgactagtgcggtcatcgtactgccaccaacctatagttaaacattttgacaagaaagaaaaattcggaatggaatggaatcggtccaattcttttcgacgatttggtcatttaattacagtttgttattacggaaatggatgtgcggaatgggtaaggagttaggtgttgtcattaattattaaagtgttcttgtatttttagttctggctcagtccagcaactcctctcattccgccagaaacgtcatccgtgctcttgcagcgcattatattgcggctcttttctggagtcaagcggagatactgtaaattctgcaaaaagtcgatgatgtacatacgcccgcagatctgaatgggcagtgtgcatggatgcggcctaatgatgttcagctcatcggggtctaagctcataatatcgtccaatgatagggctggcgagtcccgaccattgttttcggaagaggctggagcgccctgaccagatgaacgaataatggttgggtatataacaatttctgaatcggcattgtagaaaataatattttcgtcacacagacaatagtgattgatagggtttggacagtcccgatcaaataaaggagcaagctcagggttatctgccttgaatatctcaaagccagcataggcgatctcgatgtctgcattggtccgagaatcgtacgcccaccagccccctagatgggtttagtgcgtgaaggatttggggtttatgggaatgagggacggccggcaccaaaagcttaattatactcaccgtttcttccctcgtaataccactggaagccgtcctcggtcgcgcgagtggtgcagatgtcctcaatgccattcaccagctggggatggtccaggaactcggcgggaatctcgcgacggcacatagcacaacggcggttcttataagcaacaccctggaaagcgtaaaatgaccaatgagaaattaaaatttgattcgacatcgctatgtgttgaaaagcaattgtaatttcctaacacataaaacttaacaagaagcgaaaataatacatttcagaaaagcatcttatcattagcgtaaaaacgcaaaaatacgatcataccaacctaagacctttaccccacattaagtacactggaataaaatatgaggtcttttacctcaaccaaaaaataacaacttgtgttaaacgttataagcatagatgaagtttacaaaactaaggaagttggaatcgcctctctaaaccaacactttcccacgaccaaacatgtttctgaacaggaaaatgcactcgagtgctaattggagtggtagtcttaggctaaaactggttgaaattggcaggagattgagaccaattgacaagtcgtcagccggaagccaatctaatgccataatttctggtcagccgtgttcggttggcatgctaatcaatcagtgaaaccagctgtcgcaccaaagggttaagaacagccttgaacttggctacgtgctgtgggtgattttgctgatcgggaataatattcaagaaaagcgagtttgaatgtgaattgaatgactaagtggccacgaaaggcttccgctttcggctttctgggctacctaccttcacgcacaaaaagcagaagatgtggccacaggggagacgagctgggtggatgcaggtttgcaaacagatgggacactccaaggcagcggccgctgcagagggggaatcttcgccagaaacggctgccgctagaaattgagttaattgaaataagttaaatcaaatagaataaggattaagggatatatgaataataacgatgcaaaagtataactcttgtgctctcaataatattatagaatattattgtgctagtgagtgcaaaataatctgtcataattcataattccttctagtattgctttgaaatgcttttaggaagtccttcaaatttgatttcgtacatatgtatatgtacatatgcgtgtgtatgcgctctaggaatagtgcaagtgtatcctaaagctttataaaagcaaagggaacttcttgtggcgaaaggcaactttgcttacctgcatccacaccggtggctaacgctccttcgtcaggcgaagaagcaagtgaatcggtatccgaagcagcagctccagatgcggatccaaccgccggatcctcgccacttccgcctcctgagtgggctgcagctgccgccgccgcagcagcagcagcagaagtggagggcgagacgcaaagatcgatgactggtgcggtgggacgcagagctgcaacgaattgcacatccgtatcctcgtcgtcgtccagcgctattacatcgctggtgttgttgttgctagctgcaatctgctctgtggagcgctgttgcgacatggtcggattggatcgatttcgtcaacagcggggaaatcgagctgttgtcgtcgacgttgagttttaaattttcacaaacaaacttgaaacaaaaaattgttgctgcctgagtatgaccagctcgggctgactttgaattgctaatgtcatcgacaaaaatactacattcgtttcggtatgaccgttgactgtattttcagtgctgctaagttctgaaatggcgccaatgaatttatttaaatattattttcagtctttgaaaagtagagtcatttatagttgcaaaattgaaaacttgtaattatttaaaaaaaaagcttttggttataggataataaacttatttattccatttttaacggtcaataaaagaccaacatttaataaagattatcctaagataaaagtatttataaaaagtaaattttttaaaatttattaagcagtttattattttatacatttaacaaagtactagagaatgccttaaatcgaactaacttatattcggtcgaaaatatttctaaattaattggcgctgctttattacctgcagccgccgctttaataatgctatattaaattcacaaaaaccaattaaaattatgcgcttcattacacgaaacacctctcgcagcgaactgccataatatttatgtatgtatgtatgtatatcccaccttcattgagaatttaacttcataaaaattgacaggccttcggccagcgtttttgaccagcgaaggcatcacgcgctttttaatatgcagccggcgtgcgacaggccaaaaaaagtgacacacaacaacaggcagttgcagttgtcctgcacaggaccttcgcactcattacataaaaatcaatttttggtttatttctgcactcgccccgccccaccacgcaattgcatgtcattttttgccaattacacccacacccgcacactcgcggccaattgcctaattgcgcgacggccaaacgcgttgaagtcaactggcgacgagttttgtaaattactctcgttctgccagcttcgatcctgcgactctgcgactgcgaatgtgatgtcctgccgggct

SEQ ID NO: 41867 - DNA, 1810 bp, DROSOPHILA
gtttgtgaaaatttaaaactcaacgtcgacgacaacagctcgatttccccgctgttgacgaaatcgatccaatccgaccatgtcgcaacagcgctccacagagcagattgcagctagcaacaacaacaccagcgatgtaatagcgctggacgacgacgaggatacggatgtgcaattcgttgcagctctgcgtcccaccgcaccagtcatcgatctttgcgtctcgccctccacttctgctgctgctgctgcggcggcggcagctgcagcccactcaggaggcggaagtggcgaggatccggcggttggatccgcatctggagctgctgcttcggataccgattcacttgcttcttcgcctgacgaaggagcgttagccaccggtgtggatgcagcggcagccgtttctggcgaagattccccctctgcagcggccgctgccttggagtgtcccatctgtttgcaaacctgcatccacccagctcgtctcccctgtggccacatcttctgctttttgtgcgtgaagggtgttgcttataagaaccgccgttgtgctatgtgccgtcgcgagattcccgccgagttcctggaccatccccagctggtgaatggcattgaggacatctgcaccactcgcgcgaccgaggacggcttccagtggtattacgagggaagaaacgggggctggtgggcgtacgattctcggaccaatgcagacatcgagatcgcctatgctggctttgagatattcaaggcagataaccctgagcttgctcctttatttgatcgggactgtccaaaccctatcaatcactattgtctgtgtgacgaaaatattattttctacaatgccgattcagaaattgttatatacccaaccattattcgttcatctggtcagggcgctccagcctcttccgaaaacaatggtcgggactcgccagccctatcattggacgatattatgagcttagaccccgatgagctgaacatcattaggccgcatccatgcacactgcccattcagatctgcgggcctttcttgtcaaaatgtttaactataggttggtggcagtacgatgaccgcactagtcaggacatcgaagatgcctttaagaagggcgacaaatcctgtacaattttggtagccggctacgtctacattgtggacttggagcagctagtccagcagcgccagaatgagcccactcgctgccggagggttaagcgagacctagccaccatacccaaaaagggggtggccggtctgcggatcgaaggcaaccaggtgaccagcgacaccgtcttcagcaggccaaccaacacagccaatccaaccaccgtggcagcagctgcctccagtttcatatccaccatagcagccacagatgcggccattagaatcgctagcgacataataggctcaacgctggctcatgcagatgaactaactcggggactgacggctagcaatctcaacgatgatctcagcagcagcggtgagcaatccaactccacaaattcaaacgatgcagggcgctcgcctgcctcctcgcctgcctcaagttccatgcaggatctgatcacgcgtgacctgaggaacacccaacaggtgattgcccacaaccagcacaccattgatctcttcgagcaggccttgaacgacttccaggcgctggccatgcgcaactatgttgactccagcgatgaggagaacaacgaccaggatcaggagcatgagctgcgggaacgggagcagctggaggcgggcgagcagccacagtccaacgataatccccagagattttag

SEQ ID NO: 41868 - protein, 576 aa, DROSOPHILA
MSQQRSTEQIAASNNNTSDVIALDDDEDTDVQFVAALRPTAPVIDLCVSPSTSAAAAAAAAAAAHSGGGSGEDPAVGSASGAAASDTDSLASSPDEGALATGVDAAAAVSGEDSPSAAAAALECPICLQTCIHPARLPCGHIFCFLCVKGVAYKNRRCAMCRREIPAEFLDHPQLVNGIEDICTTRATEDGFQWYYEGRNGGWWAYDSRTNADIEIAYAGFEIFKADNPELAPLFDRDCPNPINHYCLCDENIIFYNADSEIVIYPTIIRSSGQGAPASSENNGRDSPALSLDDIMSLDPDELNIIRPHPCTLPIQICGPFLSKCLTIGWWQYDDRTSQDIEDAFKKGDKSCTILVAGYVYIVDLEQLVQQRQNEPTRCRRVKRDLATIPKKGVAGLRIEGNQVTSDTVFSRPTNTANPTTVAAAASSFISTIAATDAAIRIASDIIGSTLAHADELTRGLTASNLNDDLSSSGEQSNSTNSNDAGRSPASSPASSSMQDLITRDLRNTQQVIAHNQHTIDLFEQALNDFQALAMRNYVDSSDEENNDQDQEHELREREQLEAGEQPQSNDNPQRF

SEQ ID NO: 41869 - DNA, 6134 bp, DROSOPHILA
cgcaatcgatttaattaggcacaaaataataatgtttcgttaattagggtacaatgattaatgggtctcggcagacgcacgcccggattttcttgaaattacataaatgttttctgaatggaaaatttgagtcatttgcacatggcattttcatgactattaccccatgaccatatgggaaatgcgccattgaatggataccagatattagcaaagctcacaattacaccgtaattcccgagtgttatgatttcttatgccaaaagataccatcatcaccaccatcaccactcacacacatacagtcacatacacaagtttggtgtgtgattgcgttgtcaataaaaagctctcaccagtaccagttgtttaatgttgacgctcgactcaatgggtgtaccgctcgcgtaccgctttctcccgctctcgctctctctcgcagtgtcgccccgctgaccgccaaccactgactaacccagtcgatcccgctccggcgtcgagaatcaagtccccgtatcccggtgacagtcccagtgccaaaacacttccgaattgcccgccttgaccgcgcgataaagagcagacctcattcgagttcagagcgcatggggacactcacaaaaaaaaatgttttgaataaaaaatattatttaaaataactttgtatttcattgatattggtttatgttgattataggatttttaaaataagcaaaactaaaaatctttgaaaaatacttatgcaggaacttaatggatcaatcaaagaatgagtttttcaaagggatcttttaaactgcaaatcaaatttgtttaaaatggagtacgattttgttaaacgttttagcacttccacaacttttcaaaaaggtctcaaaaaaattttattgcctttataatattgctttttttttgagtgtacggtcgacttttgccggcagttgtgtgggatctggcacgctgacgctgcgcggcgatcagtccgctttcggtgctcaagcgttgcgtttcgtttgcctccagcagcagcagcaaggcccctgtccaatcccattacccgaaacccagaccagtttgtgtggacaacgatgacgtgctgaggtcgctcgctctctctctttccctcacactctctatctggctctccctctccaacgcgctctcctggtgtgccaaaaaaaattataaacctattaaatagtttttcttcgcggaaagcagacaaccaacaacacccggaaaaccagaggcagcgttttcttgttcaaggtaaatatgccatcagctgtggccagaattcctctcccattttttttgcctaattagcagtttagcaattgcaattgcagtgccagttttattattcaatttgcaaggcaaacgtgcggcttcaaaatgggcaaacacccgtagagatagtgtttcagacggattatgttagtgaattatcacgcgatgtttcgtgccacgaaaggttatagaacgattccaatagtctgtcccaaatcagctgttcatttgtagtaaaatccattatcaactaatcttttttgggggctcggttaagcgcgaaaacaacttaaagaatgcccagtgatcatgtgatattcgttattaattcgactttgaccactgccattcatttttatattcagataaaattcagacgaaaaaaaaaaacgaaacaaaaagtgaaaataaaataaaacgagaagagaatagatttgtgctgcatataatttatgaagcaatcgacgcacgtggatgttcccaaacaaaaatagtaattgaataaataaataatggcgggctgttaaaaaaaacacagaatctaatacaacacatgccagcaataatgttgtgcaccgggatttcgatcgatagtaaacatgttatctatctataaacacgccccggtaaccgggttcacttgataaggcaggcccaacaaacaggcctataaagattggtactactcccgggtctcgggtgtataaatggtttcaaaacaatcgagggaaagggctattggccgatatggatggataccaactttaaacacacctaattgtaaccgaataccttatgcccttgactttcattataaagccgtatggtataaagttggcaccagaacaaaatttttatatcgactgataactgaaatagttattcgcttagctaaatacattaagatttcaacatacatagaataaatggtttagtgtttagtgtgaaaaagtaagggcaaaggccttggactcatgcgattatataagatctgagtttcataagatcggacgaatttttcatatatttattcaaaatatttaatttataacaatcatacgaaatgcaaagattttgtaaaatagtttctaataacttcaaggttataggttcaaggttatatcatagacaattcattccgaaaatgtgtgttcgttaaaggtgattcattcactaagaattcaaaaccatttttaaagttactgaagcgcaagtcacttaattctgtaaatatgctaattttgcaagtaagggtattgaaaacagatagtcgaacttgctccccaatcgattcagttttttggtccgaattccgcattaccacgctttgaatgtgagatcatgaccgatatgttggcaatagttgccaaaaattataaacaaaatgtaaacaaaactcgagacgcttataaacaaatttaattagagaagttgcagattgacgatgcccggcaatagcgacttgttgcgcaagttagtggggttccaaaactgagctcaattactcacccgttggtttggaggactgccgggcttagatatcaattcaatggtggcaagggattcactttctcggtttagtttacgaaacaaatatacaattttgacatgaaaaacatgttataggtgctagtatgaccgtaaattcgtaatgatcagctgtgtgaaaacagtgttgttaagcgcagcaagaccactgttgtgggctaacagaatgttatacgcgtgccaaggcaaacaaaaatacatggtcgttttcaaaaaggggacaaatatttattttgaaactattaacaaattcataaagatgccccaaaagtagccagaagaaccgaaatattctattcgaatcattttggttcatatgaattaacttagttactcatgcttctgctgcctaagtgatgtcttcacttccatcattgtttgtgtagaaataaagttttttatttttttaatgagttgactataaaatgattttattgcgtttttggttaattccttacaaatttaaagcttatgtcaggtgagttatacactaacatcattaagtataaacaaacaattttttagaaaagagttaaaattgaaaggtggagttacttacatttttcaagtagttattcaaccttaaaatgattagaatcaaaacatgattttgaactagaattatttcctaaccaattaccccactgtaagcattttcggctacgccccagacaacagttattaatatttccgacgaaagctttcaagctaagctttcgcgcaaccgcccagatgttttaactgtgggtccttcaattccgtcagttccttatagacccaccggcatgacataacacagccgacccactgaaaatgccgcccatcgcaaaagaaacgacttagccgccctatctatcacatttgcaataggtataggaaatcatatcaattggcatccaaataatatacatatgtatttgtatcttttaccaccttctagctaaagataactaacacgcaaaatgccccaccaagagagaaaatcgatgtggttctttggcggattggcgagcgtaggtgcggccatggtgacccatccgctcgacctcatcaaggtcacgctgcagacgcaacagggtcacctgtcggtggcccagttgatccctaaactcgcccgcgaacagggagtactcgtcttctacaacggcctctccgcctcagtgttgcgccaattgacatactccactgcgagattcggggtgtatgaggccggaaagaagtacgtcaatacggacagctttggcggcaaggtggccctggcaggtgcatccggtctcgtcggaggaatcgttggaactccggctgacatggtcaatgtgcgcatgcagaacgacgtaaaactaccgccgcaacaacgacgcaagtatgtgaaaattattttaatcctttaaatagtagtttgcagggtaaatcatttttgaggctttaaacttactgattttttgtatttcagctacaataatgccttcgatggactggttagggtctaccgccaggagggattcaagcgactcttttctggagccaccgcagcgactgcccgtggaatcctgatgacgattggccaaattgcattttacgaccagacgaagatctacctgctggccacgccttatttccaagacaacctggttacgcacttcaccgcctccctggtggccggaacgatagccaccactctcacccaaccgttggatgtgctgaagacgcggtccatgaacgcgaaacccggcgagttcaatggcctgtgggacatcgtgaagcacacggcgaaactgggtcccctcggcttctttaagggctatgtgccggcatttgtgcgtctgggtccacacacgatcatcacctttgtgttcctggagcaattgcgtctcaagtttggcaccttgaattagccgcgatgccaatcgataccttaactaggcaataattctccttggctggctggcagattcccttgagcaatgcaacattccagcagcaattcgttcaccgtgtagaacataacttagctttagcccgttccagttgttaaccaagatgcttttatgctagcaaaatatttgttgttaagcgttcaatgcccgctatcccgaaatatatactttttaataaaatacagaaatgtattcatttaccgtgaatattaatgcttaaatagtgtcgattttttcgcaatttgcttgtttaaagtaaacataatatctttccactgcgtataacaatatgtatatttgtactggattttgaacaaactttaagctaagagcaattaaacagaaggtagaccattaaatatattctgtgctaattggtgtgggcatagaaggtaaaggttgactctatcgtactccatcgtcattgtcgtgctgttactaattataaatattttgttaacaatggctaagcatttgtttgttgttgctttatgtgtaaaatcggccattcaataaataaataaaaaaaaggacaaacggtttctacgaaatgtaaatagtctttgtttttctataaacaaataaattaaaattaataatgttatcccaagacgtaagaaggattaaaataaggtgctcagaatttaaaacagctcgattttttttttaaatcagttaaaagaaaatgaagggtaataattatttcataggtgtaccgtccttaaagtgaattcaatcgtatatttcgtgatgttggcaattaaatataactgtgcaatagcttaataaaacaaagggatcgcgttttgatatcaatgaaccatttctgggaataaccgaaacaagttcgtttccggtacaagcgatcatctatctaaatccttatataccaatgacaacgaatgatcagccatcagtcgtcaaagtatcgtaatgggctcctctttatgtcccgtctcttatctggcggtcttggcaattatcgtcctaaccagtaatattacagtccaggctaaaaggacattcaggatccagaaattagaaaaggtgactgaggatacctcatatctgcgcagtcgtctgcgtatcgctgagtccgaggaaaatgagttgaaagtcagcggatatctcgatctgaatcaacgactcgacaatgattggacggtacgtagtttataatatatagtggaggaattaattatttattattccttcaacaggttgtgcttaaggtttcaagatccccggatagcgatggagactacgagaaggttttgacattcgaaatgcagctttgcgactttatgaagagctactacaaggatatcttttacgaacggatcaaggaatactcgaatg

SEQ ID NO: 41870 - DNA, 1535 bp, DROSOPHILA
cgttgcgtttcgtttgcctccagcagcagcagcaaggcccctgtccaatcccattacccgaaacccagaccagtttgtgtggacaacgatgacgtgctgaggtcgctcgctctctctctttccctcacactctctatctggctctccctctccaacgcgctctcctggtgtgccaaaaaaaattataaacctattaaatagtttttcttcgcggaaagcagacaaccaacaacacccggaaaaccagaggcagcgttttcttgttcaagctaaagataactaacacgcaaaatgccccaccaagagagaaaatcgatgtggttctttggcggattggcgagcgtaggtgcggccatggtgacccatccgctcgacctcatcaaggtcacgctgcagacgcaacagggtcacctgtcggtggcccagttgatccctaaactcgcccgcgaacagggagtactcgtcttctacaacggcctctccgcctcagtgttgcgccaattgacatactccactgcgagattcggggtgtatgaggccggaaagaagtacgtcaatacggacagctttggcggcaaggtggccctggcaggtgcatccggtctcgtcggaggaatcgttggaactccggctgacatggtcaatgtgcgcatgcagaacgacgtaaaactaccgccgcaacaacgacgcaactacaataatgccttcgatggactggttagggtctaccgccaggagggattcaagcgactcttttctggagccaccgcagcgactgcccgtggaatcctgatgacgattggccaaattgcattttacgaccagacgaagatctacctgctggccacgccttatttccaagacaacctggttacgcacttcaccgcctccctggtggccggaacgatagccaccactctcacccaaccgttggatgtgctgaagacgcggtccatgaacgcgaaacccggcgagttcaatggcctgtgggacatcgtgaagcacacggcgaaactgggtcccctcggcttctttaagggctatgtgccggcatttgtgcgtctgggtccacacacgatcatcacctttgtgttcctggagcaattgcgtctcaagtttggcaccttgaattagccgcgatgccaatcgataccttaactaggcaataattctccttggctggctggcagattcccttgagcaatgcaacattccagcagcaattcgttcaccgtgtagaacataacttagctttagcccgttccagttgttaaccaagatgcttttatgctagcaaaatatttgttgttaagcgttcaatgcccgctatcccgaaatatatactttttaataaaatacagaaatgtattcatttaccgtgaatattaatgcttaaatagtgtcgattttttcgcaatttgcttgtttaaagtaaacataatatctttccactgcgtataacaatatgtatatttgtactggattttgaacaaactttaagctaagagcaattaaacagaaggtagaccattaaa

SEQ ID NO: 41871 - protein, 280 aa, DROSOPHILA; identical to SEQ ID NO: 24396

SEQ ID NO: 41872 - DNA, 12049 bp, DROSOPHILA
aactagtgtgtaaatatatagaatatatatatatatacatatatactgagtgtatatagaataatattaaatttgtaattcgtgtgcagcagatccacgatttccagagggccgaaacgtatttgcccaaatatatacctacctgttctagaaagcgctcatggccacatcatagccgaggttagatctgccagtttattatttaatttatccaaaacatattctctgtgtttgtgattgcattaaggcactgaagcttggaattttgtgcatatatttatgtagaaagtaacacttcccggttgatcgaacggccacttacccacataattgggaaactgacacgcgaaagcatcgaaattatacgtacaatgcgcttcttaaaaacacttttcttagttcttagcaaattttgttttataaaaatatccctgctgactatttcgccatattcccttcattactgattaatgcctgaggccaattctattttttgttgctttgtagttgtgggagcgtttgttgggttttcctttcagttgtggttcaagctcttattatcaaaacggaaactaaacctaatggcttaagttagatgtacaattatgaaattttttaaatatattacaaaggcagctctctaaggacaagaatatgggtagttttaactaaacctaatgcgaaattatatttagcaaaataggaaatgcatgcgatacgagtacgacacggacaaagatcgccccaaagaacccaaaagggtttgtattccggaattaaactgctccgaggcaatcaacgctgggagagaatcttccgcttccgctggttcatataaattagaggagctagttatctggacatgaacgtagataataccatacagtttaggtcgatttctcgttgagtatataggagatagtttttgctgcgtaacttggacaactccaacttcgggcctaatcaaggggcccccacctagactagatatcgttccaggttagaccatattgacggcgccatcagcctcaaaagtaggtatggatataatatcgctgctgcgtacggcgcccataggcaaagctggaccctcggccttggcttccgtcggccggtttccctgctcctcatcgctggaatcactcgaatcgtcttcgggctcgctatagctgttgcttgaggtggatgtggcctgagttttcttcatgtccgcaatgtcggtattgctctctagtgtcgagtgctggctggagggtgagtgactgtactcggaggtgttttcctcctcgtctgatacgattaccacattgcgcttgtggatggcaatcttctgggagagtggagccttgtagctgcgacggggtcgcatgccacgagctatgggctggcggccaatgctaaaatggcagaaatttcacattaaccttacactacaaattcaaggcacgaatcttccacacgcaccttcttctccgcagagcgtacttgtagtccgtggtctcgccctcctcgtccgaccagctgtcctgctcatgcgactccccgttggcattgcctatcgaactgccgtttggattgtcccccagtggatgcttccgccgtttgctatgtgtgctgctgcatcgacttaaacacggactgttaccactctcacgcaattcaagaggagaggctcctccattcccattatcggcattgctcacggagttcgtgtttgactgaatggacaggcggttttcgttgatgaattcgatgactttgcggcctagacgttccaggttttcgttgtcactgcagcattcagtcatgtccaaacgttcgttgctgttcattacatcgtcgatgagctgatcgggactagagcaggcatcttggtaggtcagctcgcttgtgctcagagagttgccattcgacggacaagcgggattcacggcgccagctgcagatgaagtgcttccacttcgagccctcgcctgagcttgggcaattttctgtactctctgcagttgcagcggcagttggcgatgattcggaactggcacgtcgatgggctgagatcgaggagcctccgcgctaggactaatatccgtttcactcacgtccatggcatctgtttgggtttgtctctccaccagctgcacctttcggttctccggttcgctctggtaacgacgatccctcgtcggactgtacttgggtggtgcaccgaaggaaccagatgcgttgcgtcggtgccggaagaccttcttgtttttattgggcatgggtgcgcctaagccgctactcgggatgatattggccagatacgatttgggttggcaattgctatcaagctgggcatatagcatacacttcacaggggactgcaagttagagttgttttataattaatgttttatatttcatattcatttcaaaattatgcgcactcgggtataattaatcatttaataacagcgataaacaatgaaatatccttctttaaaatcttgctatcgcctgccctctttttataaagtaaccataaaaacataatatttgagttccagatataagcaagcttacgtattacaaaagcataactaagcataaatttctctgttttttatatagaatgtgaatattgtgcatttatattccgatagcttattgaaaaaacaattcaatacgtctataagtatacctccggcgtagtctctggatccggcgttgttgattgttgctgaatggcggcaggagcagggttcaggcgtcggcgatagtgttgcatttttcggatcgtgttgccaaaacgtcgattgggtttgtagccacttcctggtagtttccgttctcgtctgaaggaaacgcatgggtttaatcaaaagaatcttactgagaaaactgctgcacttactctgcgatttccttctccttttcctgcaactgggacatgcactcgctgagttcgaagaaaagctggttggtcttttgcaacttatcctcgtacaccattcggatatcctgggcatgtcgccactctgccgtccgccgcttaatcagatcttgctcgtacttgtgtatgttggtgccattttgggtaatctccttcaagtgagatctcacctcctccttccacgacttttgcgtctcaaaatattgcttctcggtttttctcagcagttccggtccggcgatatccaagtgcgagagtatctgccggaacgatggccgatttcggggcttacttttccaacagagcttaaccagcaacttaaatccctccggacaggtgctcgggaccagcagcttgagagagttgttgcccacaccccagattatggctgatgagtccacatccttgtaaggtatctcgcaggtgagcatttcccatagcaccacaccgtacgaccaaatgtccaccttctcggagcacggctcattcctgatcacttccggagccatccaggctacggtaccagcaaagctcatcttggtgctgatctcgttccactcgcgactggtgccaaagtcgctgatcttcaccacctcatttgtactaatcagtatgctaaaaataagcagagtttataatatgattttcgatgttgtttctttaacttactttggactctttagatctcggtgtatgatcttgtgggaatgcagatactgcatgcccagggcaatttgcttggaccaagagaccaagcgggacggtaacatgacttgctcctccttcaggatattctgcagtgggccatacggacagaactccatgatgatgcagaacaccggtgactgcgtgcaaacccctctgcaagggtaaaaaatattagtcatacattttttaataataaatccataataagtatgtgtactttctatatataataatttatatttgataaaacaattctcagaattattttgcttaaagttatttgtttttagctactaaattgtgctttcctttttgatttctcacacaataaaccaaatcaaatataaaaacaaaagagagaattctatagtcgagttccccgactatcagatacgcaatacgaacgcgaaatttcattttttataatttttctggggaataaaataaaaaacatttaaaaattgtttaaaagtgtgggggtggccgttttgtacgtgtgataaggggcgtagccaaagtgttttggtatacctatagaaattagcaaggcaaacaataaaccgaagacaaatcgaaacatttctaaaagtgggcgtaagagtgaaatttacaagactaataaaaatataaaaaaatatcaaaacattgttgaaaagtgtgggcgtggccgttttgggtcgtttgtgggcgtggcaacatgggtcaagaaacttgcgctgggtctatgtctctagaacctgtatgcttaatcttaaccttctagcttttatagttccttagatctcgacgttcatacggacagtcggacaaacggacaggatcaagaatatatgtatatgtatactttatatggccggaaacgctttctgcctgttaacttctttttaacgaatcttgtatacacttttactctacgagtaacgggtataataactgttactcatttgcaaactaaaaacgctaaaactttgctcttttttattgttcgtagtaaggggcgggttctatttttaaaacgtttgttttattttcagtctatgaatggatggatgtatattatactctcgtactcacttgaacttaataatgttctcatgatcgagcttcctgagatgcttgatgtccgtttccttcagctccttcaccttcttgaccgccacagtctcgttctttagcctgccactgaagacggctccttgtgctccgcttcccagccattccaactcggtgatggactcaaatggaatctgccagtcctcgctccgctgactcttcacctcgatcacccccgtcttcccgatgaacgaaagcacgggcttcatgcatccgagcagtccgtacatccagccaatgggcttgtccggatgcccgaaggccgcccctgctcctcccacatgaggtggccagcgctgttggcacgtgttttccgcactgctgtccgtgatctccgcatagttgttgtgatgctgcaggcggggcggagagtccaggtcggaggatttgaacggcaggtctgtagcggcgatgcctaggtgaccgaactcatcctgcaggcaagccatgctgtgaagaaaagaaaatatgacatggatgagtatacaaaatccataggcaatcatatacagcacataaacagaaggtatagattttgaacatacaagatggaagaaataatatgcggcctaaatctgaatctagacattgatcacagttcaaacaaaccattttcatctcaaattagttcaattgatgtttattaaacattagaaactaactatgttatatatatagtatgttatatacatacatacgtatgtacataattggcttatctaagcttgttctgtatttcataacatttaaaacattttcttactgaataaaaggggttccaaagcaaagtttagctttctaaagaagtaaagtctaataattaattacatacaaattgaaccctgaaatcacctatgtacattaagctctaataagaagataaatagccacagttctcaggattttccgatccgcgaaatgtttgcatgtcgaaaactttacgcaacctataattactactatttttactattactatactaatttactattactatactaatttactatactactattactatactaactgtattagtatttttaaatgccatctttaagcaaataatttcaaatcattaaattaacaaatgagggtcagcccacaaaatgtttgagaggcttttagttttttagtaaaaataaagagtaacataatatataaaaataaaggtaacagtgattgggttttttgttttaagtctttatcagtcaattatacatattggcgccaatattatcaagtgagatattttcctcaggttatctatcaatcaaaagtttgctaaaaatgtgccgattacgcatagcctttaaatagaatttccttatcgtaacattggtgataaaaaatgcgcccagcatcatcattcgatctgaagagaacgtcgcaaaagccgatagtttattgctagtaaatcgttcgtatgataaacaaagtgcgtattcgcgatttctgtgtttacacacgccataataatcacttttcgtgctgacacagtgaacgggcaaaaaaaatcgaagtttgataaaagcaagcccgagcaaataaatattaggaaagtgatcgcttgaaattcagttcttcgcgcacccatacgtatgaaaaatgccttcctgttggaattcgtgtttgcttttctgtccgataagataaacgaacacaggacgttgggagcgggaaggggtggagtacagtggagtgcaaatgcggcagcaggtgaaaaaacatttatcatttatcactgccagaatggcaataaagagcacaaaaactgtaagtagaaagtctgttagacgaaatcacctgccacacacctacaccaatgcacccacacttacacacgtatacatatgtatgcatgtatttaagcccgtctactgttttccttggatcgtattcgttattcgcattaccactgttgatttggtttagctgaaatgattttacaaatacacatatccacgttgattgtgaaattaagaatatgtggcttctttataaacatgaagcaaattctattcattatcaaaattaaaagaaaaagagccgttggttatattattttgtacataaaaagtgtacttcgagagccatagggtttttccatactcctatagtgactaaacttatatttaaaaatgttcttgttaattatcatgaggccacattattaaaactaacgattattaaaaagaagctcaaatgacaagaatgttactgttcttaagtggaatcataaaaagcatatatatctctctatttaagctgagcaatttatgttttatatcagcttagatcgataattttggttacgtattggtaacgataaaaagtatgcataataaatatcctaccatttatctatgtacatacatgaagttttttttatcatgcgatttttacggattaaataagaagaacagtccctttgcaagtatttgttagtttctttattactgtcttctattccaagacaacatattaacactaaattagcattgttcgaagggtagctaagtaagtcagcaagttttcccacactgataattctggttggctctcaggtgaaatgtggatatatgtaagtggaggtattgtccctgcttattaaagtttcttataatacaaatcataatttgatagccgcttagcttttatcttcgcttttcgggtacgaagatttactccattacatggtgaattcacccctacctgttgatcattggaaaaaaaatcacacgcgcattagtgtaccgttctctgtttttttgacaatacagccgtcctgctcgcacgcggctggcggcacccgccgtgcaaatgtcaaaaacctttcgtttatttatgaatttgtgaaaaagcattaatttccgtccccaaatgttctgttgcgatatgcggccaagcacgttttgacctttggcgtgtggttcatagaacgcggatatttggcggcgtctccccatttcttttcattcatttctgcatgggtcagcggtgaatctgtgagattctgtgactcagtgcatcttgagatactttcgggtgcgtgtattttaccttttttctttggtgatgatcatgtcgggcgggtcattgtggctaaagaacggtatgatgtagaccatggtttatttgttattgccacttttttggttccctttcgtaattagttgtcgcgcactaagaatttcattcattcatgcgacgagactgcattaatgcaaaattttacgctcgcttttcgccagcagttctgttttttttttgtttttacgcactgggccaacaacaaaagttggctaacttttgattgtgagttcgtgccaagcaccagcagccaccgaaaaaacaacaacaatcgccttttgtcgtccgatgtataataataaaaaaaagtgacgtcaaggtaagttggtatcgctttttgttgctattaattacaagaaaagagagacgaacgcgacgcgtaacactttcgttggcggtttttcaagactgttgcttattggttgggtttgggggggaaaaatgcaataatttcacgtatttcgcacaactgcgtcacaccaacacacagacaacggctgcaaactgatttggcgataagctcgcttttgtttttgttgtcgcacaaacacacggacgcaaattaaggcaggcttgcgaatttcaagcgcaaagagcgaccaccagaagcgattgattttcgccaactaaatcgcgactcgcagcgtgagcataacggtctagctccacattatcagtatcagttcggatggagctctctctcccgctccgctctcatctgctgttatcatccggcgttgttgttgtcagactgaccgcattccccagcgcctgtatcgactggccaaccatctcgaggtctccccaggccaggctgccatctggtcacacttaaaaccagttttcatggtggggaacacatgatcaaatctcacacacatccacacaaatacagatacaggtggtcgtgctgtggatgtaagtgtgcgaataggaagtttttggctgcgcccccctgcaaattgtatcgcccaattttttttacagtggatactgcctatgaagacatttccgtgtgcttgttatctctactcctgaaaatcgagtgctctccttagtaatattataatcaatcacaattacaaaaaattattaaatactagtatttcgctatttaaataatgaaaccccttttatctgcttatctgttaacactgttgttttgcagtgttttagtagatgtctgtatgtctgtcttctttgttgtcattattatgctcttttaatatctactgtgataactttttattatttcacaacaagcttttttggtttgcacgtgctttctaatgatttctatttacttagtgagactaggaactaggaaaataaagctgacgcctcctatttgggaaatagaatcctgtatctatcggataaagttgaattttttattgttactcagttcaagatttttgtggctttttaaatttttaaacgatcgtttaacctgctaaatactttcgagtattcagttgcttgcgaattacataaaaacttgtatacagtgaaggtcgattaccccgcttaattaagcacgattcggcggcatattcttgaaatattaattaaaatttcaagccgattttgtttcttttacttaaacacgacgagtttttaatggctgaaagtatttattttttggggtttttatgctcgaggttgctttttagttttttttttaagatttaatcaattatgtgattactctttaaataaagtttctaaatgtccaacaacttttctataatcaactcaaacaaaaatcgttctaaaacttttaggtttttgtcttagccatcacgaccataatgtctaataataataatgctcacctccttcgcagattgtcggtctgatcgagcgacaagttggggctgctgccgtggtgtcgcctccgtccgtgtagctgttgttgttgccgggaggcggcggtgaccagatcatcgcgacttttgctcagactgtcgctgaacggttgcattgtccaggattggtgtggtttgggtatgtgtattggtggctctatgatcgatccttacgacattctggtcaataaagcggttgctatatggagataccacgaacattagtattttttggctggggatttccttttcagacacacacacgcgcacattcgttcgcaacctcttatcaatgaatgacgaaaatcaataagaagcaaacgacgtcaaacggcaaagggcaaaaggatatgcgagcaggagcgggagcgagacagcaatagcacccacgcaaaaaaagctatttaaacacacaaacacgggaagaagaagggtcgattattgcacttgctgccaattcactttgcattccgcttaaatgtggttttctttcactttcaaactgcaggctgagctatttttatgatgcctttaaaaggcgaattgcacaaaagaataggcgcacacacaagctcacatacaggtattctttttatttgtacacagaaaaaaaaagtagatatcaaaaaatgtatttatatattgtatcccatttttgtaagttagatgcttttccaattatttttgagatatagtacagaatctttttctgttaaaaaaaaaatataattcgccaaataatattactttatgattattttttttctcatttgaataatatcttttgcttttcaaaagataaacatatattagaagaaaaggcacttgatatcattttttcctgtgtacaactccacttcttgttgttctttttttttttaatttaacttggccaaagctagaacataacaaaaacaacaaacataaatgttcccacacacacaccagagtacatttctcgctattgctgtctcgttcacacccacccagtagggccctcccctcttgctcgcaccaacgacggaagccttacagcgcagctttgtgctgttgctgcttcttcttcttcctctgctgctgccttttgctcgctcgttcgctcttttggccaagaaaatcaatataaaaattcttgtatttgcacatttttcacacactttgctcacttttccagcaattttccactgcgaatcgtagtgattgcattgattcgtactttattcagccattggcgaagaacttttatttgatttcagcttgaaatggaacaattaaagactggttttctgctcttcttggagttccgctgcgaaacgcgtttattccgaccaaccgtccgcaccaaaggtagatacaaatcgactaaaaagcaaaaactggctgctggctctgctttggctttggccgaaaccgagttccaatccgctctctagcgctctctcttgcggatttcctccaccaaaaccagtttggagcgcaggttgtgttcactgcgcaagtgtgcgggagaacgcgactgcgcgggatggccaaccacaaacagacatcaactgccaaggcactgggtcgttgttgttgctgtcgcctctccgattatccccgtttttcttttgctcaccacactctacttgatagtgccaatgaaactggatctggcttaaaagtttaataaagctctcgtcagcgacgtgcacgatcgtgttcagtgcctaaaagcgctcatggcagctgcttctgagcttttagcaaaataatgcttaaaaagataatgaagtcaaaaataaataaattaaataattcaaatcaatgaaattagatgtacacatttgtgtgtcgttgaatatctaaaacctcgcttttaccacactctttttcatttctatttttattttctctttcgaatattaagtactaaatttaagaatactattagcaacttttggaaactttgatctaaaattttgaaagaacatctgaaagtagaaaaatttattattagacagttttttatactaaatgtgggtattaattttatttaaaagtcagcttcttaataaatgaaataaataactagatatgtatgtatgtatatctatttaaggaaagtcaaaaacttagtgatactcttaaaaagaatgtatgtatgtattttgattttgttttatcaatatatgttataaaagcatgagctaagttacttaaagtatgatcttaatactttttcgctttatacacaaacaaacatacatacatataaaaattaaactttaaattgttcttaaatgcaattcgcttgcgtaaacaacctatcagcttatcagtctgtacgtca

SEQ ID NO: 41873 - DNA, 3109 bp, DROSOPHILA
ttggtcggaataaacgcgtttcgcagcggaactccaagaagagcagaaaaccagtctttaattgttccatttcaagctgaaatcaaataaaagttcttcgccaatggctgaataaagtacgaatcaatgcaatcactacgattcgcagtggaaaattgctggaaaagtgagcaaaatgcaaccgttcagcgacagtctgagcaaaagtcgcgatgatctggtcaccgccgcctcccggcaacaacaacagctacacggacggaggcgacaccacggcagcagccccaacttgtcgctcgatcagaccgacaatctgcgaaggagcatggcttgcctgcaggatgagttcggtcacctaggcatcgccgctacagacctgccgttcaaatcctccgacctggactctccgccccgcctgcagcatcacaacaactatgcggagatcacggacagcagtgcggaaaacacgtgccaacagcgctggccacctcatgtgggaggagcaggggcggccttcgggcatccggacaagcccattggctggatgtacggactgctcggatgcatgaagcccgtgctttcgttcatcgggaagacgggggtgatcgaggtgaagagtcagcggagcgaggactggcagattccatttgagtccatcaccgagttggaatggctgggaagcggagcacaaggagccgtcttcagtggcaggctaaagaacgagactgtggcggtcaagaaggtgaaggagctgaaggaaacggacatcaagcatctcaggaagctcgatcatgagaacattattaagttcaaaggggtttgcacgcagtcaccggtgttctgcatcatcatggagttctgtccgtatggcccactgcagaatatcctgaaggaggagcaagtcatgttaccgtcccgcttggtctcttggtccaagcaaattgccctgggcatgcagtatctgcattcccacaagatcatacaccgagatctaaagagtccaaacatactgattagtacaaatgaggtggtgaagatcagcgactttggcaccagtcgcgagtggaacgagatcagcaccaagatgagctttgctggtaccgtagcctggatggctccggaagtgatcaggaatgagccgtgctccgagaaggtggacatttggtcgtacggtgtggtgctatgggaaatgctcacctgcgagataccttacaaggatgtggactcatcagccataatctggggtgtgggcaacaactctctcaagctgctggtcccgagcacctgtccggagggatttaagttgctggttaagctctgttggaaaagtaagccccgaaatcggccatcgttccggcagatactctcgcacttggatatcgccggaccggaactgctgagaaaaaccgagaagcaatattttgagacgcaaaagtcgtggaaggaggaggtgagatctcacttgaaggagattacccaaaatggcaccaacatacacaagtacgagcaagatctgattaagcggcggacggcagagtggcgacatgcccaggatatccgaatggtgtacgaggataagttgcaaaagaccaaccagcttttcttcgaactcagcgagtgcatgtcccagttgcaggaaaaggagaaggaaatcgcagaacgagaacggaaactaccaggaagtggctacaaacccaatcgacgttttggcaacacgatccgaaaaatgcaacactatcgccgacgcctgaaccctgctcctgccgccattcagcaacaatcaacaacgccggatccagagactacgccggagtcccctgtgaagtgtatgctatatgcccagcttgatagcaattgccaacccaaatcgtatctggccaatatcatcccgagtagcggcttaggcgcacccatgcccaataaaaacaagaaggtcttccggcaccgacgcaacgcatctggttccttcggtgcaccacccaagtacagtccgacgagggatcgtcgttaccagagcgaaccggagaaccgaaaggtgcagctggtggagagacaaacccaaacagatgccatggacgtgagtgaaacggatattagtcctagcgcggaggctcctcgatctcagcccatcgacgtgccagttccgaatcatcgccaactgccgctgcaactgcagagagtacagaaaattgcccaagctcaggcgagggctcgaagtggaagcacttcatctgcagctggcgccgtgaatcccgcttgtccgtcgaatggcaactctctgagcacaagcgagctgacctaccaagatgcctgctctagtcccgatcagctcatcgacgatgtaatgaacagcaacgaacgtttggacatgactgaatgctgcagtgacaacgaaaacctggaacgtctaggccgcaaagtcatcgaattcatcaacgaaaaccgcctgtccattcagtcaaacacgaactccgtgagcaatgccgataatgggaatggaggagcctctcctcttgaattgcgtgagagtggtaacagtccgtgtttaagtcgatgcagcagcacacatagcaaacggcggaagcatccactgggggacaatccaaacggcagttcgataggcaatgccaacggggagtcgcatgagcaggacagctggtcggacgaggagggcgagaccacggactacaagtacgctctgcggagaagaagcattggccgccagcccatagctcgtggcatgcgaccccgtcgcagctacaaggctccactctcccagaagattgccatccacaagcgcaatgtggtaatcgtatcagacgaggaggaaaacacctccgagtacagtcactcaccctccagccagcactcgacactagagagcaataccgacattgcggacatgaagaaaactcaggccacatccacctcaagcaacagctatagcgagcccgaagacgattcgagtgattccagcgatgaggagcagggaaaccggccgacggaagccaaggccgagggtccagctttgcctatgggcgccgtacgcagcagcgatattatatccatacctacttttgaggctgatggcgccgtcaatatggtctaa

SEQ ID NO: 41874 - protein, 977 aa, DROSOPHILA
MQPFSDSLSKSRDDLVTAASRQQQQLHGRRRHHGSSPNLSLDQTDNLRRSMACLQDEFGHLGIAATDLPFKSSDLDSPPRLQHHNNYAEITDSSAENTCQQRWPPHVGGAGAAFGHPDKPIGWMYGLLGCMKPVLSFIGKTGVIEVKSQRSEDWQIPFESITELEWLGSGAQGAVFSGRLKNETVAVKKVKELKETDIKHLRKLDHENIIKFKGVCTQSPVFCIIMEFCPYGPLQNILKEEQVMLPSRLVSWSKQIALGMQYLHSHKIIHRDLKSPNILISTNEVVKISDFGTSREWNEISTKMSFAGTVAWMAPEVIRNEPCSEKVDIWSYGVVLWEMLTCEIPYKDVDSSAIIWGVGNNSLKLLVPSTCPEGFKLLVKLCWKSKPRNRPSFRQILSHLDIAGPELLRKTEKQYFETQKSWKEEVRSHLKEITQNGTNIHKYEQDLIKRRTAEWRHAQDIRMVYEDKLQKTNQLFFELSECMSQLQEKEKEIAERERKLPGSGYKPNRRFGNTIRKMQHYRRRLNPAPAAIQQQSTTPDPETTPESPVKCMLYAQLDSNCQPKSYLANIIPSSGLGAPMPNKNKKVFRHRRNASGSFGAPPKYSPTRDRRYQSEPENRKVQLVERQTQTDAMDVSETDISPSAEAPRSQPIDVPVPNHRQLPLQLQRVQKIAQAQARARSGSTSSAAGAVNPACPSNGNSLSTSELTYQDACSSPDQLIDDVMNSNERLDMTECCSDNENLERLGRKVIEFINENRLSIQSNTNSVSNADNGNGGASPLELRESGNSPCLSRCSSTHSKRRKHPLGDNPNGSSIGNANGESHEQDSWSDEEGETTDYKYALRRRSIGRQPIARGMRPRRSYKAPLSQKIAIHKRNVVIVSDEEENTSEYSHSPSSQHSTLESNTDIADMKKTQATSTSSNSYSEPEDDSSDSSDEEQGNRPTEAKAEGPALPMGAVRSSDIISIPTFEADGAVNMV

SEQ ID NO: 41875 - DNA, 7029 bp, DROSOPHILA
gttatcggtggctttaaattcgtaataaatctattgttgaataaaatattccattccccccgaaatttgaaaaatgagaatcgcatacaggcacatttcgagttaacattatttttatttttcatacaattcgtacaatgcctacctataattaatattaaatcgcaaaatattggctttacctagtgaaaagtacttagcatcctaatagccgataatataaatttctgtgaaacatttcgtatactttaggaataatatgtgtatatttgcgtgacttcctaaaggtgaaggttccggaacctacaaaaatatataaaatgattgtttgaactggttatcgtaacactaattaaggtagttctttgttacacgctagattatatatttctatacatatcggtcgagctgtatattaattatgaacaattaacgattctgaaaactaagaactcgttggggactgttcaagctttgcgaaataatagagatatttgtacatttatataaacctaatgatttaagcgatccgcattaataccaatcagcattaacacatcaaaaatatggatcgctctatatataattatagattctacttgtggattacaagaagattaagaacgaaaagatttcgattcccaagtatatttacaatttaaattgagctggcgctttgaaaaaattgaaaaaattaactattttaaagtagggggatgcaataaatttgtctagctgtgaccgatatgccgatgtgcccgagaccctataaactcattcgttccggcatgcccgattgaattgacgaactctatggactagtttcgcgttggtatatcataagaaattggcgcggcctacaacatcaatggccaatgacattgcgcagtggcaatgtcatacccatacgtatttgataacagctcgcataaattcttttgtgactatacagcgagtctgagaccttatctcagctctacagcaaccaaaacactcggcgctaggacttattactattgcagctattgacattgttattgttgtacaagtatggtataagattgggctcaatctccagctgctgcctgagtatcgagctcatgacgaactccgttgaaacgatatgacacttgggatttccgtgccgcgtgagatccgcacagagatgcatgtccgtgggacaggttactatgatgtaggaatcgggcgcttgcatgtgtgtttccgccacagatgcaccgcttctccgcttcggctccactttaccaccagacgattcaatcattcgtataatttcttcgcgagctgggaacacgtccggcgtcacatggaagtatttgccggcaaacagcgttgaacgagtgggggcgcacagcacggtattcagattgaactgcaggttctcgtccaccggtatgtgctgaatgcggtatggatctgtaggcacaaatttaccagctttggcactatcagcaatccagctcgacttcagcacataatcgacgtggcagcaggcctggattagcttgcatgtacgactctcgcgtgtcattaccaggtgagtggcatctgcagggctgtccaccacaattccacccaaaattctaaaaaaaaaaaaagggaaaagttaaaaaacgaaactaagaatacgttgtattatacttacaacacagcttttttaagagcctcggcatctgcgacctgggaaaatatgacctttggtggtttggtggtagttggatattctacgcagacaatttgctctggcagctgctcctgctggaatgcgttcatcttctggcgcttaagtttttgctcgttgccgtaaggatcggataagtgtcgcttgacccgttcgtgtgcctcctgagttagattgatgggcgccttccaagcagctgttaagaaacaaatcgtcaaatgattttacaatataatacgagtttagtttgtacttacttagcagatgagccaccagattgcattcgatgcggaagggagcgaccaagttgtactgctgatacttgggattctcatactgggagaggccactaaggttaccgatgcacacgtcgcttaaccaaagcgcattgaccatcggtatgttccactccttggcggcattaaacttgttgccctcgagctgcttgcacacgaccactgtgttcaccttggacagataggatgtgtagatggcaccgcactcctctgccatctgctgtagtctcacaacctcctcgccttcaaatccctcggaggttatgatgtagcgttctaggggcttacgatagccaaactggctggggaacggtaggtgcaacggctgccacggtggcatcagttggcgctttaagcaaatatcactcagccagtaggcagtgacgcagcgcttggcatcccgcaacgcctgcatcaccacgccatgacgctgagtgcgacaaataacatgggttactcgggggcagtaaacacgttcgatgtcaccgccaaactgtctaatcgtatctagccaaatgggcagttcatcaccgtctgtttcatcgtattccacaatgtagaacgtacagcccaccaaaaagagatcggctggtaactttaggttcggattgtgcccgtagaactgcggcatagggatcggttgctgaccaggacgagtttgaatgtagccgtgaggagtccgctgcactggcacacccacgcccactcccacagccatctgttgctgctgctggggggactgtgtcggagcgactacgatctgttgttggactagatgttgctgcggtgcctgctgctgttgtggcagggcgacaactctgcgcatttgctgctgttgcagcagttgttgttgctgctgttgctgcaacatgagcaactcctgctgagttcgcggtggtccaggaactccggctgttgcgttatgttgctggcccatcattctaagagcaccagctgccgacggtggctcgacgtgttgctgtggtggtaattgctgttggacaaccatttgttgttgttgctgctgctgctgttgctgttgtaatagtaattgttgctgctgctgctgaatggctccggtcaccaccacctgttgtacaatctgctgttgctgtggctgctgtccatcgggaagttgaattatttgctgttgtggtgtttgagctccattatttcctaagcgattgctcaacatgttggccagggctgtcttcgttttgaggttcatttgctgcggtgattgttgcggctgtccatcgggagctgtgcaaaaggaattggttactatgtgcattgtcctttttttaatgattaaagatgattcgtataattgtaaaagtcactgtagcagacaaatgcatttacttactcgttgatgtcatgaccaaagtttgcgtcattatgttggcatttccgggaagaacacctcctgctcctggagttgtaggtgtgcctggtgcggactgctgctgcggctgttggacgatggtctgttgttcaatcagctgaccattgggtccggtgataagctgcactgtttgcttgcccagctgctgaggtccctgttgctgaatgggaatctgctggactcgcaactgctgccgctgcatcagcatttgctggttgggatcattggggttgaagggctgctgttgaggagactgctgctgttgctgtggtcccgctcctggctgctgttgaatcggactcaagccaggtgttccggcgcgtacaacaacctgtcgttttccctgctgctgttgcagccagaggacttgttgctgctgtgttaatccgggtggcatttggtgttggacaataatgtgcccgggcggaaccggacctgccggtcgcgtcgctactatgctgcccggtgctccaggtcgcggctggtaggcaacctgttggcgaagcattactcgaggtttgttctgctgattcaacttagtaatatattcggctcttttgtgagcatccaatgacatgaggtgtgcatgcgttttttcgtccaccacgattttttgttgctgtggctgttgcattaccaactgttgttgctgaccaagatgctgttgctgctgctgcggctgttgttgttgcggtggcggcagcacgatctgttgctgttgttgagtgggttgaggctgttgctgttgaggctggccgggccaagaggtttgcggccgcaatccacgcggaacaaattgctgctgaggctgcggctgcggcgttgttggtccaccgggcaggggtgattgcatcccaacactggtgggtgtgcctggagtgctggacgccatttgaccgccagcaggactttgcggtgaccaatgctgctgctgcatttgtggatggtgttgtggagactgctgttgttgctgaagcaacaactgttgttgttgctgctgctgcggaggcggcgtgcgttgaggcagttgttgctgcgtgataagctgcattatttgttgctgctgattatcgttggacagtttttgctgcagtatctgctgttgttggggcgtttgctgctgttgtataaggatttgctgttgttgttgtcccactagctgttgttgttgttgctgctgctgctgctgttgttgttgttgctgttgttgctgctgctgttgctgtttttgcattaactgctgttgttgtaggtactgcaagcgctgtggatcactgagtatttgctggttaacaacaatctgctgcggctgctgctgcatttgcatcctctgctgttgctgctgttgtggtataatctgctgctgctgcaacatttgttgttgctgcacaagttgctgttgtgtctgattgaccacgtaaacgttttggctctgcggattttgggctaggatttgctgttgctgttgtacgctaagctgattaaagtgctgctggctaattataaaggtcttttgttgctgctgctgttgttgtggctgctgaactccagaaatttgctggtgtgaatcaaacgaaaatttattggggtaaatatttaaaaaaaaagacaaaaaactaagagtaggcatacctgctgtggttgttgttgcagctgctgttgctggggaaattgaccaataatctgctgttgttgttgttgtggaacctgctgctgttgctgaacattggttggtggacgttgtatggtttgttgaattatccgcacttgaccaccagctccaagtgctatttgctgctgttgtgtaaactgaacttgttgcggttgttgttgttgaacttggtgctgttgcggaagctgttgctgctgctgtgccggtggcagttgctgcacttgagtaatctgttgttgctgctgcggctgctgttgtgcttgttgttgaacgtgcaacaattgctgctgcttctgcaaggccaaagacatatgactttgaatgatttgttgtccttgagccgtggatgtgtttataacatggcgctgagtgatgacttgttgctgttgtccaggctgtggctgttgctgcgtcaggacctgctgttgttgctgctgctgttgttgttgctgctgctgctgctgttgttgttgttgttgctgctgtatttgctaaaaagaagtaatcattaatttccggtaaaaaataatatatgttctttattttacttgagcgttttgttggtttggctgctgttgcaaggtgggggtagtaggttgctgttgcagtggcgattgtcgcggagaaggggtgtgctgctgttgtggttgctgctgctgctgctgttgcggttgctgtgccatttgctgctgctggggctgcggtgccatttgttgttgctgttgcatctgttgttgctgcttcaattgttgctgcctcattatcaacgagtcctgattgctgctcaatgcagatcgactgagcacttgagctacctgaacggggtccgttgggtcgataggcttctgctgggagaatgattgctgcggctgagtggcttgtccaggaaccacctgatgctgatgcagctttgcctgcatgggtggagtttgagaaatctggggcgattgcggagaaatatgctggggactctgctgttgctgttgttgctgctgttgggccaattgttgttgctgctgcaattgcatgcgctgctgttgatggacgggctgttgaaagggctgcatctgttgctgctgttgcggcgacatcatagattgtggttgaggttgttgtggcgagcccatcatgtgctgttgtcgattctgttgcatttgctgttgctggcgcaaatgttgttgctgggcgttttgcggcgagggcggaggtggcggagtcatttggggagctggggattgcagttgtcgcggcgattgtggcggcaacatattgctagttgcatgatgctgctgttgctgcaacgatggggatggcgtacttggtggcattaccggcgaacggttttgcaccatccgaggcgactgttgttgttgtagattctgttgctgttgttgctgctgcatttgcatctgtaattgctgctgctgctgcataacttgttgcagctgttgttgaatttgtctctgttgctgctgctgttgcggcgtcaatgcttgtccgctttgcacgatttgctgcaattgcatttgattctggttcaaaatttgttgctgccgcattagatgttggtgtatgatttgcggcgaaaccggcacagattgttgttgtggctgctgttgctgaacaacttgctgctgaacaatttgctgttgctgaactatctgctgctgctgtaccatcgtttgctgctggcccacttgttgctgcaccacctgttgctgttgaactatctgctggtggtgctgaggggattgcacgggctgcggcgttgtagatggtgtacgtggtgtctgccggcctgttggagtcgttggcagtcggggcgactgctgttgctgaggaatttgttgtggatgttgttgagaaagttgctgtggaagttgctgtgcgatttgttgcgggtgttgttgcgcaagctgctgttgaagtggttgaggatgcgggctgttgc

SEQ ID NO: 41876 - DNA, 5397 bp, DROSOPHILA
atggtacagcagcagcagatagttcagcaacagcaaattgttcagcagcaagttgttcagcaacagcagccacaacaacaatctgtgccggtttcgccgcaaatcatacaccaacatctaatgcggcagcaacaaattttgaaccagaatcaaatgcaattgcagcaaatcgtgcaaagcggacaagcattgacgccgcaacagcagcagcaacagagacaaattcaacaacagctgcaacaagttatgcagcagcagcagcaattacagatgcaaatgcagcagcaacaacagcaacagaatctacaacaacaacagtcgcctcggatggtgcaaaaccgttcgccggtaatgccaccaagtacgccatccccatcgttgcagcaacagcagcatcatgcaactagcaatatgttgccgccacaatcgccgcgacaactgcaatccccagctccccaaatgactccgccacctccgccctcgccgcaaaacgcccagcaacaacatttgcgccagcaacagcaaatgcaacagaatcgacaacagcacatgatgggctcgccacaacaacctcaaccacaatctatgatgtcgccgcaacagcagcaacagatgcagccctttcaacagcccgtccatcaacagcagcgcatgcaattgcagcagcaacaacaattggcccaacagcagcaacaacagcaacagcagagtccccagcatatttctccgcaatcgccccagatttctcaaactccacccatgcaggcaaagctgcatcagcatcaggtggttcctggacaagccactcagccgcagcaatcattctcccagcagaagcctatcgacccaacggaccccgttcaggtagctcaagtgctcagtcgatctgcattgagcagcaatcaggactcgttgataatgaggcagcaacaattgaagcagcaacaacagatgcaacagcaacaacaaatggcaccgcagccccagcagcagcaaatggcacagcaaccgcaacagcagcagcagcagcaaccacaacagcagcacaccccttctccgcgacaatcgccactgcaacagcaacctactacccccaccttgcaacagcagccaaaccaacaaaacgctcaacaaatacagcagcaacaacaacaacaacagcagcagcagcagcaacaacaacagcagcagcaacaacagcaggtcctgacgcagcaacagccacagcctggacaacagcaacaagtcatcactcagcgccatgttataaacacatccacggctcaaggacaacaaatcattcaaagtcatatgtctttggccttgcagaagcagcagcaattgttgcacgttcaacaacaagcacaacagcagccgcagcagcaacaacagattactcaagtgcagcaactgccaccggcacagcagcagcaacagcttccgcaacagcaccaagttcaacaacaacaaccgcaacaagttcagtttacacaacagcagcaaatagcacttggagctggtggtcaagtgcggataattcaacaaaccatacaacgtccaccaaccaatgttcagcaacagcagcaggttccacaacaacaacaacagcagattattggtcaatttccccagcaacagcagctgcaacaacaaccacagcagcaaatttctggagttcagcagccacaacaacagcagcagcaacaaaagacctttataattagccagcagcactttaatcagcttagcgtacaacagcaacagcaaatcctagcccaaaatccgcagagccaaaacgtttacgtggtcaatcagacacaacagcaacttgtgcagcaacaacaaatgttgcagcagcagcagattataccacaacagcagcaacagcagaggatgcaaatgcagcagcagccgcagcagattgttgttaaccagcaaatactcagtgatccacagcgcttgcagtacctacaacaacagcagttaatgcaaaaacagcaacagcagcagcaacaacagcaacaacaacaacagcagcagcagcagcaacaacaacaacagctagtgggacaacaacaacagcaaatccttatacaacagcagcaaacgccccaacaacagcagatactgcagcaaaaactgtccaacgataatcagcagcaacaaataatgcagcttatcacgcagcaacaactgcctcaacgcacgccgcctccgcagcagcagcaacaacaacagttgttgcttcagcaacaacagcagtctccacaacaccatccacaaatgcagcagcagcattggtcaccgcaaagtcctgctggcggtcaaatggcgtccagcactccaggcacacccaccagtgttgggatgcaatcacccctgcccggtggaccaacaacgccgcagccgcagcctcagcagcaatttgttccgcgtggattgcggccgcaaacctcttggcccggccagcctcaacagcaacagcctcaacccactcaacaacagcaacagatcgtgctgccgccaccgcaacaacaacagccgcagcagcagcaacagcatcttggtcagcaacaacagttggtaatgcaacagccacagcaacaaaaaatcgtggtggacgaaaaaacgcatgcacacctcatgtcattggatgctcacaaaagagccgaatatattactaagttgaatcagcagaacaaacctcgagtaatgcttcgccaacaggttgcctaccagccgcgacctggagcaccgggcagcatagtagcgacgcgaccggcaggtccggttccgcccgggcacattattgtccaacaccaaatgccacccggattaacacagcagcaacaagtcctctggctgcaacagcagcagggaaaacgacaggttgttgtacgcgccggaacacctggcttgagtccgattcaacagcagccaggagcgggaccacagcaacagcagcagtctcctcaacagcagcccttcaaccccaatgatcccaaccagcaaatgctgatgcagcggcagcagttgcgagtccagcagattcccattcagcaacagggacctcagcagctgggcaagcaaacagtgcagcttatcaccggacccaatggtcagctgattgaacaacagaccatcgtccaacagccgcagcagcagtccgcaccaggcacacctacaactccaggagcaggaggtgttcttcccggaaatgccaacataatgacgcaaactttggtcatgacatcaacgactcccgatggacagccgcaacaatcaccgcagcaaatgaacctcaaaacgaagacagccctggccaacatgttgagcaatcgcttaggaaataatggagctcaaacaccacaacagcaaataattcaacttcccgatggacagcagccacagcaacagcagattgtacaacaggtggtggtgaccggagccattcagcagcagcagcaacaattactattacaacagcaacagcagcagcagcaacaacaacaaatggttgtccaacagcaattaccaccacagcaacacgtcgagccaccgtcggcagctggtgctcttagaatgatgggccagcaacataacgcaacagccggagttcctggaccaccgcgaactcagcaggagttgctcatgttgcagcaacagcagcaacaacaactgctgcaacagcagcaaatgcgcagagttgtcgccctgccacaacagcagcaggcaccgcagcaacatctagtccaacaacagatcgtagtcgctccgacacagtccccccagcagcagcaacagatggctgtgggagtgggcgtgggtgtgccagtgcagcggactcctcacggctacattcaaactcgtcctggtcagcaaccgatccctatgccgcagttctacgggcacaatccgaacctaaagttaccagccgatctctttttggtgggctgtacgttctacattgtggaatacgatgaaacagacggtgatgaactgcccatttggctagatacgattagacagtttggcggtgacatcgaacgtgtttactgcccccgagtaacccatgttatttgtcgcactcagcgtcatggcgtggtgatgcaggcgttgcgggatgccaagcgctgcgtcactgcctactggctgagtgatatttgcttaaagcgccaactgatgccaccgtggcagccgttgcacctaccgttccccagccagtttggctatcgtaagcccctagaacgctacatcataacctccgagggatttgaaggcgaggaggttgtgagactacagcagatggcagaggagtgcggtgccatctacacatcctatctgtccaaggtgaacacagtggtcgtgtgcaagcagctcgagggcaacaagtttaatgccgccaaggagtggaacataccgatggtcaatgcgctttggttaagcgacgtgtgcatcggtaaccttagtggcctctcccagtatgagaatcccaagtatcagcagtacaacttggtcgctcccttccgcatcgaatgcaatctggtggctcatctgctaactgcttggaaggcgcccatcaatctaactcaggaggcacacgaacgggtcaagcgacacttatccgatccttacggcaacgagcaaaaacttaagcgccagaagatgaacgcattccagcaggagcagctgccagagcaaattgtctgcgtagaatatccaactaccaccaaaccaccaaaggtcatattttcccaggtcgcagatgccgaggctcttaaaaaagctgtgttaattttgggtggaattgtggtggacagccctgcagatgccactcacctggtaatgacacgcgagagtcgtacatgcaagctaatccaggcctgctgccacgtcgattatgtgctgaagtcgagctggattgctgatagtgccaaagctggtaaatttgtgcctacagatccataccgcattcagcacataccggtggacgagaacctgcagttcaatctgaataccgtgctgtgcgcccccactcgttcaacgctgtttgccggcaaatacttccatgtgacgccggacgtgttcccagctcgcgaagaaattatacgaatgattgaatcgtctggtggtaaagtggagccgaagcggagaagcggtgcatctgtggcggaaacacacatgcaagcgcccgattcctacatcatagtaacctgtcccacggacatgcatctctgtgcggatctcacgcggcacggaaatcccaagtgtcatatcgtttcaacggagttcgtcatgagctcgatactcaggcagcagctggagattgagcccaatcttataccatacttgtacaacaataacaatgtcaatagctgcaatagtaataagtcctag

SEQ ID NO: 41877 - protein, 1798 aa, DROSOPHILA
MVQQQQIVQQQQIVQQQVVQQQQPQQQSVPVSPQIIHQHLMRQQQILNQNQMQLQQIVQSGQALTPQQQQQQRQIQQQLQQVMQQQQQLQMQMQQQQQQQNLQQQQSPRMVQNRSPVMPPSTPSPSLQQQQHHATSNMLPPQSPRQLQSPAPQMTPPPPPSPQNAQQQHLRQQQQMQQNRQQHMMGSPQQPQPQSMMSPQQQQQMQPFQQPVHQQQRMQLQQQQQLAQQQQQQQQQSPQHISPQSPQISQTPPMQAKLHQHQVVPGQATQPQQSFSQQKPIDPTDPVQVAQVLSRSALSSNQDSLIMRQQQLKQQQQMQQQQQMAPQPQQQQMAQQPQQQQQQQPQQQHTPSPRQSPLQQQPTTPTLQQQPNQQNAQQIQQQQQQQQQQQQQQQQQQQQQQVLTQQQPQPGQQQQVITQRHVINTSTAQGQQIIQSHMSLALQKQQQLLHVQQQAQQQPQQQQQITQVQQLPPAQQQQQLPQQHQVQQQQPQQVQFTQQQQIALGAGGQVRIIQQTIQRPPTNVQQQQQVPQQQQQQIIGQFPQQQQLQQQPQQQISGVQQPQQQQQQQKTFIISQQHFNQLSVQQQQQILAQNPQSQNVYVVNQTQQQLVQQQQMLQQQQIIPQQQQQQRMQMQQQPQQIVVNQQILSDPQRLQYLQQQQLMQKQQQQQQQQQQQQQQQQQQQQQQLVGQQQQQILIQQQQTPQQQQILQQKLSNDNQQQQIMQLITQQQLPQRTPPPQQQQQQQLLLQQQQQSPQHHPQMQQQHWSPQSPAGGQMASSTPGTPTSVGMQSPLPGGPTTPQPQPQQQFVPRGLRPQTSWPGQPQQQQPQPTQQQQQIVLPPPQQQQPQQQQQHLGQQQQLVMQQPQQQKIVVDEKTHAHLMSLDAHKRAEYITKLNQQNKPRVMLRQQVAYQPRPGAPGSIVATRPAGPVPPGHIIVQHQMPPGLTQQQQVLWLQQQQGKRQVVVRAGTPGLSPIQQQPGAGPQQQQQSPQQQPFNPNDPNQQMLMQRQQLRVQQIPIQQQGPQQLGKQTVQLITGPNGQLIEQQTIVQQPQQQSAPGTPTTPGAGGVLPGNANIMTQTLVMTSTTPDGQPQQSPQQMNLKTKTALANMLSNRLGNNGAQTPQQQIIQLPDGQQPQQQQIVQQVVVTGAIQQQQQQLLLQQQQQQQQQQQMVVQQQLPPQQHVEPPSAAGALRMMGQQHNATAGVPGPPRTQQELLMLQQQQQQQLLQQQQMRRVVALPQQQQAPQQHLVQQQIVVAPTQSPQQQQQMAVGVGVGVPVQRTPHGYIQTRPGQQPIPMPQFYGHNPNLKLPADLFLVGCTFYIVEYDETDGDELPIWLDTIRQFGGDIERVYCPRVTHVICRTQRHGVVMQALRDAKRCVTAYWLSDICLKRQLMPPWQPLHLPFPSQFGYRKPLERYIITSEGFEGEEVVRLQQMAEECGAIYTSYLSKVNTVVVCKQLEGNKFNAAKEWNIPMVNALWLSDVCIGNLSGLSQYENPKYQQYNLVAPFRIECNLVAHLLTAWKAPINLTQEAHERVKRHLSDPYGNEQKLKRQKMNAFQQEQLPEQIVCVEYPTTTKPPKVIFSQVADAEALKKAVLILGGIVVDSPADATHLVMTRESRTCKLIQACCHVDYVLKSSWIADSAKAGKFVPTDPYRIQHIPVDENLQFNLNTVLCAPTRSTLFAGKYFHVTPDVFPAREEIIRMIESSGGKVEPKRRSGASVAETHMQAPDSYIIVTCPTDMHLCADLTRHGNPKCHIVSTEFVMSSILRQQLEIEPNLIPYLYNNNNVNSCNSNKS

SEQ ID NO: 41878 - DNA, 6759 bp, DROSOPHILA
gaactcctggccgcggtaggagcaggtaagcagaacaatggtaacgcccaccgcatccggttccgggatcttgctgacgtctggcggatccgcctggaagacaaagatgtgtcgcccctcaggcacaggtcccacgtatatggtgtccagcacctggtcgtgctcctcggactccgccgagcctacatagatcatcttccactctagatcctcttttagctcctcaatgcactcgaacgtgagttcgaactgaaaggggttgaagaagctgctcgggttgtccagcaccaccacgttggtgatgtgcaccttggccatgactgtacctcggagattgcagagcgtagaccgatattttaaagactccttcgactgcgcgctttttttagaggttctgcttttgtccgactagggaattgctttgcgaaattcacctgcaaaacgctcagcaaatacttgatatatgtactgtaatgctagtagtttgttttggttacaacatgaatcaggtttgtgcaattgtctgtcgctattctgcttttatttatcgcaattattccgcttgtcttcgcacaaatggtgacagctgacttctttcccgcgcttcagagggaccgttcggtgtcgcaagtggtggcgaaaaactcaccacgacaagtggcggaatgtcaaaacgcgacaatagttcgattggtgaacgagtttacaagatctaaaaaatactaataataatttcgtttcgttacaactggcctttacacgaattaacgataaaaaaaaacctagatgctgtagtttcagcggcattacggaatggtttacaaaaaatacacatatgacaaaataatgatcttcagaaaaaccaagtcaaataaaaattggaacatatattttctgattggaagagcgatcgatatctgcgcaaaaaacagctgtcgactttctgccagtaacgatagtttcgatacaaacttgcatcaagtgccatctccagctgctccctgcaattgttgtgtggtgttctgtattttctttgtaaatagttggagtaatgctgcacctgacgggccagagttacaatgctcgcgacatcatccggaacatcttctcgccgctgatcggcgtgctgtccagtccacaggcggacgagatttgccaccggaacaacctctccttcgtggaactcctgcagccgttcgcaaagttgccaaatgatggtgagtgaatgggatagtgaatggtttgtgtgtaagggggcgtgcgggtgaggtaaacaaggcatagacgcggctaagaaaataggtcttttctatggaactttcaaccgattcgacatggttatttaacattttgcatacaaagtagttgtttaagggttgttatggtgtggatgacatgtttaaagctcagaagttggtaaacgttgattctaacattgttgataataaacttaaattgccaacaaattctaaatggccaaaaattaaatgcatttgtactcctttctttagcacactttcgcgacgtgtccggaacgagtgtatcggtgcgtggactccgtctcaatttctgtgatgtggactggcggccgccgcaaacaattttggccaggaagatgctcaacgagtctgtgaccaacgcccataatgacaaaaccagactggccaccataggtaagggtttaagcgatgcaaaaatgtcttttggtaactcatttaccattctcccatagctggcatagaccttgagttacccacatcggaaccatggttcgagcagtggcgtgagacctttttaactgtgcaatttccggcggatcatgagttcacccgccatctattaagttgtttgctagtgctatccagcgcagatccccagatcgtggagaccgcccacaaactgggacaacgtgtgcagcagatgcagagcatcacgccccaaaaactgcccaagtggttccatcccaccgaggtcctcaatagttacgtagtgctgcacgaggctagccagggagacttgtccaaagcacagcagggattcgagctgctcaaatccacgttcggagacagcaagtgttttttggtgtcgatcaactcgatggattctcagggtgcagctgaggttccagatcactgggcaacgtttattaaaagacagcctaaaagtgatccaaatctaccctccactgatcttagtgcaccgaaatcgccacaggaagcggtttctgtaataagtatgcctgctatgcaaatgtcacagctcctggaaggagtcagtgctcaagatagcgatctggccatgcttcatccgctgagtcccatgcaggaaagcgccacagaggcgattaattcgaaatttagcatcagcagcgagagtattgcctctcaaacaatcaatcccaatgtttggggaaatgaattagaggcggatgcacctcacggcggatgtcttaccagtcgagacattgacaacctacgacactttgtgcaggactatgctgttcgagctttgattccctatatcgagcatctggtggctattctcgccgagggagtgacgaacaaaaagggtgtcagcaagtcgctattgagcgctacgaaacgatggtttgtcactagcaagccgggagcaggagcaaacaatcaaaatgcagtcatgtaagatttattttgttcccatttttaaattttaatgttaaaccgctttgttcacagctacaccaatgaatctgcggagctccaaacacgaaagttgggcgatctctacttcatgtttggtcactacaatttagctttccaatcctaccaccaagccaagcgagacttcaatgcggattcagcttggcaatactatgcgggagccctggaaatggctgccctatccgccttcatgctgggtactgctcaaagaaagacatatgactacatggaggatgcaattgtgtgttatctcacagtgtgcaagtaagttaactgtgggatttgtttaccagcttttctattattttgtttttacagattgcagcaatttgcgaccagagctacgctcctaagcatggaatgtttaaaaacagcacgactatatagtgaagtagccaagcaattgattcgcatgaccaacgaggaatcagatcttcgctcagccctcttgctggagcaggcagcctactgttttctggtgacccaaccgccaatgcacaggaagtatgccttccatatcgtgctggccgggaatcgttattcccgagctggccaaagaaagcatgcataccgttgctatcgccaggcctatcaggttttccaaaagcgtgagtggagcttggctgaggatcacattcaatatacggtggccaagcaggcctacatgctgaaacaacttgaggaggccagtcgatctttcgcccatttactgagacctggaagccttcaaagtgcacagcagcagaccagtttcttaaaggagtacattcagactcagaatgtaagtttgtaaaatacttttttcatacaatttgcctttattaaatactattttattaaactattgcaaattcaactactaatatatttttcaggaactggttaagcgaagtcctgagctgggattactaccacatgccttaccccaagtagtgcaatcttccgttcgtgttcttactttagtgcaatcaccgtcggctgtggcacctcatgtgccggcgactaacatagacatcaactcaaatctgactgcagatgagcccatttggaacaagattgaagagatgcttgtgatcactgctgccaataataagccctttgtctttaaaccctcgagatatttgtacactaaacagcagcctgcattggaaactccagttgccgtgcaaggtgaacccattgagcttgctgtaaccctctcaaatagcgttcaatgtagaatagccctatccgagattgaccttctgtggaaactcacactggacaatgatgaggtgctctccaacgcctgtacgtatgaggaatcatcggatagtgctaataaaatagcagtaggagcagcaatcaaaacgagctgcatggcttccatcaaattggccgaacaggccgaagaaactttacactttaagctgactccaaagttgaccggacgtctgagtattttgggagtcgtttgtcgagtagcagccggtgcggatcctgcagccagtctcctgggtaccttacagtttgaaacccaaaagatcaggcctcacaatgccaagcaatcatcgcagaccgttatggacaacagattaactatcaaactggttccccaactgcccgccatgaatgtaagctttactcccgttcccaatcgactgttggctggtgaaattgttcccgttcatgtaactcttcggaatatgggaattgctccgattgaagagatctatttgggatgcgataacccgcgctgtgtgtcccttttggatcagcacagccaaatgccactggctatgatgagttgtgagtaaataatacatttcattattgaatatttgttttcattttacattgtttgtaaagctcttcgcaatctttccaatgacaagctagtaaaggataaggaaattcgaggacagcgagtatatcgattacttaaccggcctgggctggctgccttagacgcccagcaagttcaaaccatctccttgtgggtgcaggctccacaccaggcgggaccctttaccttacgccttctattttattactcattgccaacggtggcaaattcacccattaaatatcgattggttcggcatatttggcagctgcaggtagagagttgcctgcaggcagactccacttgtgtggtcagcaatgcggttactaatgaattgggactagatgtgaacgttaggaaccaacatgcagtagagggaacggaagtgtacatcaactctatttcattgtactccacggaatttaagttgaatcccgataggttacacagtaagttaattaataataatacgatttttaaaagatgcaattatttatatattgatatgaacttatgtagtttctttcaaaacgtttcactaatataagagatttttaattaatatttatttttttacagtaatgaacagtatgggagtcagcccgggacaggctggagcacagtgcctcaagtcttccatttgctgcaattttcagtgccgccttctcgagaaagaaacacaagaagaatataaagacattccatcgattaaaacattgcttcattcgcgactttcccatttaaagatcctgcctgcccagcacgctcagcaagtggagcagcacatgcctccgatacacgacccgcacagctttctcaccaacgaagagacggtgtatttcaataccaacatctccacggaagagttcaacgcaagtgtagctgactatgtaccgcacgccacattggtcctaagttggagcgccctagtagctagggaggaggggcagcgcttggcctgtggcctgcacttcataaagctttacaaactatttgagactggccactgtccagcggcgccaacagcttctttcctacgaagaagacattcctctgacgacaccttagataaccgacgggagtttccactacctgagggagcgctaaataatgaggatgcttggcagcccctggcggatgctgatgaagaagactactgggagcccaatgaaaactatgtgggccaacggtgtctactggaggatgagagctttgtaatggcagttaaagcttaagatgtttgtcaagtggtgtcattaaattatatgttatcgtctatcagttatgatatgctaaaaatggtattgtcatttcattgagtttaagtttaaaaaatttgtaagctttttgcccctctgcatgtgaaaatgtatatttcacgggcaaaagtaccctattccttgattaagaagctgcgcataaaacaaataagtcctgattgggaaagtaattaggtgttatggtttataagccgtctttggttaaattcataatttgttagtttattattgattgatttaaaaagaattcattaataatccacgctagtaatatgattaaacatgtaacattaaagtggtaattgctttttggtagttcctaagctgctgactagacgggatgatgacgtggttcttagtggatgagtggatttcagtggcagcgcaacgtaataatcttggtggcagaatgaagagttttattattagatttaagtgcgtttcttggtcatgtaaactcgagctgtggcgtagaggacatgcgtacaagcgtatatattgcccagagcgcttcccagcagtgctccgatcacgttgggaatgggataagcctgccagtcacgtccccagtctagtggagcgaccacgctcccggcccaagctcccagaataccgcccagtgcattgtacttgaacagattcagagccgtgtcctcgcacttggtcacaaagtccggtttctcgcagaagcacacttgtagtgctcctccgccaccgaggaggaaaaccgtgggtgacaccgtcaacaaggtcatcagtaaggccaagacgaaggtctgctcatagttgcccagcaccggggctcccaaaattatgcagataaaggcgtagaggagtgtacacaggaactgcagggtgaatcctccgaggagctcccgcggcgtaaagtacgagttctttttctggcgctgtttggcggttaggacgccatcctcaaccttcccgtagaagcgag

SEQ ID NO: 41879 - DNA, 3708 bp, DROSOPHILA
cctgcaattgttgtgtggtgttctgtattttctttgtaaatagttggagtaatgctgcacctgacgggccagagttacaatgctcgcgacatcatccggaacatcttctcgccgctgatcggcgtgctgtccagtccacaggcggacgagatttgccaccggaacaacctctccttcgtggaactcctgcagccgttcgcaaagttgccaaatgatgcacactttcgcgacgtgtccggaacgagtgtatcggtgcgtggactccgtctcaatttctgtgatgtggactggcggccgccgcaaacaattttggccaggaagatgctcaacgagtctgtgaccaacgcccataatgacaaaaccagactggccaccatagctggcatagaccttgagttacccacatcggaaccatggttcgagcagtggcgtgagacctttttaactgtgcaatttccggcggatcatgagttcacccgccatctattaagttgtttgctagtgctatccagcgcagatccccagatcgtggagaccgcccacaaactgggacaacgtgtgcagcagatgcagagcatcacgccccaaaaactgcccaagtggttccatcccaccgaggtcctcaatagttacgtagtgctgcacgaggctagccagggagacttgtccaaagcacagcagggattcgagctgctcaaatccacgttcggagacagcaagtgttttttggtgtcgatcaactcgatggattctcagggtgcagctgaggttccagatcactgggcaacgtttattaaaagacagcctaaaagtgatccaaatctaccctccactgatcttagtgcaccgaaatcgccacaggaagcggtttctgtaataagtatgcctgctatgcaaatgtcacagctcctggaaggagtcagtgctcaagatagcgatctggccatgcttcatccgctgagtcccatgcaggaaagcgccacagaggcgattaattcgaaatttagcatcagcagcgagagtattgcctctcaaacaatcaatcccaatgtttggggaaatgaattagaggcggatgcacctcacggcggatgtcttaccagtcgagacattgacaacctacgacactttgtgcaggactatgctgttcgagctttgattccctatatcgagcatctggtggctattctcgccgagggagtgacgaacaaaaagggtgtcagcaagtcgctattgagcgctacgaaacgatggtttgtcactagcaagccgggagcaggagcaaacaatcaaaatgcagtcatctacaccaatgaatctgcggagctccaaacacgaaagttgggcgatctctacttcatgtttggtcactacaatttagctttccaatcctaccaccaagccaagcgagacttcaatgcggattcagcttggcaatactatgcgggagccctggaaatggctgccctatccgccttcatgctgggtactgctcaaagaaagacatatgactacatggaggatgcaattgtgtgttatctcacagtgtgcaaattgcagcaatttgcgaccagagctacgctcctaagcatggaatgtttaaaaacagcacgactatatagtgaagtagccaagcaattgattcgcatgaccaacgaggaatcagatcttcgctcagccctcttgctggagcaggcagcctactgttttctggtgacccaaccgccaatgcacaggaagtatgccttccatatcgtgctggccgggaatcgttattcccgagctggccaaagaaagcatgcataccgttgctatcgccaggcctatcaggttttccaaaagcgtgagtggagcttggctgaggatcacattcaatatacggtggccaagcaggcctacatgctgaaacaacttgaggaggccagtcgatctttcgcccatttactgagacctggaagccttcaaagtgcacagcagcagaccagtttcttaaaggagtacattcagactcagaatgaactggttaagcgaagtcctgagctgggattactaccacatgccttaccccaagtagtgcaatcttccgttcgtgttcttactttagtgcaatcaccgtcggctgtggcacctcatgtgccggcgactaacatagacatcaactcaaatctgactgcagatgagcccatttggaacaagattgaagagatgcttgtgatcactgctgccaataataagccctttgtctttaaaccctcgagatatttgtacactaaacagcagcctgcattggaaactccagttgccgtgcaaggtgaacccattgagcttgctgtaaccctctcaaatagcgttcaatgtagaatagccctatccgagattgaccttctgtggaaactcacactggacaatgatgaggtgctctccaacgcctgtacgtatgaggaatcatcggatagtgctaataaaatagcagtaggagcagcaatcaaaacgagctgcatggcttccatcaaattggccgaacaggccgaagaaactttacactttaagctgactccaaagttgaccggacgtctgagtattttgggagtcgtttgtcgagtagcagccggtgcggatcctgcagccagtctcctgggtaccttacagtttgaaacccaaaagatcaggcctcacaatgccaagcaatcatcgcagaccgttatggacaacagattaactatcaaactggttccccaactgcccgccatgaatgtaagctttactcccgttcccaatcgactgttggctggtgaaattgttcccgttcatgtaactcttcggaatatgggaattgctccgattgaagagatctatttgggatgcgataacccgcgctctcttcgcaatctttccaatgacaagctagtaaaggataaggaaattcgaggacagcgagtatatcgattacttaaccggcctgggctggctgccttagacgcccagcaagttcaaaccatctccttgtgggtgcaggctccacaccaggcgggaccctttaccttacgccttctattttattactcattgccaacggtggcaaattcacccattaaatatcgattggttcggcatatttggcagctgcagtgccgccttctcgagaaagaaacacaagaagaatataaagacattccatcgattaaaacattgcttcattcgcgactttcccatttaaagatcctgcctgcccagcacgctcagcaagtggagcagcacatgcctccgatacacgacccgcacagctttctcaccaacgaagagacggtgtatttcaataccaacatctccacggaagagttcaacgcaagtgtagctgactatgtaccgcacgccacattggtcctaagttggagcgccctagtagctagggaggaggggcagcgcttggcctgtggcctgcacttcataaagctttacaaactatttgagactggccactgtccagcggcgccaacagcttctttcctacgaagaagacattcctctgacgacaccttagataaccgacgggagtttccactacctgagggagcgctaaataatgaggatgcttggcagcccctggcggatgctgatgaagaagactactgggagcccaatgaaaactatgtgggccaacggtgtctactggaggatgagagctttgtaatggcagttaaagcttaa

SEQ ID NO: 41880 - protein, 1218 aa, DROSOPHILA
MLHLTGQSYNARDIIRNIFSPLIGVLSSPQADEICHRNNLSFVELLQPFAKLPNDAHFRDVSGTSVSVRGLRLNFCDVDWRPPQTILARKMLNESVTNAHNDKTRLATIAGIDLELPTSEPWFEQWRETFLTVQFPADHEFTRHLLSCLLVLSSADPQIVETAHKLGQRVQQMQSITPQKLPKWFHPTEVLNSYVVLHEASQGDLSKAQQGFELLKSTFGDSKCFLVSINSMDSQGAAEVPDHWATFIKRQPKSDPNLPSTDLSAPKSPQEAVSVISMPAMQMSQLLEGVSAQDSDLAMLHPLSPMQESATEAINSKFSISSESIASQTINPNVWGNELEADAPHGGCLTSRDIDNLRHFVQDYAVRALIPYIEHLVAILAEGVTNKKGVSKSLLSATKRWFVTSKPGAGANNQNAVIYTNESAELQTRKLGDLYFMFGHYNLAFQSYHQAKRDFNADSAWQYYAGALEMAALSAFMLGTAQRKTYDYMEDAIVCYLTVCKLQQFATRATLLSMECLKTARLYSEVAKQLIRMTNEESDLRSALLLEQAAYCFLVTQPPMHRKYAFHIVLAGNRYSRAGQRKHAYRCYRQAYQVFQKREWSLAEDHIQYTVAKQAYMLKQLEEASRSFAHLLRPGSLQSAQQQTSFLKEYIQTQNELVKRSPELGLLPHALPQVVQSSVRVLTLVQSPSAVAPHVPATNIDINSNLTADEPIWNKIEEMLVITAANNKPFVFKPSRYLYTKQQPALETPVAVQGEPIELAVTLSNSVQCRIALSEIDLLWKLTLDNDEVLSNACTYEESSDSANKIAVGAAIKTSCMASIKLAEQAEETLHFKLTPKLTGRLSILGVVCRVAAGADPAASLLGTLQFETQKIRPHNAKQSSQTVMDNRLTIKLVPQLPAMNVSFTPVPNRLLAGEIVPVHVTLRNMGIAPIEEIYLGCDNPRSLRNLSNDKLVKDKEIRGQRVYRLLNRPGLAALDAQQVQTISLWVQAPHQAGPFTLRLLFYYSLPTVANSPIKYRLVRHIWQLQCRLLEKETQEEYKDIPSIKTLLHSRLSHLKILPAQHAQQVEQHMPPIHDPHSFLTNEETVYFNTNISTEEFNASVADYVPHATLVLSWSALVAREEGQRLACGLHFIKLYKLFETGHCPAAPTASFLRRRHSSDDTLDNRREFPLPEGALNNEDAWQPLADADEEDYWEPNENYVGQRCLLEDESFVMAVKA

SEQ ID NO: 41881 - DNA, 4902 bp, DROSOPHILA
ttgggcaaattaaggaaactttttgtggtttcagttactcgtttaagccacattttcccaacatatgctgcactttatgaattaaaagtcatttattttaggctgcacacacgttatgtttgcctgacaaattgcatttgctgaaattaaaacaaaatgcactgggacactgcgttatggcatgctgctaattagtcaccaacagcggctttcagcgaatgttggccaatcgcgagaatggctttcatccactgtctagactccagaccaaaaagcgaatttgtgcgccagataaacatcttaatggccagggattatgatgcagtgcccgctttttactgacagtaattagccagacgcccattgaaccctcttcttgataatccccacttgatccacactctttcaaaaaaaaaaaatgtattcattaaatgggaaaaaaatatttactgcaagagaaatgttattaatggatattgaaaaactgacattagataacagtttctattggactgctaacaaagtcggtcagctgtttaaaaaactgagatcgcttttatatttaaattgtataataaaaccattagggtatcaaccttaatatgtatttatatatcactgtactccaaatactatttacgcttaactatgtagattcattttatttttatcaaaagtccattctttttttattaaactccactttataaatgaaacaacggtcgaatttttgaactgagtacataactacatagtttattcgattacgtgcactataactataattcgaactatagctttgggctatattacggttattggtaaggacaaccatataattgaccccaaacgcggaatatttgtctaaattaaaacacaaacaagctggagtggcgcttgctgctcgtatcacagttgtgtgtgtgtgtaatgtacgtaggtggcactggaatggactacctcgcttatcgagtacagatagaggatatgctgaccccctttaaaaggcggcccgctcttcagtgtcgcctccattcaccgtcgcccccttttcgtgcggtttgtggctgcctttgcgtctggcacgccaattgaatttggtcctgagacccttgaacgggcttgagctcttgagcactttcactttcgccttgcgcactttgccactcgactcgtcaccgctcacgccccccgaccccgcggcccctgttgtgctgcctcctgccacgccccccgtcacacctcctggtgggcgggtgatgcgcgtaagtttaaggcgtgaccgcgagatggccaagtcatctgtgagctcgtcaatggagcacatcgtgggctggcgctgcagtggctccccgggaaactgcaaatcctcctccaagagggaatgggcatcgcccaccgatgacagctgcgatatttgcgtctggagcatgcgacgcggattatcgaagaggtcttgccggctgcgattctgaccctgcatctggacactgtccaaggacacgcggttcaggcgcaccgactgacccgttgtcgttccattgccactgccattggcagagccatttagcccagtggtggtcgtcgccatggaagtcattgtggtgcgaacgctgtcctgcaggaggaaatcaaggaatggagggataatcagaaagggaaagtgcagtcgccagacacgaaaataagtaacgcaataaacatcttatagtggttttaaaaagtctcgtgattcaaatttcattttgagaaacaggacatacactatattaatccttttcattttcctcttaaataatgccacataatagaatttaagtgcatatatcgaatgataattatgtaatttttctcagtgcactcaccgttgtgtgcagccgcagtgaacccgtttgattacgtcgaagagcgctgtaagtatgaggaagcccccttccctgatttttgccaccaagtccaaagtgtctagccaaagttacctaaaatgggattaaatacgttttttaattctagcttgaagtttaaaatcactaaattgaccgttaaagaatcgattaataaacttgtaacctgaagcttattttcaatttcctaacgcaagctatagaaatgaatatccggcagcgaaactcaccttaaaagcctcacgaaacttgtggctcatgatgttgtagagcagcgggttgatgcaagttgagaggaagtagagaacaccggacgtatagtcgaggatgctgaacacgtcgttgaaccactgggactcaatgcccgaggtggatccatagaccgccatcagccgctgggcgtgaaagggggcccagcagatgaagaaggccacggccaccgccactgggaaagttggataagggcgcctgatgcaaccatgagttatttcggatatttcatatcctgcttacccagcatccggatgactcgcgtttgggcgcttatcccccggtttacatcgtaacatcgcctgggaagcgcctgcaggagtcggctccgtttcaacttcaccccgatgaggacatagagcacgcagatggccgtcatgggtccgccaaagaacaggaagcccgacacagcaaacacatgggcaaaaaagtcgtttttcatctacagcaggcatttcacaaaaataatatatatgtgtattcgcatgcgatacgatatggttttggcttacagccacagccggaaggcaatggctgtaaatttgattgcctaaactgagtcgaacctcgtaagggattgtcgctgtttttatcatgctcttaaattttttgtaattcacaaaggctctctattcgaactttctatacggaaaacacataatgaatcaaaggatcaaaggaccggttctacgaatcaattaaccaggtaactcataactgggggacatacgattaagggtctcgcatcaatcatacgcaccgtgcacgatgttcccatgccctgcatcaccacggagaactgaatggcttggggcagggccagcaaaagggcagctatccagatggcaaatatgaactttacggcccgtgacaacttggacatcgtgtgctgcctgtatcgaaagcagaaccaattaagcaagtttggggcaaaatggaaatgggcagtggaaggaatgaaggttcccttacctgaacggatgacaaatggcaatatatcgttcgactgtgaacgcggtaatggttagaactgtcgcattggccgccgtttccgagagaacgctctccaatatgcagatgctgtcactgaaaggataattatccgggtgccagaggttatagaggtcctgcggcattcctaagaacataaatagcaaaatagcaaaatatatagtgtgattataaatatttaataatagctgaaattatagcctatagcctcaaaatgcaaatcgatttgagcatctgccgaatatctcactctacattttcttgtttatttacaaattttaatttaatatgcctcagttccatttattgtttgcactactgaactgaattaaattataattcaaaaaccatgaacattttagttttgcactcacctgagcataacaaaatcatgtcggatatagcgaggttaaacagataaaagttggtggccgtgtgcataaagttgttccgcgaaatgacaatgcatgtgatgaggttgcccaaaacgccggcgataaatatgagggcgtagcccacgcttagggtggccagcagtgaaagtggtgtcatcggggtcaccgtgggcaaaagctcctccggctccaggccctggagaaggctggtcaggttgtccgcggagatgttcagcacttgtgtcagatttaagagaaatttctcattgtgaaacagttgtagatcggttgccaggacaccggaactgttagtgggcagcattttgactgccatagggtgtgtgtctttgtgtgtgtgtatacgcactattattttcgaatttctttggaaatttcagacttctgcgtatgtattctcaatcgaagctttcgcttgcaaataatgttttcataacgccccttacgggggctcatcaatttcgacttaggccagagccactccacttgcaatctgttgtcatgagtgtgggattaaattatgtgtacggatgtgtgtgataaggtggaccctatgtgctatttaaataaaactatgtttttcaaaatttgttaaaatttaaataaaataatacaagacaaataacgcattttaacgaatttagtaataaaacaaattcaaacattaaggctttttactccagatttctaaattaccataaattatacatatacacaatttggttggtaagctgtgcgctttgtttagcttgctaaggtccaccttagagagcccgtcttaaagcgtgtttgtgtcctgtgtgtttacctggcatcctgggaaactggcaggcggcagtcaggcgtgtcctaggcgaaagaccaggatcagggcgagtggaagctgaaaattaatttgaattgctaagtggcatttagtcaaaatatttgtgtacactggatgaatttaaggatgttgctacaaggctgagaaggacaggcctgccgatccgtctcccacccaacaccaggtggcaaacgaatgaaacgagccagaagctcaaggtcaggtggtggataagacggataaggagacgacgatggcaaatggacaccgggtgacttaataacattaacatagtttcattccattcagatgatgagtgttttcggctgctgctgttctgctctgttctgttcacattctggctatacttttcgttattgttgctgctgaccgctgttgaccgtttttggacgttttcattatcattatcataaaaaagtttctacaatatatgcacaaccaaaagaatgctgtcgaa

SEQ ID NO: 41882 - DNA, 1788 bp, DROSOPHILA
atgctgcccactaacagttccggtgtcctggcaaccgatctacaactgtttcacaatgagaaatttctcttaaatctgacacaagtgctgaacatctccgcggacaacctgaccagccttctccagggcctggagccggaggagcttttgcccacggtgaccccgatgacaccactttcactgctggccaccctaagcgtgggctacgccctcatatttatcgccggcgttttgggcaacctcatcacatgcattgtcatttcgcggaacaactttatgcacacggccaccaacttttatctgtttaacctcgctatatccgacatgattttgttatgctcaggaatgccgcaggacctctataacctctggcacccggataattatcctttcagtgacagcatctgcatattggagagcgttctctcggaaacggcggccaatgcgacagttctaaccattaccgcgttcacagtcgaacgatatattgccatttgtcatccgttcaggcagcacacgatgtccaagttgtcacgggccgtaaagttcatatttgccatctggatagctgcccttttgctggccctgccccaagccattcagttctccgtggtgatgcagggcatgggaacatcgtgcacgatgaaaaacgacttttttgcccatgtgtttgctgtgtcgggcttcctgttctttggcggacccatgacggccatctgcgtgctctatgtcctcatcggggtgaagttgaaacggagccgactcctgcaggcgcttcccaggcgatgttacgatgtaaaccgggggataagcgcccaaacgcgagtcatccggatgctggtggcggtggccgtggccttcttcatctgctgggccccctttcacgcccagcggctgatggcggtctatggatccacctcgggcattgagtcccagtggttcaacgacgtgttcagcatcctcgactatacgtccggtgttctctacttcctctcaacttgcatcaacccgctgctctacaacatcatgagccacaagtttcgtgaggcttttaaggtaactttggctagacactttggacttggtggcaaaaatcagggaagggggcttcctcatacttacagcgctcttcgacgtaatcaaacgggttcactgcggctgcacacaacggacagcgttcgcaccacaatgacttccatggcgacgaccaccactgggctaaatggctctgccaatggcagtggcaatggaacgacaacgggtcagtcggtgcgcctgaaccgcgtgtccttggacagtgtccagatgcagggtcagaatcgcagccggcaagacctcttcgataatccgcgtcgcatgctccagacgcaaatatcgcagctgtcatcggtgggcgatgcccattccctcttggaggaggatttgcagtttcccggggagccactgcagcgccagcccacgatgtgctccattgacgagctcacagatgacttggccatctcgcggtcacgccttaaacttacgcgcatcacccgcccaccaggaggtgtgacggggggcgtggcaggaggcagcacaacaggggccgcggggtcggggggcgtgagcggtgacgagtcgagtggcaaagtgcgcaaggcgaaagtgaaagtgctcaagagctcaagcccgttcaagggtctcaggaccaaattcaattggcgtgccagacgcaaaggcagccacaaaccgcacgaaaagggggcgacggtgaatggaggcgacactgaagagcgggccgccttttaa

SEQ ID NO: 41883 - protein, 595 aa, DROSOPHILA
MLPTNSSGVLATDLQLFHNEKFLLNLTQVLNISADNLTSLLQGLEPEELLPTVTPMTPLSLLATLSVGYALIFIAGVLGNLITCIVISRNNFMHTATNFYLFNLAISDMILLCSGMPQDLYNLWHPDNYPFSDSICILESVLSETAANATVLTITAFTVERYIAICHPFRQHTMSKLSRAVKFIFAIWIAALLLALPQAIQFSVVMQGMGTSCTMKNDFFAHVFAVSGFLFFGGPMTAICVLYVLIGVKLKRSRLLQALPRRCYDVNRGISAQTRVIRMLVAVAVAFFICWAPFHAQRLMAVYGSTSGIESQWFNDVFSILDYTSGVLYFLSTCINPLLYNIMSHKFREAFKVTLARHFGLGGKNQGRGLPHTYSALRRNQTGSLRLHTTDSVRTTMTSMATTTTGLNGSANGSGNGTTTGQSVRLNRVSLDSVQMQGQNRSRQDLFDNPRRMLQTQISQLSSVGDAHSLLEEDLQFPGEPLQRQPTMCSIDELTDDLAISRSRLKLTRITRPPGGVTGGVAGGSTTGAAGSGGVSGDESSGKVRKAKVKVLKSSSPFKGLRTKFNWRARRKGSHKPHEKGATVNGGDTEERAAF

SEQ ID NO: 41884 - DNA, 5734 bp, DROSOPHILA
gttgggaatgggataagcctgccagtcacgtccccagtctagtggagcgaccacgctcccggcccaagctcccagaataccgcccagtgcattgtacttgaacagattcagagccgtgtcctcgcacttggtcacaaagtccggtttctcgcagaagcacacttgtagtgctcctccgccaccgaggaggaaaaccgtgggtgacaccgtcaacaaggtcatcagtaaggccaagacgaaggtctgctcatagttgcccagcaccggggctcccaaaattatgcagataaaggcgtagaggagtgtacacaggaactgcagggtgaatcctccgaggagctcccgcggcgtaaagtacgagttctttttctggcgctgtttggcggttaggacgccatcctcaaccttcccgtagaagcgagccaaaacaacttttagcagctctccgaggaaaacaatagggacgacaagagaatcccagaagctgccgagatgtgcccaattccggcgatactgcatgtacgccatgcagatcaggatggtggcgaggctgagggacacgtggaagagctggtgcttggtcttttgttggtcgaatcgggaaaccatgattaaatgcagataaatacaattttggtaaatcttaaacttggacaatattttcctgcctttcgtttgtatttcgccgcctatcaacactgaatgtactgtgggcttaaaacacaaagcttcggaaattttaaatcaccgaatttacatataaaacaaaaaattaagatttattttataatggatgctttttacttacaaaattcaaaaaattaattccaaaattaaaaaaatgctctaaataagggacaacgttgtcgacgtcattgggttcatgcggtgtagaacaaaaaaaaaatttcaccggtaccactgtgcaacaatagaagaaatcgttttgcagcactgtcagccgctgtcatttcaccagccgtcacataatcactcaccacacatttggactgcaaattgtttttctaccatttctagttatttctaagtaaattgcgagtggatattgctttcaatatgttagcccgcgctatccgagtgcgccccatgatgcgtggcatcgcctcgtcgtcagtgtggaaccggaatcgtcccattcagagttccctgatgcaatactgccgggatcggtcgttgcgcctccagcggctccacggagccaatttgatggtgcagcgcttctacagccgcaagcgggatgattccaacggggatattattatgggacccgatcttatgtccgatcaagatacccatcttccggcaactgtggcggtgccggacgtgtggccacatgttccgttgttggccatgcgcaagaatcctctctttccccgctttatgaagatagtggaggtaaggtttcatttgactggatgaataactactcactatcatgaattgatttagtcagtaagcttttaatgagctagacttcttattagtgtttacaacatttaaaagtacgccttaataatacttttttccttggctttgaaaaaatccgatgtgctaataggtatccaatcccatcatcatggatctactccgtcgcaaagtcaagctgaatcaaccttacgtaggcgtcttccttaagaaaactgatggcgaagaggagcttatcaccaatttgaatgatgtctacaatctcggaacatttgcacaaatccaagagctgcaggatctcggtgataagctgcgcatggttgtggtggcccatcgtcgtattcgtataacaggtcaggtggtagaggacgtgccacctcctaagcccggtaagcatattttccacacacccactaagcgcccagatgtgtgacctatgtttctgcccttagtgaaaatgacaactttgcattatcctctatttaatataaaattacaaatcccagctgaagatcaaagcactgatcaagcggatgcggcacctataaaatcaagatccgacccagcccgaaagccccgtggccgaattcccaggagtcggaccggaaaatcacgtgaatcggcggctgctgaagaacttatacaaaaccagactctggagccgccactgaaatcaggcaaagtcgagtcatcgagcttgccaaagcctccaacagaagaaaagatagtggaacctgagactggtgccaaagaaaatgttaatcaatctgcgcccagcgcccaacctgttcttattgttgaagtggagaacgtaaagcaaccgatctataaacaaacggaagaggtgaaggcattaactcaggagataatcaagactcttcgggacataatcacaatgaatcccttgtataggtatgttttaaaatgatacaaacaacatgtttatctgccattaatcatactttccagagagagtctacagcagatgctgcaccaaaatcaacgagttgtcgacaaccccatttatctgtgcgatttaggagcatccctttccgctggagaaccagctgagctgcaaaaaattcttgaggaaacagatgtaactaaaataaacttatatcggaaataaaaatcttatatatgtatcactatttcagatcccagaacgtctacaattggccttaactttactcaaaaaggagttggaactctccaggctccaacaaaaaattggacgcgaagtagaggaaaaagtcaagcagcaacatcgcaaatatatactccaggaacagttgaaagtcatcaaaaaagaactgggcatcgaaaaagacgacaaggatgccattggtgaaaagtaccgcgaaaagctgaaggataaggtggttcccgaagctattatgacggttattgatgaagaactcaccaagctgaacttcctggagagtcatagttccgagtttaagtgagttctacaaaatattttggaatttagcttaactaatatgctcatactacttttttttagtgtaactcgcaattacctcgactggcttacttccctaccttggggcgttatcagcaccgaaaatctctgcctggagaaggccactgaaacactaaacgacgatcactacggaatggaggatatcaagaagcgtattttagaatttattgccgtcagttccctcaagggctctacgcagggcaagatcttgtgctttcatggaccccctggtgtgggcaagacaagcatagcaaagtccattgcacgcgctttgaatcgcgagtacttccgctttagtgtgggcggcatgacagacgttgctgagatcaagggacatcgccgcacctatgtgggcgcaatgccgggtaaactgattcagtgcctgaagaagactaagattgaaaatcctctggtactcatcgacgaggtggacaagatcggcaagtgagtaaaaggctttcattaagatatactgtaatataataaataacctattttaggggctaccagggagatcctagctcagcattgttagagctactagatcccgagcagaatgcgaatttcctggaccactacctcgatgtgccggtagacctctcgcgagtgctcttcatctgcacagctaatgtgatcgacactattcccgagcctttaagagatcgcatggaattgattgagatgtctgggtatgttgccgaagagaagatcgccatcgctcgtcagtatctgatgccacaagcgatgaaggactgtggattaacggacaagcatatcaacatttccgaggatgccctaaacatgctgattcgcagttattgccgggaatccggggtgcgaaacctgcaaaagcatatcgagaaagttattcgcaaggtggccttccgagtggtcaaaaaagaaggcgagcactttccggttaacgctgataatctgaccacattcctgggcaaacaaatctttagctcagatcgcatgtacgcaaccacaccggtgggtgtagtcatgggtctggcctggaccgccatgggtggttcatcgctttacatcgaaacctcaaggcgtcacattcgccagggggcaaaaacagatccgaacactgtcgccggatcgctgcacatcaccggaaatttgggagatgtcatgaaggagtcggcccaaatagccttaacggtggcgcgcaactttttatattcgctggaacccaataatctgttcttagagcaagagtaagttttttaatttgcgttttcttattttcgttaatctatatatgtggcccttacaggcacattcacctccatgttcctgaaggtgccacaccgaaagatggccccagtgcgggcatcaccattattacagctctcgtatcgttggccactggaaagccggtgcgccaagatatcgctatgacgggcgaagtatccctgaagggaaaagtgctacccgtgggtggtattaaggaaaagacgattgcagtaagtaaaacagaaataaatgatctatttgtgtgtaaatataaataaatcaccctcattcaggcacgtcgtagtggagtgaattgtcttattctgcctgtggataacaagaaagacttcgaggagttgcccacgtacattacagatggtctggaggttcactttgccaccacctacgaggatgtctacaagatagcgtttactgatgtaaccgaaacgacaaccaacaatgttgaagagcaggagccgctgcagaagctttccagtgcggccgctgccaaatcggagacgtggccttattcttagatttagcttgggggtgttgcgggtgttgataggttttataaatatctatcgttatcaggttaattagtttatttagaccatagcatttgttaattctaatgccaagtaaattgaatgtaccatcgaactgaagacagtactgcgtatatcctagacatctgcattagccaaaatccagtccaggtagcgatccacgcgagtgtagatacccgggcgaccccgctgtccgcagccgacgccccaggacacgatgccgatcgtgacccagcgttggttgggaagttgtaccaacagaggacctccgctatcgccttgacaggagtcctgacctccttccggaaatccagcgcacatggcagtgtccggaacgtgctgtacaaatgacgacctgcaatcggactgcttccaaaccggcaggttaacctgaagataggagtaatacatattttcttaatttaaaaaagctttctttgttatgttcagcttgagttactaaattgctgaaaccaatttgtttagatcaatataagaaattgaaagcttaagaacaaaataaaaacgctgtatataaaatgaaatatactttaatatgcgacccacctccatgaggatgttagaatgaggaccgccaaacttttgggtgccccaaccggtgacaatggcgtttctatccgaccaatcttcgttcacgggcggcatgcaaactggccagatgtaggtgttgaatatagtcgccctgtcgattctgacaattgcaatatcattgtcgtagttctgtggattataatcgatatggagcaccatgttggcaatccggaaatccctcgccctcgtctcattcagcatatgcgtgttgtactcgcccagacgcacgaagatgtcctccttgttcttcttgtagatgcagtgagcggcagttaggacatgacggtcggtgatcaggacaccaccgcaccaaacgaagggcagaccctcctgcagcagggccgccatccaaggc

SEQ ID NO: 41885 - DNA, 3098 bp, DROSOPHILA
cacatttggactgcaaattgtttttctaccatttctagttatttctaagtaaattgcgagtggatattgctttcaatatgttagcccgcgctatccgagtgcgccccatgatgcgtggcatcgcctcgtcgtcagtgtggaaccggaatcgtcccattcagagttccctgatgcaatactgccgggatcggtcgttgcgcctccagcggctccacggagccaatttgatggtgcagcgcttctacagccgcaagcgggatgattccaacggggatattattatgggacccgatcttatgtccgatcaagatacccatcttccggcaactgtggcggtgccggacgtgtggccacatgttccgttgttggccatgcgcaagaatcctctctttccccgctttatgaagatagtggaggtatccaatcccatcatcatggatctactccgtcgcaaagtcaagctgaatcaaccttacgtaggcgtcttccttaagaaaactgatggcgaagaggagcttatcaccaatttgaatgatgtctacaatctcggaacatttgcacaaatccaagagctgcaggatctcggtgataagctgcgcatggttgtggtggcccatcgtcgtattcgtataacaggtcaggtggtagaggacgtgccacctcctaagcccgctgaagatcaaagcactgatcaagcggatgcggcacctataaaatcaagatccgacccagcccgaaagccccgtggccgaattcccaggagtcggaccggaaaatcacgtgaatcggcggctgctgaagaacttatacaaaaccagactctggagccgccactgaaatcaggcaaagtcgagtcatcgagcttgccaaagcctccaacagaagaaaagatagtggaacctgagactggtgccaaagaaaatgttaatcaatctgcgcccagcgcccaacctgttcttattgttgaagtggagaacgtaaagcaaccgatctataaacaaacggaagaggtgaaggcattaactcaggagataatcaagactcttcgggacataatcacaatgaatcccttgtatagagagagtctacagcagatgctgcaccaaaatcaacgagttgtcgacaaccccatttatctgtgcgatttaggagcatccctttccgctggagaaccagctgagctgcaaaaaattcttgaggaaacagatatcccagaacgtctacaattggccttaactttactcaaaaaggagttggaactctccaggctccaacaaaaaattggacgcgaagtagaggaaaaagtcaagcagcaacatcgcaaatatatactccaggaacagttgaaagtcatcaaaaaagaactgggcatcgaaaaagacgacaaggatgccattggtgaaaagtaccgcgaaaagctgaaggataaggtggttcccgaagctattatgacggttattgatgaagaactcaccaagctgaacttcctggagagtcatagttccgagtttaatgtaactcgcaattacctcgactggcttacttccctaccttggggcgttatcagcaccgaaaatctctgcctggagaaggccactgaaacactaaacgacgatcactacggaatggaggatatcaagaagcgtattttagaatttattgccgtcagttccctcaagggctctacgcagggcaagatcttgtgctttcatggaccccctggtgtgggcaagacaagcatagcaaagtccattgcacgcgctttgaatcgcgagtacttccgctttagtgtgggcggcatgacagacgttgctgagatcaagggacatcgccgcacctatgtgggcgcaatgccgggtaaactgattcagtgcctgaagaagactaagattgaaaatcctctggtactcatcgacgaggtggacaagatcggcaagggctaccagggagatcctagctcagcattgttagagctactagatcccgagcagaatgcgaatttcctggaccactacctcgatgtgccggtagacctctcgcgagtgctcttcatctgcacagctaatgtgatcgacactattcccgagcctttaagagatcgcatggaattgattgagatgtctgggtatgttgccgaagagaagatcgccatcgctcgtcagtatctgatgccacaagcgatgaaggactgtggattaacggacaagcatatcaacatttccgaggatgccctaaacatgctgattcgcagttattgccgggaatccggggtgcgaaacctgcaaaagcatatcgagaaagttattcgcaaggtggccttccgagtggtcaaaaaagaaggcgagcactttccggttaacgctgataatctgaccacattcctgggcaaacaaatctttagctcagatcgcatgtacgcaaccacaccggtgggtgtagtcatgggtctggcctggaccgccatgggtggttcatcgctttacatcgaaacctcaaggcgtcacattcgccagggggcaaaaacagatccgaacactgtcgccggatcgctgcacatcaccggaaatttgggagatgtcatgaaggagtcggcccaaatagccttaacggtggcgcgcaactttttatattcgctggaacccaataatctgttcttagagcaagagcacattcacctccatgttcctgaaggtgccacaccgaaagatggccccagtgcgggcatcaccattattacagctctcgtatcgttggccactggaaagccggtgcgccaagatatcgctatgacgggcgaagtatccctgaagggaaaagtgctacccgtgggtggtattaaggaaaagacgattgcagcacgtcgtagtggagtgaattgtcttattctgcctgtggataacaagaaagacttcgaggagttgcccacgtacattacagatggtctggaggttcactttgccaccacctacgaggatgtctacaagatagcgtttactgatgtaaccgaaacgacaaccaacaatgttgaagagcaggagccgctgcagaagctttccagtgcggccgctgccaaatcggagacgtggccttattcttag

SEQ ID NO: 41886 - protein, 1006 aa, DROSOPHILA
MLARAIRVRPMMRGIASSSVWNRNRPIQSSLMQYCRDRSLRLQRLHGANLMVQRFYSRKRDDSNGDIIMGPDLMSDQDTHLPATVAVPDVWPHVPLLAMRKNPLFPRFMKIVEVSNPIIMDLLRRKVKLNQPYVGVFLKKTDGEEELITNLNDVYNLGTFAQIQELQDLGDKLRMVVVAHRRIRITGQVVEDVPPPKPAEDQSTDQADAAPIKSRSDPARKPRGRIPRSRTGKSRESAAAEELIQNQTLEPPLKSGKVESSSLPKPPTEEKIVEPETGAKENVNQSAPSAQPVLIVEVENVKQPIYKQTEEVKALTQEIIKTLRDIITMNPLYRESLQQMLHQNQRVVDNPIYLCDLGASLSAGEPAELQKILEETDIPERLQLALTLLKKELELSRLQQKIGREVEEKVKQQHRKYILQEQLKVIKKELGIEKDDKDAIGEKYREKLKDKVVPEAIMTVIDEELTKLNFLESHSSEFNVTRNYLDWLTSLPWGVISTENLCLEKATETLNDDHYGMEDIKKRILEFIAVSSLKGSTQGKILCFHGPPGVGKTSIAKSIARALNREYFRFSVGGMTDVAEIKGHRRTYVGAMPGKLIQCLKKTKIENPLVLIDEVDKIGKGYQGDPSSALLELLDPEQNANFLDHYLDVPVDLSRVLFICTANVIDTIPEPLRDRMELIEMSGYVAEEKIAIARQYLMPQAMKDCGLTDKHINISEDALNMLIRSYCRESGVRNLQKHIEKVIRKVAFRVVKKEGEHFPVNADNLTTFLGKQIFSSDRMYATTPVGVVMGLAWTAMGGSSLYIETSRRHIRQGAKTDPNTVAGSLHITGNLGDVMKESAQIALTVARNFLYSLEPNNLFLEQEHIHLHVPEGATPKDGPSAGITIITALVSLATGKPVRQDIAMTGEVSLKGKVLPVGGIKEKTIAARRSGVNCLILPVDNKKDFEELPTYITDGLEVHFATTYEDVYKIAFTDVTETTTNNVEEQEPLQKLSSAAAAKSETWPYS

SEQ ID NO: 41887 - DNA, 3694 bp, DROSOPHILA
cggccggattcacccaatggagtgctacatgctccataatccttgttctcctgcggttatcatttgtagttacctgatactggtatgtatgcataagacataaactcaccagcaattgcgaggtgggagcctgtcgcttgtttaggcgatgttgggacaggaaacttacgacgcggttttccccagtgcgattttcgtatacctgattctccgactccccccattgaaactcatcattatcgctgaagtcgagaagatctgggtggtagacgaaaatctttaggtttggtttacattagattcttggaatttgtcttagaaatatcaagtatttgggtgaaatgagttttaactttgataaataactttgctattaaatgcacctgcacaattttttatgttggtataaaaacgtgactcacctaaaaaatcagtggatacagtcttggcgattgtactctgcgggatatagcccagtaaaatcaccaatgcccaaagaaatgccttcattttgagttattttcgcgagtgcagtgggaattttaatcgcgtgtcgcttccgttgcccgctgaatcagttctgttttgacagttctccaaccagctaaagctacttctccgatatggagctgagctcagatcggctcaatttacatacgtcttgccttggatactgctgttgaacctgttcgatgcgtcgacactatggggttttcctggctattaaagcgtcttactccatgctcagttcccaggcgaaagcttaatgggattggaaccgctagcgatatagtaactattatataatacttgagttaatccgagcacttggcttatctgtagggcggaaagcgagccactgaaatgacgtcccctttaatgcctctgagcttagacccaatttggtgtattatctcaatgttgctggcaacagcttggcaacatgttgccaggggcgagtagtgcccatgatgatcagtttggattctccgaggcgaacgtgatgtgcatcgcaaatgatccggttcggtgggttttgattccatagaagtatcatctccgaaatactaaggaagattttatactcagttatattctctatttaattgccttttgacgcttgcacatcaaagtagtaataataaatcaattgcacggcacaaccggaatcgaagaaaacatttgcgatgcacggtttgattgtcactgcagaaatgattttaatgtcttaatttaaaacccaaccctttaacattttaacataatttaagtaatagtattgaatgatggaggcgaagaaaatggaatggggcgacttcagttggcagattatgttattatgtaataagacgaataccgaataagtgtactaaaaaataagtttaaaatagaaagcgtcaaacaaataattagtcaaaatatccttaaaaaatatttaaaatatattattttaatattattgcgaagaccatatttttattatttaacaatttttataggtagagcactggatttgaatttctgggaatattatatgatcacatatacatatgaatatacatatatgcggtgctataaactcatcgcttacccactttatcctgaaaattggtttaaaaattattatttattattttttaacaggtatctctaaaattcgactattgtcgtgtcattcaaatggtacaaatacaacttcctagtcaactcaaatggcgtgcgagtgtgttacttaattattaatccctgcgatttaattaccacctttccctgccaccatgatcacctataaaactctcctacgacatggttactcaacgtatttagctttccgccaccatgaagcattggaaacgacgctcttccgctgttttcgcgatcgtcctgcaagtgctggtactcctgctacccgatcctgcagttgccatgacgatggagcagttcttgacctcgctagacatgatccgcagtggctgtgcgccgaagtttaagctcaaaacagaagatctcgatcggcttcgcgtgggtgatttcaactttccgccatcgcaggatcttatggtgaatgccgctttcattttgcaggcaccagtgtttgaatcctttatccttttagtgctacacaaagtgtgtgtctttgatggcgggcactgtgaacaaaaagggggagttcaacgctcccaaggcgctggcccaacttccgcatctggttcccccggaaatgatggagatgtccaggaaatccgttgaagcttgtcgggatacgcgtaactacacccacacttacctttcatagctgtaaatatatgtaaggtatatctttgcagataaacaatttaaggaatcttgcgagagggtctaccagacggccaagtgcttctctgaaaacgccgatgggcagttcatgtggccttaaaaatgtttctggaaactaaattcatactggttcatcctttaatgaccaatccttggatgattgctttattatctatgttgaaatcatcaaatagaattggaattcgtaaaacataaattatgacaagaaaggaagttagcttcaaaaagccgaagtatatacttatatacccttgcagtaatatgatgttgattaaattgaaaccaaaatttatatattaaagacaacttatgtatacagaataacatcaatttatgattaaaaacgacgaaactgtagtttgtgttatattatttcattcgaaactctattttccgactattcgtatgcctatatgacaaagtcgtccaattctgattgaatcaaaactgaaattatatattgtcaaagtaacaaagaacattttgtttaaattaatttttcgattatgtatatacccgcaatcgactgaattcgataagcaaatctttttttttgaaaacaatctttaatcatatatttgaaaacctttttgtagattaaaatggcaccccaaaatataaacacgccgcattgatttcaaacatgttatagtttattgctgatattattaactaaatacaacggttttatgtttgcataacgcatacttatacattttgtaatcgataaacatccaattggcttagcaatgcattcaaacttagggagatctttgcattcaagaggttacaaaataaatgcaaatcttatacaaaatggttgccttgcaaatctgcgtacaaagttctctgtaatcgagagtaatcgatatcttaaatttcggtttcggtataggagtagtgtctttatatatgtatgtagatctctccaaaaagggtctcacaaaaatatatccgattagagcgtgtgtgcggattagttgatgaatttgatgaggatgttcgaggaaacctgtgtaaacaactaagagtctaatgacattcacacgtatatatagtagttagtacattgtatataaaatcagtacacattaatgcttgtatattgaaccgtttgttgttagctgctttggtttggtttggaaatacttttaactgctacacacacacatctaaataggttggtggttccgtagacaactatagtcatacacatacacatatagttaggtatataatttgatatatcgtagttataattaggtggagattcggggcaaaccctcgtcgattccactgggattgtgtaatgccgttgattgtgttgtgcgtggggaccaaataatgtctgagagct

SEQ ID NO: 41888 - DNA, 964 bp, DROSOPHILA
gtgatgtgcatcgcaaatgatccggttcggtatctctaaaattcgactattgtcgtgtcattcaaatggtacaaatacaacttcctagtcaactcaaatggcgtgcgagtgtgttacttaattattaatccctgcgatttaattaccacctttccctgccaccatgatcacctataaaactctcctacgacatggttactcaacgtatttagctttccgccaccatgaagcattggaaacgacgctcttccgctgttttcgcgatcgtcctgcaagtgctggtactcctgctacccgatcctgcagttgccatgacgatggagcagttcttgacctcgctagacatgatccgcagtggctgtgcgccgaagtttaagctcaaaacagaagatctcgatcggcttcgcgtgggtgatttcaactttccgccatcgcaggatcttatgtgctacacaaagtgtgtgtctttgatggcgggcactgtgaacaaaaagggggagttcaacgctcccaaggcgctggcccaacttccgcatctggttcccccggaaatgatggagatgtccaggaaatccgttgaagcttgtcgggatacgcataaacaatttaaggaatcttgcgagagggtctaccagacggccaagtgcttctctgaaaacgccgatgggcagttcatgtggccttaaaaatgtttctggaaactaaattcatactggttcatcctttaatgaccaatccttggatgattgctttattatctatgttgaaatcatcaaatagaattggaattcgtaaaacataaattatgacaagaaaggaagttagcttcaaaaagccgaagtatatacttatatacccttgcagtaatatgatgttgattaaattgaaaccaaaatttatatattaaagacaacttatgtatacagaataacatcaatttatgattaaaaacgacgaaactgta

SEQ ID NO: 41889 - protein, 153 aa, DROSOPHILA
MKHWKRRSSAVFAIVLQVLVLLLPDPAVAMTMEQFLTSLDMIRSGCAPKFKLKTEDLDRLRVGDFNFPPSQDLMCYTKCVSLMAGTVNKKGEFNAPKALAQLPHLVPPEMMEMSRKSVEACRDTHKQFKESCERVYQTAKCFSENADGQFMWP

SEQ ID NO: 41890 - DNA, 9447 bp, DROSOPHILA
ttttcagcttgtgtatcttgccggtggtgggtttgcctgccgcatctttgtttaggccttgatccatcttaataactggattgaccgagtccagtaactgggaatccttcgagagcggaggggggttttcgggcacagtgggttgcactccctccacaacaaaccaatgggagcgcagggtgagatccaggggaatttttacagagttggtggatgtgatttctcctaggtcgatttccttgtcctcggtgaagtgcagctcccgtcctccgccagatgcgaagcggaatggaatgaagtccttggctacgaaaccgtactgcggctccacatttcgcaccttaagggacatgtcgatgtcccgcactgagagcttctgccgcttggcgtggttcatgaacttggccgcatcctgtacaatcctcttcagcttgatggacacatcctccgctagttccttggcggcgtcatccgacagggagcccactccgatgctctccgcgatcaccttcatggactccgccgagatgctggagccgtacagcatgctgctggaggggctgctcggtttcgacggttttccactcatttcccaggtttttacaaataaacaaataataatcgccgagctgctcggccagtgtgcacacacccaaaagagaaaatctagctattctggcttttttgttgtttcatatcgtctgctataattagttttatggtcacctaaaattttgctatttgcgagttcatgtaaggaatatattcccataacaaatatttagttacaatagtaaaaaaaatataagaattcatttttaattcataaaaaatgtcatattaatattactggtttcacattgttatacaataatcggcttgtttttttccagctatttttgaatagaatccactattgttcgcgatagttgcctgctaaattccgccgcaaggtcacactgtcgcgtagacatcacgtacaccccagctgggcacactgaaacgcagtctttttctttatttatgttcgtaaatttttggttgcctggctttttgttgttgcgccacattaacaataacaattgatgcgccccgccaccgcccactagtcgcgaaaaaagtgaattatcggtaccgcggattaatgtgccacatgcgagaagcgttgcaacgttgcgccgtcgtcgggcgtcgaacaaagcagtttttgggaaagtgaaaacggcgccattttagaagcaggcaagccacggcctaaggctcaagaaaagtgcaaatgcaatgtgtgcagcaatagattgtcatttcggcacaaacgaaaccgactactgaggtctactactagcccagaaaacaatcaagcgtaagtgtgctgtaggtaatggttttttttttggacgatgtcaccgcggtttgacctactttaaaggcgattaagagtgccaccaaatcgaattaaaaacacttggctaacaaaagcgaacctttgcagctccccagcgactccaaaatatgagctgtagccaaaatgagacggcagcagcaaaggttctggaaacgcaacgcgcacaagaatccggcagtgaaaatgaggcaagtctttaaaatggcaccctttatgcaatgctatatgtaaagtgtgttgttctcctcaggaaaccgattccattacggatcaatcgagccagtcgaagtcgatcaagtcagccacccagtttagcgtgcagcgttcggacaccgatggactgcgaatgagaatctcggccatccgccccacgttaggagtcgtagcaaccaagaaacccccaaagtccagaaaaatgtctacccaggacaccgagtccggctgctcggaggccaaaaatagagcggtcagcaagaaagtgaaggtcaagcgcaagaagctggcaagttccagtgggattagtaaatcggacaaagtgtctaagtctaagaagtcacagatctcggcattttcctcggactcagaggacgatctgcccttgaaggtgcatcagcagagagctccgcgagtgctgctaagtgctatcatccaggcggcacagtcggccagcaaacccaccctcgatatcggaatctcgtccagcgacaacgagttacctaacctggtgcaggcggctatcaagcgagtggagagcgatacggaggacacaactgtggaaggaagtttccgcaaagcggccaaggacaagaacctaccccagtaccagtcaactttgctgcaagacttcatggagaagactcagatgctggggcagaccgtcaatgcgaagcttgcggaggagaaagtggctaaagctaaggaggagaccctagtccaaacagctgttcctcgaaagcgcagaggtagacccaaaaaagtggttcccacagttcctgccccaggaaactctggccctgctataaacgaatctgccgattcgggtgtgataagcaccactagcacaacgcagagcactactccctccccgaaaatgcaaaatgagaatgctgtgccgacgggatcgctgccaatcgcctccagcagcaagcctaagatcgacatggcgtatctggacaagcgaatgtatgccactgagcgggtgctctatccaccgcccaggagtaagcgacggcagaacaataaaaagacagcctgcagttcatccaacaaagaggaacttcagcttgatccgctgtggcgagagatcgacgtgaacaagaagtttaggctgaggagtatgagtgtgggtgcggctagtggaacaggagcaagcaccactatttgcagtaaggtcttggccgctaagagcggttacgtctcggattacggaagcgtacgacatcagcggagcagccacaaccacaactccggttacaagtccgatgccagctgcaagagtcgatacagcaccaagagttgtatgagtcgcaggagcagggcaaagagctgcggctaccggagtgattgcaaggaatctggaaagtcaggcctaaggatgaggcggaagcgccgggcttccatgctcttgaagagctcagcagacgatactgtcgaggaccaggacatccttcagctagctggattatctctgggccagagcagtgaggagagcaacgaatacatcagtaagccgagccttaaaagccttcccacgacaagtgccagcaagaagtacggcgaaatcaatcgctatgtgaccaccgggcagtatttcggtcgaggcggtagtttgtctgccaccaacccggataacttcattagtaaaatgatgaaccagcgtaaagaaaccccggctcccagcaaatcgtcctgcaagattaaatctcgccgctcatcggcagccagtatgtgcagcagctatgtgtctggggtgtctagaatgcgtcgcagacatcgccggaagagtttcagtcacaacaaatcattgaacattgattccaagctgctcaccgaaatcgagataatcacaagcaccttcaactcaaggtgtcgcatccaagatgatcgtttgaccggaagcagtggcaaagagaagctattggccgatgccaacaagctgcaggccaccctagcagcaccaagccctgcccagcagttgactctgaatggaggaggaccagcttccaccctttccaaaccattaaaacggggcctaaagaagagaaagctgagtgagcccctagtggacttcgctatgctatcagctagcgctagtggaactcccaatggcagcggaagcagtaatggaaataccaaacgacgacacaagaaatctcaaagcaatgacagttccagtcccgatgatcacaagttgccgttgaaaaagcgccactatcttttgactccaggagagcgtccgccggcggaagtagcattcgccaatgggaaattgaacgcagaggcctgggctgcagccgcggcggctgctaagagcactgcgtctaccaaatcgcaagcccagtttaatgctaggagcgtaaaatctgcgctaacgcccaaaaaaagacatctcctagagcaacctacgtctgtgagcggagctggctcgtcggccagtaattctcccctgagaattgttgtcgataataattccataagtggtggaaagttgctggatataagtcctagttccttgtgttccctcaaacagcagaggagaggaggagcagctaaacagaaggtgtcggcagcgaaggacctcgttcagcttcaatccccagctggtagctatcctccccccggtgtgttcgagccatctgtggagctggaaatccaaattcctcttagtaaactgaacgaatccgtcataaccaaagcagaggtcgaatctccactgctctcagcattggacattaaggaggatacgaaaaaggaggttggccagcgcgttgtcgaaaccttgctacacaaaacgggaggcaatcttcttctgaaacgcaagcggaaaaagataaatcgaactggatttcccactgttcgcaggaagaaacgtaaagttagcgtggagcagcaaacaacagccgtgattgatgagcacgagccggagtttgatcccgatgatgagccactgcaatccctaagagagaccaggagtagcaataatgtcaatgtgcaggcggcacctaatcctccactggattgcgagcgagttccccaagcaggcgaggccagagaaacctttgtggccaggaccaatcaaaaagcccctcgattatcggtggtggccctggagcgcctacagcgtcctcaaacaccagctagaggaagaccgcgaggtagaaaacctaagaacagggaacaagctgaagctgcacctcaaccgccgcccaaatcggaacctgagataaggccagccaaaaaacgtggccggcaacccaagcagccggtactggaagagccaccacccacaccacctcctcaacagaaaaaaaacaaaatggaaccaaatattagactaccagatggcatcgatcccaatacgaatttcagctgcaagattcgcttgaagcggcgaaagaacttagaggctggaacccaaccaaaaaaggagaagccagtccagccagtgacggtggaagagattccaccagaaattcccgtcagtcaagaagaaatagatgcagaagcagaggctaaacggctagacagtattcctaccgagcacgatcccttgcctgccagtgagtcccacaaccccggtccgcaggactatgccagttgcagtgaatccagcgaggacaaggcatcaaccacatccttgcggaaactatctaaggtcaagaagacctatcttgtagcaggactcttctcgaatcattacaaacaatccctgatgccgcccccagcaaaggtgaacaaaaaaccaggcctggaggagcaagtgggtcctgcgagccttctaccaccacctccctattgcgaaaagtacctccgaaggactgaaatggactttgagctaccttacgacatttggtgggcttacactaattccaaattacccactcgaaacgttgtgccatcctggaattaccgaaagatccgcaccaatgtatacgcagagtcagtgcgtccaaatttggcgggattcgatcatcccacctgtaactgtaagaaccagggcgagaagtcttgtttggacaactgtctcaaccgcatggtttatacggagtgctcgcccagcaattgcccggctggagagaagtgccgaaatcagaagatccagcgacatgccgtcgcacccggagtggagcgctttatgacggcagataaaggatggggagtgcgaactaagctacccattgcgaagggaacctacattctggagtacgtgggcgaggtagtcacggaaaaggaattcaagcagaggatggccagcatctacctaaatgacacccaccactattgcttacatttggatggaggactggttatcgacggtcagcggatgggcagcgattgtaggtttgtcaaccattcttgcgaacccaattgcgagatgcaaaaatggagtgttaacggcctatctagaatggttttattcgccaaaagagccatagaggagggggaggagctgacatacgattacaacttttcgctgttcaatccctcagagggtcagccctgcaggtgcaacacgccccagtgtcgtggtgtcattggtggcaagtcgcagagagttaaaccccttcctgctgtggaggccaagccatctggagagggactttctggccgaaacgggcgccaacggaagcagaaggccaaaaagcatgctcaacggcaggcgggaaaagatatttcatcagcagtggcggtggcaaagcttcaaccattgtccgaaaaagaaaagaaactggtcagacaattcaacacatttctagtcaggaacttcgaaaaggttggtttacttattttaatatacgaaatatatattaaaaaatatttatttatctttcattagatacgcagatgcaaggccaagcgggcgtcagatgcagcggcgactgcatcctcgccagcacttggcaccactaatggggacattcctggtagacgtccctccacaccatcttctccttccttggcagcgcagatttccgcgctctgctcgcctcgcaacataaaaacccgtggactcacacaggcagtgcatgatcccgaactagagaaaatggccaaaatggctgtagttctaagggatatttgcagtgccatggagaccctcaaaatgtccgatttgttgacgacagtgtccagcaagaaaaagaagcctataaagaccactttgagtggaaaattgggttctacagctgcaacttcaaaagtggaattcagatcgatacaagcccaggtggagcagggacattacaaaacgccgcaggaattcgatgaccacatgcagcagctctttgtggaggccaagcagcaacacggcgatgatgagggcaaggaaaaagcgctgcagtccctgaaggatagctatgagcaacagaagatcgccagctatgttcagctggtggagattcttggtgattcggaatcgttgcagagctttaaaccaaaggaagtgctttcgtcagaggaggaacctggaaagatagcagtgaagaaatcaccaggagcaaaggaaagagattccccaattgtgccattgaaagtgactccgccacccctgcttcctattgaggcctctcctgatgaggatgtaatccgatgtatttgtggattgtacaaagatgaaggcttgatgattcagtgctccaaatgcatggtgtggcagcatactgaatgtaccaaagctgacatcgatgcggataattatcagtgcgagcgttgcgagccaagggaagtggatcgagaaattcccctggaggaatttaccgaagagggacaccgttactatctctccctaatgcgtggtgatctgcaggtacgacagggcgatgccgtctatgtcctacgagacatccccatcaaggatgagtccggcaaggtgttaccgacgaagaagcacacctatgaaacgatcggagccattgattaccaagagtgcgatatctttcgggtggagcacttgtggaaaaacgaactgggaaagcgttttatattcggacaccatttcctgcgtcctcatgaaactttccacgaaccatcgcgtcgtttctaccccaatgaggtggtacgagtttcactttatgaggtggtacccattgagttggtcattggacgctgctgggtgttggatcgaacaactttctgtaaaggacgccccatggaatgcaacgatgaggatcattgctacatctgcgagctgcgtgtggacaagacggcaaggttcttctcaaaggccaaggccaaccatccagcctgcaccaagagctatgccttcagaaaatttcccgagaagattaagatctccaagagctatgcggtaagtttaatattttaaataataataacgccagttaactaatgagcattaatgtgtagccccatgatgtggatccgtcgttgctgaagacaaggaagcaaaagactgaattagacgtaggagccgggccaacaacgatgcacaaggtgtctggcaggcaggaacagcatcaggccaagatggttgggcgaaagcctcgtgggatcagtgccccagcggatgcaactgctgtccatgtcgtaacacccgtggcgcccaataaacaggtgtgcagagttttgaacaagttttgaaatcaatctattacaattaactttgttttcaatctccctaaagatgcttaagaagaggaaatcgcgtttagagaacgttttgataactatgaagcttaagtgtctggatgcacaaacggcacaggagcaacccattgacttgtcatacctgctgtccggacgcggcgcccggcagcggaagacccagcagtccagtagcagttctacggccaactcaacataaccgatgtaacgcgagtagattaagccgtgtatatacgcctaaagttagaggcattgattaatatttatggaacttcaattaacaattagcatttagccatgtaagatgtaacggtgatagtagtaatcctaaagtgtacattgttatgaacaaacttcgtgaaaggactccggtcccggctaggatggaacagattatgaattatggttaatataaggatttatttaaatactagtgcttacgccaccgcaccaagcccccaatttagatgaatttcttttgtttttaattgtttatattggctctccatattaattttgttttacaaaactatccccctctcgtctttgcaattgaaggcgtttgacttttgcattgttattttaaattattgtattatgttatggctgcttaattatgtaacacccgagtaggacaacttattgcgctattagtttttagttattttccaattgttattaactgctaacaaaaattttaaaagtgaaataaaaaatatatttttattaatcaaagccgaattttaaatgaaccgcctgtttaacacaagtgttggattgcctaactgtcgcgttattcaacactgcttgcatgggcgtagtgaagtttctgattcgggggacttcgaatttaagattatgaatcactttgttcttgtatcgcaaaaattcatttgcttagagtttttctgcatttttttttgggattaaaataataatccccccttaaatgtgtttgcttacgcccatgactatgcaaacagatgttcagtgaagttgaattggattgaattgaatcggccatgctgtgtaatatatttaaacgctcgcttcaagcgaatataaggaatgtgaataacttaaatgtgctgcggttgagcagttccagtggtccccgaggagagatccaggacgcactggacatagaggccaatctattcgggaattcagatttaaggcatgagccgatgaacacgagg

SEQ ID NO: 41891 - DNA, 7053 bp, DROSOPHILA
aaacgcagtctttttctttatttatgttcgtaaatttttggttgcctggctttttgttgttgcgccacattaacaataacaattgatgcgccccgccaccgcccactagtcgcgaaaaaagtgaattatcggtaccgcggattaatgtgccacatgcgagaagcgttgcaacgttgcgccgtcgtcgggcgtcgaacaaagcagtttttgggaaagtgaaaacggcgccattttagaagcaggcaagccacggcctaaggctcaagaaaagtgcaaatgcaatgtgtgcagcaatagattgtcatttcggcacaaacgaaaccgactactgaggtctactactagcccagaaaacaatcaagcctccccagcgactccaaaatatgagctgtagccaaaatgagacggcagcagcaaaggttctggaaacgcaacgcgcacaagaatccggcagaaaccgattccattacggatcaatcgagccagtcgaagtcgatcaagtcagccacccagtttagcgtgcagcgttcggacaccgatggactgcgaatgagaatctcggccatccgccccacgttaggagtcgtagcaaccaagaaacccccaaagtccagaaaaatgtctacccaggacaccgagtccggctgctcggaggccaaaaatagagcggtcagcaagaaagtgaaggtcaagcgcaagaagctggcaagttccagtgggattagtaaatcggacaaagtgtctaagtctaagaagtcacagatctcggcattttcctcggactcagaggacgatctgcccttgaaggtgcatcagcagagagctccgcgagtgctgctaagtgctatcatccaggcggcacagtcggccagcaaacccaccctcgatatcggaatctcgtccagcgacaacgagttacctaacctggtgcaggcggctatcaagcgagtggagagcgatacggaggacacaactgtggaaggaagtttccgcaaagcggccaaggacaagaacctaccccagtaccagtcaactttgctgcaagacttcatggagaagactcagatgctggggcagaccgtcaatgcgaagcttgcggaggagaaagtggctaaagctaaggaggagaccctagtccaaacagctgttcctcgaaagcgcagaggtagacccaaaaaagtggttcccacagttcctgccccaggaaactctggccctgctataaacgaatctgccgattcgggtgtgataagcaccactagcacaacgcagagcactactccctccccgaaaatgcaaaatgagaatgctgtgccgacgggatcgctgccaatcgcctccagcagcaagcctaagatcgacatggcgtatctggacaagcgaatgtatgccactgagcgggtgctctatccaccgcccaggagtaagcgacggcagaacaataaaaagacagcctgcagttcatccaacaaagaggaacttcagcttgatccgctgtggcgagagatcgacgtgaacaagaagtttaggctgaggagtatgagtgtgggtgcggctagtggaacaggagcaagcaccactatttgcagtaaggtcttggccgctaagagcggttacgtctcggattacggaagcgtacgacatcagcggagcagccacaaccacaactccggttacaagtccgatgccagctgcaagagtcgatacagcaccaagagttgtatgagtcgcaggagcagggcaaagagctgcggctaccggagtgattgcaaggaatctggaaagtcaggcctaaggatgaggcggaagcgccgggcttccatgctcttgaagagctcagcagacgatactgtcgaggaccaggacatccttcagctagctggattatctctgggccagagcagtgaggagagcaacgaatacatcagtaagccgagccttaaaagccttcccacgacaagtgccagcaagaagtacggcgaaatcaatcgctatgtgaccaccgggcagtatttcggtcgaggcggtagtttgtctgccaccaacccggataacttcattagtaaaatgatgaaccagcgtaaagaaaccccggctcccagcaaatcgtcctgcaagattaaatctcgccgctcatcggcagccagtatgtgcagcagctatgtgtctggggtgtctagaatgcgtcgcagacatcgccggaagagtttcagtcacaacaaatcattgaacattgattccaagctgctcaccgaaatcgagataatcacaagcaccttcaactcaaggtgtcgcatccaagatgatcgtttgaccggaagcagtggcaaagagaagctattggccgatgccaacaagctgcaggccaccctagcagcaccaagccctgcccagcagttgactctgaatggaggaggaccagcttccaccctttccaaaccattaaaacggggcctaaagaagagaaagctgagtgagcccctagtggacttcgctatgctatcagctagcgctagtggaactcccaatggcagcggaagcagtaatggaaataccaaacgacgacacaagaaatctcaaagcaatgacagttccagtcccgatgatcacaagttgccgttgaaaaagcgccactatcttttgactccaggagagcgtccgccggcggaagtagcattcgccaatgggaaattgaacgcagaggcctgggctgcagccgcggcggctgctaagagcactgcgtctaccaaatcgcaagcccagtttaatgctaggagcgtaaaatctgcgctaacgcccaaaaaaagacatctcctagagcaacctacgtctgtgagcggagctggctcgtcggccagtaattctcccctgagaattgttgtcgataataattccataagtggtggaaagttgctggatataagtcctagttccttgtgttccctcaaacagcagaggagaggaggagcagctaaacagaaggtgtcggcagcgaaggacctcgttcagcttcaatccccagctggtagctatcctccccccggtgtgttcgagccatctgtggagctggaaatccaaattcctcttagtaaactgaacgaatccgtcataaccaaagcagaggtcgaatctccactgctctcagcattggacattaaggaggatacgaaaaaggaggttggccagcgcgttgtcgaaaccttgctacacaaaacgggaggcaatcttcttctgaaacgcaagcggaaaaagataaatcgaactggatttcccactgttcgcaggaagaaacgtaaagttagcgtggagcagcaaacaacagccgtgattgatgagcacgagccggagtttgatcccgatgatgagccactgcaatccctaagagagaccaggagtagcaataatgtcaatgtgcaggcggcacctaatcctccactggattgcgagcgagttccccaagcaggcgaggccagagaaacctttgtggccaggaccaatcaaaaagcccctcgattatcggtggtggccctggagcgcctacagcgtcctcaaacaccagctagaggaagaccgcgaggtagaaaacctaagaacagggaacaagctgaagctgcacctcaaccgccgcccaaatcggaacctgagataaggccagccaaaaaacgtggccggcaacccaagcagccggtactggaagagccaccacccacaccacctcctcaacagaaaaaaaacaaaatggaaccaaatattagactaccagatggcatcgatcccaatacgaatttcagctgcaagattcgcttgaagcggcgaaagaacttagaggctggaacccaaccaaaaaaggagaagccagtccagccagtgacggtggaagagattccaccagaaattcccgtcagtcaagaagaaatagatgcagaagcagaggctaaacggctagacagtattcctaccgagcacgatcccttgcctgccagtgagtcccacaaccccggtccgcaggactatgccagttgcagtgaatccagcgaggacaaggcatcaaccacatccttgcggaaactatctaaggtcaagaagacctatcttgtagcaggactcttctcgaatcattacaaacaatccctgatgccgcccccagcaaaggtgaacaaaaaaccaggcctggaggagcaagtgggtcctgcgagccttctaccaccacctccctattgcgaaaagtacctccgaaggactgaaatggactttgagctaccttacgacatttggtgggcttacactaattccaaattacccactcgaaacgttgtgccatcctggaattaccgaaagatccgcaccaatgtatacgcagagtcagtgcgtccaaatttggcgggattcgatcatcccacctgtaactgtaagaaccagggcgagaagtcttgtttggacaactgtctcaaccgcatggtttatacggagtgctcgcccagcaattgcccggctggagagaagtgccgaaatcagaagatccagcgacatgccgtcgcacccggagtggagcgctttatgacggcagataaaggatggggagtgcgaactaagctacccattgcgaagggaacctacattctggagtacgtgggcgaggtagtcacggaaaaggaattcaagcagaggatggccagcatctacctaaatgacacccaccactattgcttacatttggatggaggactggttatcgacggtcagcggatgggcagcgattgtaggtttgtcaaccattcttgcgaacccaattgcgagatgcaaaaatggagtgttaacggcctatctagaatggttttattcgccaaaagagccatagaggagggggaggagctgacatacgattacaacttttcgctgttcaatccctcagagggtcagccctgcaggtgcaacacgccccagtgtcgtggtgtcattggtggcaagtcgcagagagttaaaccccttcctgctgtggaggccaagccatctggagagggactttctggccgaaacgggcgccaacggaagcagaaggccaaaaagcatgctcaacggcaggcgggaaaagatatttcatcagcagtggcggtggcaaagcttcaaccattgtccgaaaaagaaaagaaactggtcagacaattcaacacatttctagtcaggaacttcgaaaagatacgcagatgcaaggccaagcgggcgtcagatgcagcggcgactgcatcctcgccagcacttggcaccactaatggggacattcctggtagacgtccctccacaccatcttctccttccttggcagcgcagatttccgcgctctgctcgcctcgcaacataaaaacccgtggactcacacaggcagtgcatgatcccgaactagagaaaatggccaaaatggctgtagttctaagggatatttgcagtgccatggagaccctcaaaatgtccgatttgttgacgacagtgtccagcaagaaaaagaagcctataaagaccactttgagtggaaaattgggttctacagctgcaacttcaaaagtggaattcagatcgatacaagcccaggtggagcagggacattacaaaacgccgcaggaattcgatgaccacatgcagcagctctttgtggaggccaagcagcaacacggcgatgatgagggcaaggaaaaagcgctgcagtccctgaaggatagctatgagcaacagaagatcgccagctatgttcagctggtggagattcttggtgattcggaatcgttgcagagctttaaaccaaaggaagtgctttcgtcagaggaggaacctggaaagatagcagtgaagaaatcaccaggagcaaaggaaagagattccccaattgtgccattgaaagtgactccgccacccctgcttcctattgaggcctctcctgatgaggatgtaatccgatgtatttgtggattgtacaaagatgaaggcttgatgattcagtgctccaaatgcatggtgtggcagcatactgaatgtaccaaagctgacatcgatgcggataattatcagtgcgagcgttgcgagccaagggaagtggatcgagaaattcccctggaggaatttaccgaagagggacaccgttactatctctccctaatgcgtggtgatctgcaggtacgacagggcgatgccgtctatgtcctacgagacatccccatcaaggatgagtccggcaaggtgttaccgacgaagaagcacacctatgaaacgatcggagccattgattaccaagagtgcgatatctttcgggtggagcacttgtggaaaaacgaactgggaaagcgttttatattcggacaccatttcctgcgtcctcatgaaactttccacgaaccatcgcgtcgtttctaccccaatgaggtggtacgagtttcactttatgaggtggtacccattgagttggtcattggacgctgctgggtgttggatcgaacaactttctgtaaaggacgccccatggaatgcaacgatgaggatcattgctacatctgcgagctgcgtgtggacaagacggcaaggttcttctcaaaggccaaggccaaccatccagcctgcaccaagagctatgccttcagaaaatttcccgagaagattaagatctccaagagctatgcgccccatgatgtggatccgtcgttgctgaagacaaggaagcaaaagactgaattagacgtaggagccgggccaacaacgatgcacaaggtgtctggcaggcaggaacagcatcaggccaagatggttgggcgaaagcctcgtgggatcagtgccccagcggatgcaactgctgtccatgtcgtaacacccgtggcgcccaataaacagatgcttaagaagaggaaatcgcgtttagagaacgttttgataactatgaagcttaagtgtctggatgcacaaacggcacaggagcaacccattgacttgtcatacctgctgtccggacgcggcgcccggcagcggaagacccagcagtccagtagcagttctacggccaactcaacataa

SEQ ID NO: 41892 - protein, 2217 aa, DROSOPHILA
MRRQQQRFWKRNAHKNPAETDSITDQSSQSKSIKSATQFSVQRSDTDGLRMRISAIRPTLGVVATKKPPKSRKMSTQDTESGCSEAKNRAVSKKVKVKRKKLASSSGISKSDKVSKSKKSQISAFSSDSEDDLPLKVHQQRAPRVLLSAIIQAAQSASKPTLDIGISSSDNELPNLVQAAIKRVESDTEDTTVEGSFRKAAKDKNLPQYQSTLLQDFMEKTQMLGQTVNAKLAEEKVAKAKEETLVQTAVPRKRRGRPKKVVPTVPAPGNSGPAINESADSGVISTTSTTQSTTPSPKMQNENAVPTGSLPIASSSKPKIDMAYLDKRMYATERVLYPPPRSKRRQNNKKTACSSSNKEELQLDPLWREIDVNKKFRLRSMSVGAASGTGASTTICSKVLAAKSGYVSDYGSVRHQRSSHNHNSGYKSDASCKSRYSTKSCMSRRSRAKSCGYRSDCKESGKSGLRMRRKRRASMLLKSSADDTVEDQDILQLAGLSLGQSSEESNEYISKPSLKSLPTTSASKKYGEINRYVTTGQYFGRGGSLSATNPDNFISKMMNQRKETPAPSKSSCKIKSRRSSAASMCSSYVSGVSRMRRRHRRKSFSHNKSLNIDSKLLTEIEIITSTFNSRCRIQDDRLTGSSGKEKLLADANKLQATLAAPSPAQQLTLNGGGPASTLSKPLKRGLKKRKLSEPLVDFAMLSASASGTPNGSGSSNGNTKRRHKKSQSNDSSSPDDHKLPLKKRHYLLTPGERPPAEVAFANGKLNAEAWAAAAAAAKSTASTKSQAQFNARSVKSALTPKKRHLLEQPTSVSGAGSSASNSPLRIVVDNNSISGGKLLDISPSSLCSLKQQRRGGAAKQKVSAAKDLVQLQSPAGSYPPPGVFEPSVELEIQIPLSKLNESVITKAEVESPLLSALDIKEDTKKEVGQRVVETLLHKTGGNLLLKRKRKKINRTGFPTVRRKKRKVSVEQQTTAVIDEHEPEFDPDDEPLQSLRETRSSNNVNVQAAPNPPLDCERVPQAGEARETFVARTNQKAPRLSVVALERLQRPQTPARGRPRGRKPKNREQAEAAPQPPPKSEPEIRPAKKRGRQPKQPVLEEPPPTPPPQQKKNKMEPNIRLPDGIDPNTNFSCKIRLKRRKNLEAGTQPKKEKPVQPVTVEEIPPEIPVSQEEIDAEAEAKRLDSIPTEHDPLPASESHNPGPQDYASCSESSEDKASTTSLRKLSKVKKTYLVAGLFSNHYKQSLMPPPAKVNKKPGLEEQVGPASLLPPPPYCEKYLRRTEMDFELPYDIWWAYTNSKLPTRNVVPSWNYRKIRTNVYAESVRPNLAGFDHPTCNCKNQGEKSCLDNCLNRMVYTECSPSNCPAGEKCRNQKIQRHAVAPGVERFMTADKGWGVRTKLPIAKGTYILEYVGEVVTEKEFKQRMASIYLNDTHHYCLHLDGGLVIDGQRMGSDCRFVNHSCEPNCEMQKWSVNGLSRMVLFAKRAIEEGEELTYDYNFSLFNPSEGQPCRCNTPQCRGVIGGKSQRVKPLPAVEAKPSGEGLSGRNGRQRKQKAKKHAQRQAGKDISSAVAVAKLQPLSEKEKKLVRQFNTFLVRNFEKIRRCKAKRASDAAATASSPALGTTNGDIPGRRPSTPSSPSLAAQISALCSPRNIKTRGLTQAVHDPELEKMAKMAVVLRDICSAMETLKMSDLLTTVSSKKKKPIKTTLSGKLGSTAATSKVEFRSIQAQVEQGHYKTPQEFDDHMQQLFVEAKQQHGDDEGKEKALQSLKDSYEQQKIASYVQLVEILGDSESLQSFKPKEVLSSEEEPGKIAVKKSPGAKERDSPIVPLKVTPPPLLPIEASPDEDVIRCICGLYKDEGLMIQCSKCMVWQHTECTKADIDADNYQCERCEPREVDREIPLEEFTEEGHRYYLSLMRGDLQVRQGDAVYVLRDIPIKDESGKVLPTKKHTYETIGAIDYQECDIFRVEHLWKNELGKRFIFGHHFLRPHETFHEPSRRFYPNEVVRVSLYEVVPIELVIGRCWVLDRTTFCKGRPMECNDEDHCYICELRVDKTARFFSKAKANHPACTKSYAFRKFPEKIKISKSYAPHDVDPSLLKTRKQKTELDVGAGPTTMHKVSGRQEQHQAKMVGRKPRGISAPADATAVHVVTPVAPNKQMLKKRKSRLENVLITMKLKCLDAQTAQEQPIDLSYLLSGRGARQRKTQQSSSSSTANST

SEQ ID NO: 41893 - DNA, 5025 bp, DROSOPHILA
cattaattgtaattatttgattgggtattttcgataagctacaaattcagggatttcgttgtataccttttagattttcatgctgcttgattacatatactttttttgttgctgccacttttgtgcactttttttttcacacacaaactcgaaacagaaaatgccattaatgatactgttgttgttgttgttgtcttgagcactggaaattttcgttacgctttggcagacattacgagccacgctccgcatccgcgacccccaatccacaacatccgcaatccgctagcgatatgatgatggctatatctatattgttgttgccgcggttttttttttttggactactgggatccgaactcggactcgtctatctttggttacacgtagtttgcgactgagctgagagcacctggcgaagcacacgccgaactcaaaactgaagctggtcccgtcttttggccaagagcctcactctcgctctcactctctctctctctctctgcggatgttaacaaaggcaggcggctgcagcggagagccaggtagctttgattttttgaccaaacgatctacctgggtaaatagcaccaccgaggcccatgttaaaaagatccagcgaatatcgtagcattgctatacctgtacggataagtaagaatctctttgacaccatagagttctgatcgagactcgtactccctcccaattccaattgatattagaaacactactgttgatgatcaatcgcctgacagtcacagttacagttccgattttacaactatttaaaccaagatcaaaagatcttaagatcttaataaaaactaatgtctcgatcattcacactttaaacatctaactgtaaactgtttggtgatagcgacagttgtaaaaaaaagcaatccaatttgaccaagcccaatgtttaattaaccagtaagtgattgactttaaaatggagagaaagccaatttattttatttactactatttacagtcaatgtttgctcttcttcttcttcttcttggccttgtgcttggattcttcgctctttttcgattttttcttggacttcagcttcgatttcttagactttttcgagctggagcccttgtgcgatttcttgggcttactgagtttggatctcttgtcattgtcatcagaagaatcggatgatgaggattcgttgctagaactagcatcgctatcttcgctgccggatatgcatttcttttccacccacttttcagctttgcgctttttaggcgcgtgctgctgccaaagctgttgaagtctgtcgtcaatattcgcctctgcctgaatctctggagcagccggcttttgaggaggtgctgtcggtaactttggtccataaatatcctctggcgccacctcagccattgccaactccctatcgtttctcagtcgctcctttcgtggtttgtatgcgattttcagtttgcttccctcgatgggaccaaacttggtcggtgctggttctttggcagcatcctttatcttaggactaaatagggaagcaaagattcctctgggtggcgaagtgtttctcaggacattttgggcggcagctgaggtggtcgatgttacgggtaagccaaaagactcttgcaggatagctaatttatcctgctcggatagttccgtctcttcctcatcgctgtcctcgaaaatgcttttgaacaggtccactttctctgagatgggtttgttgcgggattcatctacagcctgctccaggggagttttcggcacgaaagtatgcttagacggctcttcttttgtattaggtttatcctgtatctcagcttctggttgaggagctggtggcggggatggtggtgtttctaccttttccggaattgatttttcgatgtgcttgggaaaaatagagggggtttcgaagtttgctttagtgtttacggatgtctctagataatcaaatactgaaatttttgccttggctttcagttccttttctggttccagcatggcaccaccaaagggctcggctatattgtaccgcttgcacagcagtgcggtgggtttccacatggtcttggtcctctccatcacgatctttcgctcctccggcggcttctcttgctgctctactttctctgcttgaacattggcttccgaaacgaacctgtcattcataaggccaactaatggtcgatatatctttgccgcctgaataaactccttcttctccatctccctatcccacagagatagtgtaactggttgcattctcgccaggaactccgtaatttccttgtcatccgtaagctttgatgatacgaatttctcatatcgcagctgcttagcttcatcagctataaaaggtttaaaagcgcttgaagaattcatagcagaagctgaaataattgaaatgttataatataataatttctaggcactgtaaattttgcttacgcaagtccttcgtcttgagggctgctctctcttgtatggcggcatttgcctcctttacttccttggctagttcagtttgctgctcctcgccattttcggttatcactccgcccttggtaaagccctcagttctggcattaatgcgttccattaaagatttactatgatccttaaagggatttcgttttggctgctcttccgcagtcttttcctcttgttgttgctcgcctaagatctgcgcacgttgatccggattgagatcgtgtcttcccagaccagaccgtttgtactctgaggctgtctccagtttctgggctctttctttgtccatcggtgcaaagcggcttcgtcgctgcagccagtttctgggctgaaaatccctaggtaaatcaatggcataaggcctctgcagcactgccggcgagttgtcctcactgaagccatcgatgacatgacgctgttggacatgctgctgctttttttgcttgggtttcttgtccgccagggagaaatcgtagcgggtcatatcatcgcgggcatatatatcctcgtcctcttcctcaaaggctcccactccgaaggcttgacctcgtatggatagttgctttttgttagcctgcgcctccatctcaccaaatagattgatgtgttgcataggcttggcagaagaagaagacgatttggacagaatgggatcacggttgagaccggagtagctcatgccaaagcggttctccttgggtgtgtaaaagatcggctcgtagtcgtccggagcaaatgtaatatcttcatcgtcttcgtcctcattattgctatcttcttctcctttgttctctttattagatggtagtccctccgcgccgtagtgttccataagatactgctctttggaatttctggccgtagcttggcgcttctcctttcgagtttgccgcgggcctacaccttggccaggtttccagcccatgcttttaagtattcgcacggccactttatctcgaaccggtcgtagaagttgctccagcactggaagacctggtatggccccgacacccaactcaggctgcattaacttgcggcgcctctgatcagaacgttgcttctgctcgtcctcattggcgaactcatcacgcgtgcgaatgccttgcggtgcgatgccaaactcgcccagatcctcctggtccataaagtcttccggtttcagctgagcctttgacgacgcccgctcgccccgcgaacttttaaaggtctgcggcgtccagccctccagtgagccaaccgtgttccagaagcccgcactgaagccgccggtgaaggctccatggaatctccgctttccattttcgtccttcacaatttgatcctcgatggccactggctttttagccggcacaacatctgtaaaagaggttttaatggtattgggaaagctgataaatatttattacagtactcacccttttgcaaggctggcagcggagttccaaatcggtgtaaatgctcctcctcgtccattctatgctacaaattccatatattagcgaaacaatttgtttggtctgggcgccagtgagtgcacaccacattacagatgacagctgactggagtgttcgcctatcggtcacgttttgctgaaaactgtgaccggaactttaatacgaaattattaaaaaaaattaaaacaagaaataagctaatttattgaaatactaaaatactaaagttttaaaattaaaaataaaaaactacagtaatactttaaaaaatgttacaaattatgttaatgttaatttttaaagccggcggcttacttgtctgaactaaattattaaaataccgtttacttaattatttatcaatctggtattaaaaaaaaacttgtgaagaaataataagcaatatttcaattactattgatgtttaactgaccattgcaatcacggctttgagtagcgatattatttgcaatccgacaggtgagttctgccatctctagttcaaccgcacggtcacatttaagacattgcaaatattttagaggaactatttcgttgcaattttcagctgcctgcaacggaaatacagtgcaaatggtaagcgcaacggcggtgacaaagaaaggcacacctatccgattggaaaaccaggtaaataccgagaataagaccagaacgggagtcgcgacagactggagctacctgtgctgcctgtatgggtgactaatgatgtcaacattttctgttttctctcctcaagccgacggccatttttggctagctaagacgtgattattggcccgaaagcacaagaagtgcagcgcagtaagtaggctggcattccgtgtccagggaacccgataaccacagctccattcccaacgaacagcaatcataagtacatcagttatacccacatcctggtctcatacacgcacacaaacacagcgagagcgagatgtccgagaaaaacctgaaagtgggcgcccgggtcgagctgaccggcaaggatctgcttggcacggttgcctacgtggggatgaccagcttcgccgtcggcaagtggg

SEQ ID NO: 41894 - DNA, 2908 bp, DROSOPHILA
cccagaccaaacaaattgtttcgctaatatatggaatttgtagcatagaatggacgaggaggagcatttacaccgatttggaactccgctgccagccttgcaaaaggatgttgtgccggctaaaaagccagtggccatcgaggatcaaattgtgaaggacgaaaatggaaagcggagattccatggagccttcaccggcggcttcagtgcgggcttctggaacacggttggctcactggagggctggacgccgcagacctttaaaagttcgcggggcgagcgggcgtcgtcaaaggctcagctgaaaccggaagactttatggaccaggaggatctgggcgagtttggcatcgcaccgcaaggcattcgcacgcgtgatgagttcgccaatgaggacgagcagaagcaacgttctgatcagaggcgccgcaagttaatgcagcctgagttgggtgtcggggccataccaggtcttccagtgctggagcaacttctacgaccggttcgagataaagtggccgtgcgaatacttaaaagcatgggctggaaacctggccaaggtgtaggcccgcggcaaactcgaaaggagaagcgccaagctacggccagaaattccaaagagcagtatcttatggaacactacggcgcggagggactaccatctaataaagagaacaaaggagaagaagatagcaataatgaggacgaagacgatgaagatattacatttgctccggacgactacgagccgatcttttacacacccaaggagaaccgctttggcatgagctactccggtctcaaccgtgatcccattctgtccaaatcgtcttcttcttctgccaagcctatgcaacacatcaatctatttggtgagatggaggcgcaggctaacaaaaagcaactatccatacgaggtcaagccttcggagtgggagcctttgaggaagaggacgaggatatatatgcccgcgatgatatgacccgctacgatttctccctggcggacaagaaacccaagcaaaaaaagcagcagcatgtccaacagcgtcatgtcatcgatggcttcagtgaggacaactcgccggcagtgctgcagaggccttatgccattgatttacctagggattttcagcccagaaactggctgcagcgacgaagccgctttgcaccgatggacaaagaaagagcccagaaactggagacagcctcagagtacaaacggtctggtctgggaagacacgatctcaatccggatcaacgtgcgcagatcttaggcgagcaacaacaagaggaaaagactgcggaagagcagccaaaacgaaatccctttaaggatcatagtaaatctttaatggaacgcattaatgccagaactgagggctttaccaagggcggagtgataaccgaaaatggcgaggagcagcaaactgaactagccaaggaagtaaaggaggcaaatgccgccatacaagagagagcagccctcaagacgaaggacttgccttctgctatgaattcttcaagcgcttttaaaccttttatagctgatgaagctaagcagctgcgatatgagaaattcgtatcatcaaagcttacggatgacaaggaaattacggagttcctggcgagaatgcaaccagttacactatctctgtgggatagggagatggagaagaaggagtttattcaggcggcaaagatatatcgaccattagttggccttatgaatgacaggttcgtttcggaagccaatgttcaagcagagaaagtagagcagcaagagaagccgccggaggagcgaaagatcgtgatggagaggaccaagaccatgtggaaacccaccgcactgctgtgcaagcggtacaatatagccgagccctttggtggtgccatgctggaaccagaaaaggaactgaaagccaaggcaaaaatttcagtatttgattatctagagacatccgtaaacactaaagcaaacttcgaaaccccctctatttttcccaagcacatcgaaaaatcaattccggaaaaggtagaaacaccaccatccccgccaccagctcctcaaccagaagctgagatacaggataaacctaatacaaaagaagagccgtctaagcatactttcgtgccgaaaactcccctggagcaggctgtagatgaatcccgcaacaaacccatctcagagaaagtggacctgttcaaaagcattttcgaggacagcgatgaggaagagacggaactatccgagcaggataaattagctatcctgcaagagtcttttggcttacccgtaacatcgaccacctcagctgccgcccaaaatgtcctgagaaacacttcgccacccagaggaatctttgcttccctatttagtcctaagataaaggatgctgccaaagaaccagcaccgaccaagtttggtcccatcgagggaagcaaactgaaaatcgcatacaaaccacgaaaggagcgactgagaaacgatagggagttggcaatggctgaggtggcgccagaggatatttatggaccaaagttaccgacagcacctcctcaaaagccggctgctccagagattcaggcagaggcgaatattgacgacagacttcaacagctttggcagcagcacgcgcctaaaaagcgcaaagctgaaaagtgggtggaaaagaaatgcatatccggcagcgaagatagcgatgctagttctagcaacgaatcctcatcatccgattcttctgatgacaatgacaagagatccaaactcagtaagcccaagaaatcgcacaagggctccagctcgaaaaagtctaagaaatcgaagctgaagtccaagaaaaaatcgaaaaagagcgaagaatccaagcacaaggccaagaagaagaagaagaagagcaaacattga

SEQ ID NO: 41895 - protein, 952 aa, DROSOPHILA
MDEEEHLHRFGTPLPALQKDVVPAKKPVAIEDQIVKDENGKRRFHGAFTGGFSAGFWNTVGSLEGWTPQTFKSSRGERASSKAQLKPEDFMDQEDLGEFGIAPQGIRTRDEFANEDEQKQRSDQRRRKLMQPELGVGAIPGLPVLEQLLRPVRDKVAVRILKSMGWKPGQGVGPRQTRKEKRQATARNSKEQYLMEHYGAEGLPSNKENKGEEDSNNEDEDDEDITFAPDDYEPIFYTPKENRFGMSYSGLNRDPILSKSSSSSAKPMQHINLFGEMEAQANKKQLSIRGQAFGVGAFEEEDEDIYARDDMTRYDFSLADKKPKQKKQQHVQQRHVIDGFSEDNSPAVLQRPYAIDLPRDFQPRNWLQRRSRFAPMDKERAQKLETASEYKRSGLGRHDLNPDQRAQILGEQQQEEKTAEEQPKRNPFKDHSKSLMERINARTEGFTKGGVITENGEEQQTELAKEVKEANAAIQERAALKTKDLPSAMNSSSAFKPFIADEAKQLRYEKFVSSKLTDDKEITEFLARMQPVTLSLWDREMEKKEFIQAAKIYRPLVGLMNDRFVSEANVQAEKVEQQEKPPEERKIVMERTKTMWKPTALLCKRYNIAEPFGGAMLEPEKELKAKAKISVFDYLETSVNTKANFETPSIFPKHIEKSIPEKVETPPSPPPAPQPEAEIQDKPNTKEEPSKHTFVPKTPLEQAVDESRNKPISEKVDLFKSIFEDSDEEETELSEQDKLAILQESFGLPVTSTTSAAAQNVLRNTSPPRGIFASLFSPKIKDAAKEPAPTKFGPIEGSKLKIAYKPRKERLRNDRELAMAEVAPEDIYGPKLPTAPPQKPAAPEIQAEANIDDRLQQLWQQHAPKKRKAEKWVEKKCISGSEDSDASSSNESSSSDSSDDNDKRSKLSKPKKSHKGSSSKKSKKSKLKSKKKSKKSEESKHKAKKKKKKSKH

SEQ ID NO: 41896 - DNA, 3442 bp, DROSOPHILA
aaacaaataaattaaaattaataatgttatcccaagacgtaagaaggattaaaataaggtgctcagaatttaaaacagctcgattttttttttaaatcagttaaaagaaaatgaagggtaataattatttcataggtgtaccgtccttaaagtgaattcaatcgtatatttcgtgatgttggcaattaaatataactgtgcaatagcttaataaaacaaagggatcgcgttttgatatcaatgaaccatttctgggaataaccgaaacaagttcgtttccggtacaagcgatcatctatctaaatccttatataccaatgacaacgaatgatcagccatcagtcgtcaaagtatcgtaatgggctcctctttatgtcccgtctcttatctggcggtcttggcaattatcgtcctaaccagtaatattacagtccaggctaaaaggacattcaggatccagaaattagaaaaggtgactgaggatacctcatatctgcgcagtcgtctgcgtatcgctgagtccgaggaaaatgagttgaaagtcagcggatatctcgatctgaatcaacgactcgacaatgattggacggtacgtagtttataatatatagtggaggaattaattatttattattccttcaacaggttgtgcttaaggtttcaagatccccggatagcgatggagactacgagaaggttttgacattcgaaatgcagctttgcgactttatgaagagctactacaaggatatcttttacgaacggatcaaggaatactcgaatgccccgcatcccagcagctgtcctctgcccaaggaacgctatgtactagaggactatcccttcaatgtcaagttgctcaaaaagctgatgagtccgggcttctatcgcataaagtataccctcaagaatgaagagactaaaatattatcgtacgttctggatttggagttggaggagaactaatcaatctcgaaatttgctagctcaaatgctccgtttattgcctgaaaaataaatctattcgtaggattgcatctgcttcaagacctcgtcgtagacgtattttctggcctcagtgccccaaatgaaatccagatgggcccacttctcgaacggcaccaggtagtccagcgccatgttgggcagttcgtctctcaacttgcggacatcgctcacatcgcacatccagtcattggctccgtagtacaatagaaccggggccttggcattctttagcttgtaatccggagggaagtagctgccgtactcatagggattacggagagcggtgtagtcgaatttacggaactttccagagttatattcctgacaaaagtgcaagttctggttcaccgatgcgccagccggagacgtggccttgatgtgctcaaggagttcctgaccaaatggagagcagcattataagttacatggaaatataatttataggaccaagttcatttccagatacttacgtagtccagctgttcggtatcatagcctccaatcaggaagatctcgttggcgcacatgtcggcataaggagaagtggcctggcacatctctatgcccaaatcctgcttgaacttattgctgggcatgaactccatggatccgcagacctccacgatggcattgggctggcccaaaatgggtgcaaaggcgcgggtcaaggggctcttcatgttgcccatataggcggctggtcccagaagatgggcggacttgatcttgtcattgtactcgggtctctccgacaccatcaccagatagacagtggtaccctgggagtggcccacatattgcacctgctgctgtccagtctttgccaagacataatcaatcatcgccggaacgtcgtacatgccgatctcgttccagctgaagttccagaagatctgccagtaagtgggccagtacttgtgcgccttggagtaggtgttgcctcgggcattgcccatccacacatcgtagccggcatcggccagcatataggccagggatcgctctggacccatgagcacccaatcggaggaagaactcagcatgccgtgcatgaggaaggccaccggtcggttggaagattcacccgttttgggggaatacgggatgcggtgcatagtcaggatgtagttgtcactggtgaccacctcgtggcgctccatcgggtagccatcgtcttcaatgcgctcaccctacaaaacaattaaatgtatgcttatttttaattaattttaatttgtaaataaaaagcaattaaatggtttcactctgtcaaaagaaaaaccaaataataaataacaaatatgtaatattaaattgttttcaaactcttaaatttttacttacgcaatcagaaataggccgagatccggccaaaaccaggcccaatccgaccagtaaaatggtcacttttaacgctcctcttgtcatcgcagtactatgatccgtgtggttcgggatcacagcttttatagccccttgaccactatctatccattgatagtcacaaacaatcagatttattggcaaacgcgtacgaagacccccaagaaatcagttaaatatatatgagagttagatacacctggcctaatcagcttcttgtttagattgaaatcgcgggtctcaaatttacaatctaaagaaacccaaacaccccgccaaaacgacggattttcttatcgattttcaattattttggtaccccttactttaaaaagtcaagcatataaaatttccatttatttcaagacatttgccttttaagagaccttttattatatcaccaatggaaatttataaaaaaaaaaaattatactaaaacattaataacaataggctacccttaaattcgggcacattaaaaattgagaagagggtattctgcagctcgatctttttaataaggcatataatttttattattatttgcaaatacgtaattcgttgaagataattgttaaatatagaaaatccgattgcaaatgaaaacaataaaatgcctgaatcacgccagcaacatgttgctagtgtcgtcggcaacatgcagcacttatgcagcagcaacatgtgcgcacattaatccttatgcggcccagttagcactttagcccgactttgtagcctggtcatcaaaatcagggcttgtgtgatatcgatttatagaggccacacatgattggtctgccgatggtgtataatacacgtatctcccgagccggctgcccctgacgacgtgaccataacattggcattcttggcccgaaggcatattaccatatcgcacttatgacagttcaagccataattcagtctagagtggagctcattttcaaaggatttccaaaatgaaacaccaacaagttacggtggactattggaccatgtttaagacatcgggattgtgtcttttactggccatttgcggatttgtact

SEQ ID NO: 41897 - DNA, 1211 bp, DROSOPHILA
actgcgatgacaagaggagcgttaaaagtgaccattttactggtcggattgggcctggttttggccggatctcggcctatttctgattgcggtgagcgcattgaagacgatggctacccgatggagcgccacgaggtggtcaccagtgacaactacatcctgactatgcaccgcatcccgtattcccccaaaacgggtgaatcttccaaccgaccggtggccttcctcatgcacggcatgctgagttcttcctccgattgggtgctcatgggtccagagcgatccctggcctatatgctggccgatgccggctacgatgtgtggatgggcaatgcccgaggcaacacctactccaaggcgcacaagtactggcccacttactggcagatcttctggaacttcagctggaacgagatcggcatgtacgacgttccggcgatgattgattatgtcttggcaaagactggacagcagcaggtgcaatatgtgggccactcccagggtaccactgtctatctggtgatggtgtcggagagacccgagtacaatgacaagatcaagtccgcccatcttctgggaccagccgcctatatgggcaacatgaagagccccttgacccgcgcctttgcacccattttgggccagcccaatgccatcgtggaggtctgcggatccatggagttcatgcccagcaataagttcaagcaggatttgggcatagagatgtgccaggccacttctccttatgccgacatgtgcgccaacgagatcttcctgattggaggctatgataccgaacagctggactacgaactccttgagcacatcaaggccacgtctccggctggcgcatcggtgaaccagaacttgcacttttgtcaggaatataactctggaaagttccgtaaattcgactacaccgctctccgtaatccctatgagtacggcagctacttccctccggattacaagctaaagaatgccaaggccccggttctattgtactacggagccaatgactggatgtgcgatgtgagcgatgtccgcaagttgagagacgaactgcccaacatggcgctggactacctggtgccgttcgagaagtgggcccatctggatttcatttggggcactgaggccagaaaatacgtctacgacgaggtcttgaagcagatgcaatcctacgaatagatttatttttcaggcaataa

SEQ ID NO: 41898 - protein, 394 aa, DROSOPHILA
MTRGALKVTILLVGLGLVLAGSRPISDCGERIEDDGYPMERHEVVTSDNYILTMHRIPYSPKTGESSNRPVAFLMHGMLSSSSDWVLMGPERSLAYMLADAGYDVWMGNARGNTYSKAHKYWPTYWQIFWNFSWNEIGMYDVPAMIDYVLAKTGQQQVQYVGHSQGTTVYLVMVSERPEYNDKIKSAHLLGPAAYMGNMKSPLTRAFAPILGQPNAIVEVCGSMEFMPSNKFKQDLGIEMCQATSPYADMCANEIFLIGGYDTEQLDYELLEHIKATSPAGASVNQNLHFCQEYNSGKFRKFDYTALRNPYEYGSYFPPDYKLKNAKAPVLLYYGANDWMCDVSDVRKLRDELPNMALDYLVPFEKWAHLDFIWGTEARKYVYDEVLKQMQSYE

SEQ ID NO: 41899 - DNA, 15050 bp, DROSOPHILA
tttcactatgttcacctcctgctcaccgccacgcccccttttggcagcactcgacttagatgtcaccacccacttttcagcccttttgagcagcctcaacgtcaagtcaagtcaacttatttacatttccatttgatgcttgatgcggattttcaccgactagtttgagaaagtttgtttttcgagagcttttcaagttagtcccgatgccctgccacgcccccttgcccttacatcctcaatttgtttgcctctgtgggttttattattgcggaacgagattatttattttttgtcattgaagtgatctaattaaagtttgtgtcggcccaaaaattatacgcgccgaagaaggggtaaggaaaacgaaatttgttttcagcgaaagtttggagcgggtcaccaccccatttgaaggtgcaacttgttttcgtttccgacgaccaaaagttgttaaaagccaaaaaagtaatttatttcggttttactgccttcatcccctcgctgtgttagtgtgtgtgtgtgtgtttcattctgcaaatgtaatgagatgttttgacccgctaacttagtcctttcttctaaccccttcttttagccttgtggatgctgatttggtttgaagccttggccaagttctcttggcatcggctgcttgataatcagatttttccgcttttcgtccttcttcgcttttcacatagaaatgggttaactttttcagtcgactcgggggttaagttttcacatagccaagccggactaatcaaagatggaaatcagttttgttggattactaataccttaaatggaatgacaaatttccggacaaagatgggatgacatgatattcggaatatatcgatgatgcgattctagcaaggtgtctaacacaaaaacataaaaggataatgaaattaatctttaggaactttaatatgcagccgttactttacttactttgaaacgtatccttattgaaaatacacaagtcacagtattcattcttttggtacaatttatttttcagaagaacacaaattatcgattttcacttttatatttacaatattcttttgttttccttcttttctttcgttaacttaaatttgtagttaaatattaatcatatttaatatgtataaatcaaagcagattcttagtgtataccgtaagtgtataattgtttcattctctcattaattttcaatgtagataacttagagaatctgaaatacggtatcttatacggctaaagtatcgataaaacaatatttgttgttgtgcactccactcgaaaaatgttacatatagtacttatatttaaattggtatttataatacacgtactgtgggtaaaaacatctatacaaatattctttgttgtttgtgtttttaagacctcaaagttaagtacagacaatgagaatccttaaacaaactcaatatccgtttcaagatctaaaattattgtaccacatttagaatatcaatggttgtatataagtaaatatacttaatgtatatgtgtgtttgtaaatatcagcaaatattccagtagagtctctgtataatatatgttttggattgggcttttaaatcatatacaactcaaggcctgcgaaaaattagagattacaaagttggctaagtgataattgacagcatttgaaataatagacatcaatcgaaataatcggtaatcgcactaatcgatttctttccttctactatccttgcacttttcaaataataaataaataacttaaacgagttacgaacctaaatagaaattggtttatccagttttgtcatgggcgagtcaagctctagctatttacaatttcccccccaatgtataatccttaaccctcactcctcgccctcgtatcccagacaccacaattgggacagaggcacggctgtggactagcttcctgccacaccctcttcctttcgcggtcttaggatgaagttgaggttgtagttcgtgttaaccgcgtagtagacattcgcattcttcggcatcaccagttccttatcgggtaggacctgcgccaaagtaaacctatccggatcatcctccagacccaatttaagcatcgcatttcggataacctgcggcgtgcgctcgttatttcccagcataatactcttgtacagcacaatcccatccagctcgatgttgtctgtttcataggtcacccgaatgatatagaaatcgggagcagagtgaggggttccacttgatggttgcaccaactgagcattgatatggggcgatccaccattcgtagtgccatttccgtgagatttcagaccatttcccatagactgagagtgggtcagcttgccggactgccgaccgccggagttactggagtccaacgacagattggacacactactcgaggcggacatcaaggaggcgtgctgatggtggacatcccgatccaaggagttatgtctggagctggtactactgtttagttcgcagtagaactgtgatcccgctccgctgctcgaattcgagtgtatggagtcagtcttgcggtggcccataatagaagccgtcgatgaggcggtcgtgtttgttaaagaggtgttagtgctgaccaccgatttccgtggcgccggcggtggtggttccagtcgacaactcagctcaaaggcttcacgctcatcaaacactggcattgagttgaaccaatgatcaaagagcgcatccgcctggagattatatgtgttagctgctccctgaagtaacttgatctgggccagaacttcgaactccttgcgcttcttgtcgaagtttatgagcttattctcggtgaggtagtccggattggccgtatggatcatggtcaggtcggtaaggaatgtacccaaatagggtatcgttccatgcgatgtttgtgttcccaaattcagaataagcttctgcagatgcctatcgctgtgatcactgcctggatctggatttttggccgttccttctcgtttcaacacttctcgcagagtccaagcattgttatcctccgagcaaatattcgccagctccgtaaagacttccatctatgagcaaaagcataattagtctacaaattaagaatgtgtatgatacaacacaacttaccctttctttaggcagcacttcccagatcttggagaggcggtatattgaattggagtttagagccgaaatgatggccttgagcgaactaaagtttttgagcatgcgcaactcttgggcaatatcaatccatcgtgaaatgttcagagcgcgctcctggtaattaaaatccaatcgttaatttacactgtagtcggcagagaatcatgtataaaaagagacacccacctgaggtttcaggcgatcgatcaggatactggacaccacccggaagagcactgcattaaactggttgatggtggccaccacagtctcggatcctccactatcacgtcgtgcccacgtgtgtccgaggcactggtggggaatcagtcgcttaaagagttccgtatccatacgggtcaactgctcagcaaaatgccggacgggcacatgcggaaaacggaatgcctgcagaaagtgggtaggtccacgatagatgggcccgtggcccattggcgagaggtacatgccattgaactgatccgtgaggtcatacgaagagccatagtgagtgggaatcatgaattgctgcatctgttgtgagcgcgctgcggaaagccacgaatgaccattgttctccgagccaccgcttcctcctccatttccatagagagactgtttgatgagccgttccagacgattcagcaccttgatgtgcagatcggatcgtttcagccgcttggtggcaaatgccaagatctgtggataaacatatttgatcaataaatatgaattttgcaatttagcactttatttccttacctgttgcaggttatcctcgtgccaatcctccgggaatccatccagccagacgtgcagcgctgagactagggttttcttgtgctgctcgtgaatggaggcgtgtggatcgtaggcgggatccatgacctgtccattttgctgtgcctgctccaactcctccaggtgcttctcatgcagagcatcgtaccgttgcgtcagcagactgagcacctgcttgggtgtggagaaggtgcgatatgtggacaggaacacgttgatgaaggtggactccagctcgccgtcgtcggtggctaacgcctccaccaatcgagccaatgtagccgccttaacgaaacgcacgcgtacagtctcccactccagatgggaaatctcatcatctgagtcctgagtaaaaatttaaaaaaaaaaaacatttaattagatatacatatatgtatttttatcgatttgaagatttgttagactagagatacaaaatattttcgggtgtttgaaattatgtcaccacaatttttccccacactttctgcccaattgcaatttacttaaaagcttcgttaacattttagctaaagatacaatatttctatcttcaaattgagctgccaagccatttcagccgtccaggtaattgatatttgggattactcacattgctggctgtgggcgtcggtcggtggtatcgcactttcttcaggtaaacggtgaaaattgcattcttctcgtgctcttcgccccaaaggcgccacgtgggctgcaaggtaatgaaaaaggaaagtggattagtcttgctggcagtgattgctttttattttgacttaagtgcttaacgcgtgaactctgtgtggaaactttgttttgacagcgtcaaaattggctttacatttttctatctagtgaggaaattataaataaaggtctacaacgtttgatgtattcaataaatatataattaaatgatttcttaaatctatgtcaaagatcacggcttacttatagtcgatcaagtgtatcattcgtctaaatatagcttcagtatccgacgtatttttaatttatttccccttaaatacgagttcaacaatttttaaatattcccaatataaacattaagccattggatttttgcacattgtttcgaatgagaataatatttgtttttgtggaaactcggttgtctggcatttccatgtccatttccgtttcgtgtggcatctttggcaatgttgaggcccaaacaacatttgttcatgtctggtcgtggtattttaattgatacataaattctttgctaatttgttggatagagcaaaactaaatgtgtttcgaaagagatgaaaatgggaaatttttaaatttgtttcgcctaattggaaatgaaacagggaatttaaaaaaaaaacaaagaaaaattgcgcaatttcaaatttcagctataaagtgcacattgaagtttgtagacaagttgtcttttcgattagtttcacacgcattttttcacgtatttttaccacttatttcccaaggccctatgcctccggaaaatgcccaacatattttcgcttaatcaacgtcgaagcattaaaattctaattacaaaataccttttgtgtttatgtaaaaactatgtaaataccacacgcaaaagacgggcccacataaatgagtgcataagtatttaaattgaaatttactcgcagcaatgccaaaagcgtgaaaaagcattaaacgagaactgaatgaataaacgagcagcaaaagcaaccacaaagggaaaggcacgaaaagttcggctgtgagtggtggcgccccccataaataaacagcaacaaaagttacaacaaagccgtggattaacacaagtcactatacaaagattttcctgcacggagaaaaaaaaatgcaaagtttcttagtcattttgggtcctctaatgctcagttagggaagatagtttctaaacaaactggcagatagttcatcttactgcaatagaacttcgaacctgctttatttcagtggtaaatattgatagcattatatccaataattgcttaatttatatattttatatcatattatgttttataaagacttattcgtaagcgcaaggtaataaatatgctaaatattttggaagaaatgccatattttttctctctgcaatgcgacaacagcaacaacatccagctagctgaccccaaacgagaatccgaattggaatgcaaaaacataaacatgatttgacggtggtggggacgaaacagggggctacacacacgggcacacacaaggggtcatccatccatccatccatcctagacagacagacacgaatctcgtgttgatccaattaattgcccgcatgcgctttgattatacgaaaacaaaggcgaagcaaattgcttaaatgtttagttcactttagctagccaggcagcatttcgtaaatttttattgaagtactttaatatttcgtaaaaacatggaactctacaaaatgagtacacacttttttcaggcgcaaggcgttaagtggcagaaaagtggggtggaaattgttgatgttttgtgtaattgtgcataagattttgtgtgttgcgctgagatggatctggaaacagctgaaacatttccaaatggccttgcaaaaatataagacacgatgtggcaatgtaagggcattcaaagttaatatctatctatccatttgcattaaacacaacatgtagtaagtacgcttttcaatagccacagctgggaaaattgatgtttgactagagcttcctggtgaaaatgcgaacaaaaaataagaaacaaaattgcatatgtttttatctaattgttgcttaattgctgttttctgttttattttttggctggctgatttacacacacttccccttcccaaattcattaagcatatatatacatatgtacatatacaatgtgaaggcaacgtttaatcaattccgattcacgatcagcgacttttttcttagcggcatctgccaaaaactttgcccgctgttcttgattcgcattgtggaaaacaaatacacatgtattgtacatacatacaaacatatgtacaaacatatgtagtagcgtatacgtatttatttaatttatttgttatttatttggcattttttgctgtggatggatgccttatacgcgccgtgttcatttgctgggatcatttggctgtgctgtttaattaatgacgcattatggcagccaagttcaattcaacatttgcgtcaaaagtgtaggaaatactagtactgctggttgaaaatgatttaaagccatttattcggcagtaaatcaagttttaatggccattgatttattgcctgcaagctgagaatttgactcaatactaccaattattatggtgcatcagcatattaaattcaaacactaaactaagatagactacgttttacggaaatttcctctgaaagtacgattaaatgttgcttggtgacaatttcattcatccacttccgcctgtgaatttcactaatctattattatcaccaagttcaagttcgtcgagaaccaagtgatttctcgtgctatcaaacactttggctttgtatttaaactaatttaattaagttgcaactagcgtattttctaaaccacactccgagatgtctattattttgagaaagagcaaatgaacaattgccacgacaatttcgcttcaattatttgtctattgcctcagctcagcgccttaaattcttgcgtgcaactcgagcaattaattagtgccaattaggcaatcaattgagtaaacataattaagccggatgtgactcaggtgtctgtaactcaacgactgtctcatactaaatacagacaaagtgaagcaaaacatgattcaaaaatggcatgaacaaaaaagtttatttgaattatcactccataccgtttaaatttaatgtgccaactaattttcgaatgattaagctagtctcaattcatttttatatactatataaatatactattatagatataatatattttgtcagtctatttttaaataatacaactttcaacaaaagatcactgaaaattcaattagcaattatcagctactatgccccatttaccttcgtgtaggtatagtttttggcatgcagatccttggttttcttggagagattcctcaaagtggctcccgtgcaggcgcatagatactttaaactggccaccacctttcgctccgcattgagtaccgcggatgagacatccaagtcgtcataggagtgatacgaactgttcctgcgcggcttggcagatgcggatctagatcgccgctgcttggcttcctggtgcttttgacacaaatgcgttggctccaccggggtcatggactttttccgctgtcttggacaggtgtgatggtgatagtgcctcttggaatcctttgcatcctgctgctgctgctgctgctgccgctgctggtggtaggcgcaggattggctggtggtgttgttgttcacctgccgccaggcattgctaaagtccgtgttatccagcggaggcatcagggcgcgattatatcctgtcagatcctgcagctgataggcgcaggtgtgactcttgatcagagcgggcttctgctggtgcttttggctatgcgggcatttgcagttggcgcgacttgtgaaattctgtagatttaagttgttgggtttggttggatttcattttttaatattatttttggggggcggtgttaaactctgaagagtttgctttgtacttgatcttggtctcgggctgtggttcattgattgactgcaaccctcaacccacttgagctgtcttctcagttcgttcacagagcccctgaccttggctacgatttgactccaaaggcacacacgaccacaatcgagtggattgttcagctgtttgatgtttatgagctactcaacccaaaaaaaaaaacaaaaaaaactacaaaaatacccaaaaatagaaaaaaaaacaatacaccaaacaaacatacaaacgaaaagtgtatctttgacaagcgactttgtacttcaagtggcgctcactactcactcatccgcaccatatttggttaatgggaagtctttaccccgcgaatcccctatcccctggggcagatttacaggcaatctttgtttaaccatttcatattatattaggcgcgttgttcatcccggcctataatcgtaaacaacatcccaagtacgacgattccggcctcccaatcgggatgtgttcaacttttaccaggaagttattacagccaactagtttgttttcgttgttttcgggccatagtatttcacggctattgacagctgcgcacaggtttcgccaaggaaatatattcatccgaaaatactctagcaatggataggaaaggaacaggaaaagtttcgaacaataaacaggcatttttaaaaatcaagttcaacacaaaagtcttctaatcatatttaataatgtgcttcttccacaacaaataatattattattagctgcatcttatttacattcaaataataggctaaacttgaatattcgctcataaaaaaaagaaaaaataatattttcaatacattttatatatttttgcttataagaatgattgtttaattattatcttttcttgaagagcatttccgcttcgttcaattccaaagaaagctccacaatatttgcctagataaatattttcatgcctgtggtgtggaaactgcgttgcgctttccttttctccatcggttttatggtttttacctcgccagagatgaactggcccagcccatttcatgtagagcttagccataaatttaggccaacaccgaccattttgcaattttgctcaattacagcccgtaccggctccattgccaattacataactcgtttctggccaaattcgtgcgaagagaaatgtcatttggtcggtaggtctttaagccatctctctcttgacaacgaaaagacaaaaacaaattattccagaggggtcagcgaagtggtcgtgcgtgaggcaaggggaaaaaggtcggttccagaggtcccgaatctggaacgtgcctcgcgtggccaagagcaaccagattatacatatatgatgccttgaaattaaataagcgataaatgcatcgaagaccaaaccatcaaatacgcatcacgaaaattaaatcgagcacaatcaaatactccaaatatattcgaataccgaccgataattgaggcacgttcgcctggcatgcgtcattcggtggagaaggactaggattttcttacccccaattaaagctccatagtcgagcatgaataatgcccatctgggttacggatacaaatttattggtcgaattagttttgtgcaatgaaccatagtcatatgcaaatttatactataaaaagcaattatatatcataagatcaagaaataaaaaatttttatttaaaatactgtttgagctaaaactaccaattgtgagactaattttaaatgcctcatttaatttgcttaaatactccaaacaatagaaaaatttctaattcgaaatttcccagcttaacaattaagcttgaacagaacttagtaatgattagccagaatattgcatattatttatgatgtaatatttagttagcactgcgctgctggcgataagaaatatgcttgcttatttcgcaaatataagaaagcttctccaagttacactttgaaccgaaaactgattagaataaatccttcaaagctccaggccaaacaacccagacccatatatgtatgtatgtacatattcatatatgtttgtaaatatgcgcaatgcgcatacttatagaaatctttttgtttgagattccttcgtctaatcaatatgcacatatatgtattgcattcgattcgtaccaagccccagaacctaaatacactcatttcattcacgattattattacagcgaatgccaaacgagaccgaatgaaacagaacacaactcggcgaggaaatgacgatttgcatacggttgatattttaccttttgagttcgaatgattcatcagaaaatacccagcccgtgcaaaaaaaactgcggcagaaataaagctcattaagtaatgaaataatatagtattataatgccagacgacgggcaattgtcaaacatattcgtgtttgtgtatacaaggcacccaattataaagaaataacatccaagtatgagggggcgcctgattggtcggcccacatcatcatctgtctatatataaagcaggtgacctttcctccagaaaagcgtgtgggtggcgttttctgcttttccgcccagggggggtttctctcaattacagatcttcgcaaaaatagccagaaaccaaaacaaaggagagtcgaaccgcaacatcaaagcgaaatggtactgcatttgcatttggggtgaatttatcaacaaacagccatacagctgaggtcacaatattgatagattaaaagtgaaaatacatctaaggaaatggatcaatatttaaatgatgaaacatgactctgagatagtaaaatagtattccgtttgagatattcgatttataggtaaaagtattgcaatttgtatcgatgtaaaaacagttctttgagaatttcctagttcttggcggcaatagattaggtgtccgaaataagcaatacatttcgcttgtcttgaaaaatgaaaaggcatttattttgaccgcaattgtagacacaaatctctatttttaaatcgacgacccctggcacgagttttgtgaattgcagcaacagaagcagcggcaaaaaaaaaacaacgcaaaacaaaattgaaaacgccaagggaaaaaaacgactgaaactaaacaccagtctctcccccttccctctgtcatccctgaatgactgactgactaaatgactgactggctaaatgactctgactgactgtcagttacatgcgactgcatccgacgcagtcaacttgacaacatttgctgctccctcggtgcacataaaaaaaaatgaagggaattatgatcaaatttaattgcatcggcctactaacacaggtccatcaagattttacatcgtttgtgtttatgagaaataatagaacaggcattacttggcattcgatattctatccctaatgtctccttttcgctatattacaacataacgaatatcaaccgatgccacatcctgttgcaatttttaatttcaaaaaccataattcatatccgaataaaacttttatttaacgtgtatatgtacatatgtatctgtctctactgcagagcagctgtcccgctctttcggctattatcaaaccacatccgttgggcagcagcagagatgatgtgcaaacaatacaaaaacatatcaacctaagctaaagtttgagccactgagcatagctccccacgtaaattattttttttatgcattcccccatcattcgccagtgggtaaaggaagtggggggcggagcttttgttttgcatacaatgggagctgataaatgatttctaggggcactccgcataaatggatgataaagaaacgaaaatataactgggactgcaactgaaatgatctcaaactgattcacctttaaattcatagctttaattcgttatctttcacctgcgaaacaaattatatacatcacttaagaataccctacaccatttgttcccaagcataagtataccaattttgaatgctttttaattagcatataaattctcgaaactcccaaaacaaagcttctccaagcttggcagttcccatatgattcatttataacttgtaaaaaattcccgacttttatcgattcctattccttccccaccaaaagaaggtgttttatttctggactccacttaggcgtaaagtttccataccattgcatttttgcccataatcattgttgacatttccttgtgaatcgacaccaagacactacagtaatccctctccacacaaaaccagatcaagtacacagcaactagttttcagggttgaaaattctcggacaaaaaaaggtgcgcattatcgataattatccatgtcgttgatttaagggcgagggtcaatagtaataaaattcaagccattaatgtttttatcttatcaggagtttgttaccgatgtattgcttattgcagaaatatgatgtacttgttttaaatatattgttaaaaaaaaacatttcaatgtatcaacgttcgagtgaccactgtaagggcaggataagaaccaatagatctaaagtgcgctcctttctaatccggcctgatggattgcgttgtttttttttaccatttgagattggcttttgttccttgagaaatgttgctgagatttccacggatgcactgcttgggttttcctatccgttatcctcttctcgtcggttcgctttaatttacacgtctcctttaatggcttctggtgttttatttttacacccaagtgcagttcaatgggtggtgggggtgttgtataagtaaaaggcaagtaaaatcgatattcctgctgctctttttttgtactgggcttctgtgttctggccgctataccgttgttcagcttcctgggaacgatgagtcaacgggacatagagaaacacacccagtagcagtagaggtgggggggttaatattggtatttgttctccggttagtggtaagtggtgaatccttggtccgcgaagaagggttcgttgcactacgtctatgcgtctgcctggcaatctcctctttgctctcgtgctttagcacgtcttccctactatttatttgttttcacttttatctcttttccttttgctaatgctgcactcgcacacacgtaaacggcaattttcgggataccgcttgcattttcattcgcttggctgaaaatctcaacatgagatatccatgttattacaaaaacattatacaaaattcacattcgggggtttctctacttggaaaaggggagcgtagggggcgcagagcgtaaaacgcgcgcgagacacacacacaaagctctcggtagagagacacgcgacgcaaccgccgccaacaacagtcgaagacgaactctgcccgcttagaacaaacgaccgcccgaaaccccatcgtctgtatccaactctcgcttactctctcccacacgctctctctgtcggggatccactctctgtcattaagaacgcaagcattttcgggggatgttcttactcgacggatgtaactgtagcatccccgttctctcaattgcactctctcgttcgcttttctcaggtactcaagttttcgaccgtgggaacttctagcaaaacacccactatggttttacaccttgcgtgaaggtatattggttgcatcgaacaagttcaaaaacacagttaacattaacaatgcattccaatattggttccgaatttaaaacacctacatattctcacaatttatagtcaataaacttaaaatagaactttttccagataaactgtcaatttaccattgaattggtaattgattttatttcttttgcactatggtaacttggccttttaaatcaatttaaacaaatttctttaaaacttcttcctagtgactgttgacacgctaaatataaataaataagtttcttaaaataaatacacggtatatatatgtcgtatcagaacaaacataaaaatcttacttgctctggccattcgcgctctgtttatgttttttctgatgagcaattgactgttggcttgtttgtttctaatcagaactctctctcaactctctctgtcaattttagtattttttggtatatatttacactgacccccacaatagcatttgtcttcattatagcttcacatttatcaatggaatttatgggcctcctaaacctgtaggattttattccaaatttttgattaatgccaacaaagaaatttaaataattttcttccatgttttgtttggctttttaggctatcatttgaccaaccgttcaaacatgtgaactggaatgacataattatggaaatgggaatacctgagtgttgtctggtatttggtaac

SEQ ID NO: 41900 - DNA, 4545 bp, DROSOPHILA
gttgttggcggcggttgcgtcgcgtgtctctctaccgagagctttgtgtgtgtgtctcgcgcgcgttttacgctctgcgccccctacgctccccttttccaagtagagaaacccccgaatgtgaattttgtataatgtttttgtaataacatggatatctcatgttgagattttcagccaagcgaatgaaaatgcaagcggtatcccgaaaattgccgtttacgtgtgtgcgagtgcagcattagcaaaaggaaaagagataaaagtgaaaacaaataaatagtagggaagacgtgctaaagcacgagagcaaagaggagattgccaggcagacgcatagacgtagtgcaacgaacccttcttcgcggaccaaggattcaccacttaccactaaccggagaacaaataccaatattaacccccccacctctactgctactgggtgtgtttctctatgtcccgttgactcatcgttcccaggaagctgaacaacggtatagcggccagaacacagaagcccagtacaaaaaaagagcagcaggaatatcgattttacttgccttttacttatacaacacccccaccacccattgaactgcacttgggtgtaaaaataaaacaccagaagccattaaaggagacgtgtaaattaaagcgaaccgacgagaagaggataacggataggaaaacccaagcagtgcatccgtggaaatctcagcaacatttctcaaggaacaaaagccaatctcaaatgaatttcacaagtcgcgccaactgcaaatgcccgcatagccaaaagcaccagcagaagcccgctctgatcaagagtcacacctgcgcctatcagctgcaggatctgacaggatataatcgcgccctgatgcctccgctggataacacggactttagcaatgcctggcggcaggtgaacaacaacaccaccagccaatcctgcgcctaccaccagcagcggcagcagcagcagcagcagcaggatgcaaaggattccaagaggcactatcaccatcacacctgtccaagacagcggaaaaagtccatgaccccggtggagccaacgcatttgtgtcaaaagcaccaggaagccaagcagcggcgatctagatccgcatctgccaagccgcgcaggaacagttcgtatcactcctatgacgacttggatgtctcatccgcggtactcaatgcggagcgaaaggtggtggccagtttaaagtatctatgcgcctgcacgggagccactttgaggaatctctccaagaaaaccaaggatctgcatgccaaaaactatacctacacgaagcccacgtggcgcctttggggcgaagagcacgagaagaatgcaattttcaccgtttacctgaagaaagtgcgataccaccgaccgacgcccacagccagcaatgactcagatgatgagatttcccatctggagtgggagactgtacgcgtgcgtttcgttaaggcggctacattggctcgattggtggaggcgttagccaccgacgacggcgagctggagtccaccttcatcaacgtgttcctgtccacatatcgcaccttctccacacccaagcaggtgctcagtctgctgacgcaacggtacgatgctctgcatgagaagcacctggaggagttggagcaggcacagcaaaatggacaggtcatggatcccgcctacgatccacacgcctccattcacgagcagcacaagaaaaccctagtctcagcgctgcacgtctggctggatggattcccggaggattggcacgaggataacctgcaacagatcttggcatttgccaccaagcggctgaaacgatccgatctgcacatcaaggtgctgaatcgtctggaacggctcatcaaacagtctctctatggaaatggaggaggaagcggtggctcggagaacaatggtcattcgtggctttccgcagcgcgctcacaacagatgcagcaattcatgattcccactcactatggctcttcgtatgacctcacggatcagttcaatggcatgtacctctcgccaatgggccacgggcccatctatcgtggacctacccactttctgcaggcattccgttttccgcatgtgcccgtccggcattttgctgagcagttgacccgtatggatacggaactctttaagcgactgattccccaccagtgcctcggacacacgtgggcacgacgtgatagtggaggatccgagactgtggtggccaccatcaaccagtttaatgcagtgctcttccgggtggtgtccagtatcctgatcgatcgcctgaaacctcaggagcgcgctctgaacatttcacgatggattgatattgcccaagagttgcgcatgctcaaaaactttagttcgctcaaggccatcatttcggctctaaactccaattcaatataccgcctctccaagatctgggaagtgctgcctaaagaaaggatggaagtctttacggagctggcgaatatttgctcggaggataacaatgcttggactctgcgagaagtgttgaaacgagaaggaacggccaaaaatccagatccaggcagtgatcacagcgataggcatctgcagaagcttattctgaatttgggaacacaaacatcgcatggaacgataccctatttgggtacattccttaccgacctgaccatgatccatacggccaatccggactacctcaccgagaataagctcataaacttcgacaagaagcgcaaggagttcgaagttctggcccagatcaagttacttcagggagcagctaacacatataatctccaggcggatgcgctctttgatcattggttcaactcaatgccagtgtttgatgagcgtgaagcctttgagctgagttgtcgactggaaccaccaccgccggcgccacggaaatcggtggtcagcactaacacctctttaacaaacacgaccgcctcatcgacggcttctattatgggccaccgcaagactgactccatacactcgaattcgagcagcggagcgggatcacagttctactgcgaactaaacagtagtaccagctccagacataactccttggatcgggatgtccaccatcagcacgcctccttgatgtccgcctcgagtagtgtgtccaatctgtcgttggactccagtaactccggcggtcggcagtccggcaagctgacccactctcagtctatgggaaatggtctgaaatctcacggaaatggcactacgaatggtggatcgccccatatcaatgctcagttggtgcaaccatcaagtggaacccctcactctgctcccgatttctatatcattcgggtgacctatgaaacagacaacatcgagctggatgggattgtgctgtacaagagtattatgctgggaaataacgagcgcacgccgcaggttatccgaaatgcgatgcttaaattgggtctggaggatgatccggataggtttactttggcgcaggtcctacccgataaggaactggtgatgccgaagaatgcgaatgtctactacgcggttaacacgaactacaacctcaacttcatcctaagaccgcgaaaggaagagggtgtggcaggaagctagtccacagccgtgcctctgtcccaattgtggtgtctgggatacgagggcgaggagtgagggttaaggattatacattgggggggaaattgtaaatagctagagcttgactcgcccatgacaaaactggataaaccaatttctatttaggttcgtaactcgtttaagttatttatttattatttgaaaagtgcaaggatagtagaaggaaagaaatcgattagtgcgattaccgattatttcgattgatgtctattatttcaaatgctgtcaattatcacttagccaactttgtaatctctaatttttcgcaggccttgagttgtatatgatttaaaagcccaatccaaaacatatattatacagagactctactggaatatttgctgatatttacaaacacacatatacattaagtatatttacttatatacaaccattgatattctaaatgtggtacaataattttagatcttgaaacggatattgagtttgtttaaggattctcattgtctgtacttaactttgaggtcttaaaaacacaaacaacaaagaatatttgtatagatgtttttacccacagtacgtgtattataaataccaatttaaatataagtactatatgtaacatttttcgagtggagtgcacaacaacaaatattgttttatcgatactttagccgtataagataccgtatttcagattctctaagttatctacattgaaaattaatgagagaatgaaacaattatacacttacggtatacactaagaatctgctttgatttatacatattaaatatgattaatatttaactacaaatttaagttaacgaaagaaaagaaggaaaacaaaagaatattgtaaatataaaagtgaaaatcgataatttgtgttcttctgaaaaataaattgtaccaaaagaatgaa

SEQ ID NO: 41901 - protein, 954 aa, DROSOPHILA
MNFTSRANCKCPHSQKHQQKPALIKSHTCAYQLQDLTGYNRALMPPLDNTDFSNAWRQVNNNTTSQSCAYHQQRQQQQQQQDAKDSKRHYHHHTCPRQRKKSMTPVEPTHLCQKHQEAKQRRSRSASAKPRRNSSYHSYDDLDVSSAVLNAERKVVASLKYLCACTGATLRNLSKKTKDLHAKNYTYTKPTWRLWGEEHEKNAIFTVYLKKVRYHRPTPTASNDSDDEISHLEWETVRVRFVKAATLARLVEALATDDGELESTFINVFLSTYRTFSTPKQVLSLLTQRYDALHEKHLEELEQAQQNGQVMDPAYDPHASIHEQHKKTLVSALHVWLDGFPEDWHEDNLQQILAFATKRLKRSDLHIKVLNRLERLIKQSLYGNGGGSGGSENNGHSWLSAARSQQMQQFMIPTHYGSSYDLTDQFNGMYLSPMGHGPIYRGPTHFLQAFRFPHVPVRHFAEQLTRMDTELFKRLIPHQCLGHTWARRDSGGSETVVATINQFNAVLFRVVSSILIDRLKPQERALNISRWIDIAQELRMLKNFSSLKAIISALNSNSIYRLSKIWEVLPKERMEVFTELANICSEDNNAWTLREVLKREGTAKNPDPGSDHSDRHLQKLILNLGTQTSHGTIPYLGTFLTDLTMIHTANPDYLTENKLINFDKKRKEFEVLAQIKLLQGAANTYNLQADALFDHWFNSMPVFDEREAFELSCRLEPPPPAPRKSVVSTNTSLTNTTASSTASIMGHRKTDSIHSNSSSGAGSQFYCELNSSTSSRHNSLDRDVHHQHASLMSASSSVSNLSLDSSNSGGRQSGKLTHSQSMGNGLKSHGNGTTNGGSPHINAQLVQPSSGTPHSAPDFYIIRVTYETDNIELDGIVLYKSIMLGNNERTPQVIRNAMLKLGLEDDPDRFTLAQVLPDKELVMPKNANVYYAVNTNYNLNFILRPRKEEGVAGS

SEQ ID NO: 41902 - DNA, 4677 bp, DROSOPHILA
ctggatgggaatgacaccagtcccggcgattccgggggacccttaatggagaccgtgatacgtggaaaggtcacactcacttatgcagccggcataatctcctacggacagaagccctgcgtacttaaaacttgcaagccagcattttacacaaaaacttcatacttttttgaatggataaaatcgaaattgcaaagtccatttatcgacagcgacagcaaatctcgtactagaaaataagcaatttatttaattcctacattttattgcctcaaaaactagtttaactgcatccaggaaaaggttcggcgcgatttttgcgcagtacgaactgaatttttcggttcatgtcctcgttgtaaatggccttgcatttctcgaagttgatgcgacgacgaacctatacaatagtttaatacagtaaataataataaatagttaagttatttaaagtcgaacctgatacggcttttcgtagaatcgcgtgcggcgaaattggtcgagcagttcttcttttcccaagacgcgatttaacagacgacacgcctcctccacattattgttttgcaccagaacggtgcgggccagaaactgcacgtgtctcatttcggataagtagttttattttataaagttttccaaatgtttattaaataatcggctttcaaaacagtgtgaccatttactgtactgctaaacagctgatgaatatcactaaccagggctaacgattgctaataagaatcgtggactcagaaggagtactttgagaaccactcaacttaataaataagaaaaatatttattcaacacagtatttattaatgcattgccaaaattatttctgtaatgcccatcacacttaagaaatacatattatatcccatcaaattatcaaaaattgctaatcacctgaaaatgactaaaataccagttttcggacctttgcggtgcgaggcaaccctgatgttgtggtttttcttgccgtttgccgctctggtcacactggtttccagttttcttcctagcgtggcggccatagtaagctgttgaaaagtattcgacgtaaattaaatttgttgtaaaagtgaaacttccaggaatcgggctgcgaaagttactatttgctttaggcacgacacgacacgaaaaaaggtgagctggggcggctctgggctaattaagattaccacctgattttgcacatttcgtctcgcattgtgcggtttgccaatgtgtgtgtctacttggtagacacttcctttgcgcttggttttctcatctctgtcgttaagtaatcatcgataattgttttttgtcagagaatttgccttcgatttttggcattagatttgcaaaatcgatggccatctagctttttttctcttctttgttcaatcgaattcttctgacgcagcgtcttgcgcggcacatgttggtacgcatacaagcgcaaagtctggtgcatgtgtgtgctaggcactggtgaaaatataataattgtatctattgatttgcctgctaaatcgaaggctgcttctagaattcatttccattcttattttcgactctgccctttctcctttcatttgttccccttttcgttcttttacggttttttcattattaccctctccgctttgcagtcgccgttcgcaaaaccagggctgcaatgcgctgacgaaaacttctagaaactgtgtgtatgtgtgcgtgcgaaagagaagcggttgttgtcgaaagggggaaagagagcgtcagctgctcgccgtattgaaatacgacaattgttctagaaaatcgactagaaaacgtcgcagttattttcgcgaacacatggcggcgtaacgaccttgaatcccgggctctagcttccggcaatgcctactattttccgttgccccccaaattacacggaaaaaaatgggtgatggcatcaagtcacagctgtagaaatcaataaacaagaaagggtcatatgatcgagtggtttctggattttgaaaaatgtatttctacaaaaaaaaatgggtaacaaaatataggttactgatttttgtttacaatactagttagagaggaatcagccctttgaactatgaaatgtcattagatataaaactgacaataacttccatcgggaacctagctgccatagaaacagcaccacaaaataaatttttttttttcattttttataagaactggcatccaaatcggttgaaacttcaaaaattttcggtattacacaacttcataatttctacctatatatgcctggagcatacacaaatctgttccccaatctgttatttacaagctcccagatagtaattacgcactacttcgtctgttcacagtaaacagcaaacaaaatggttaaggagactggatattatgatatacttggcgtgaagcctaatgccacgcccgacgagctgaagaaggcttaccgcaagctggccctcaagtaccatccggacaagaaccccaacgagggcgagaaattcaaggccatttcgcaggcttacgaagtgctgtccgatgcggacaagcgacaggtgtacgacgaaggcggcgaggcggccatcaagaagggcggcgcagattccggtgacttccgcaatcctatggacttctttgagaagttctttggcgctggattcggaggtagtggcggtggacgcaggcgcgagaggcgtggcaaggacgtggtgcaccagatgtccgtacagctggaggagctgtacaatggagcgacccgcaagctgcagctccagaagaatgtgatctgcgacaagtgcgagggtcgcggcggcaagaagggcagcattgagaagtgcttgcagtgccgtggtaacggtgtggagacacgggttcagcagatcgcccccggcatcatgcagcacatcgagcaggtgtgccgcaagtgttcgggaactggcgagaccattcaggagaaggaccgctgcaagaactgcagtggccgcaaaacggtgcgggaacgcaaggtattggaagtgcacattgagaagggaatgcgggatggccagaagatcgtgttcacgggagagggcgatcatgagccggaatctcagccgggcgatattattattcttttggacgagaaggagcactccacattcgcgcacgccggacaggatttaatgatgaagatgccgttgcaacttgtcgaagcgctctgcggattccagcgaatcgttaaaacgctcgatgatcgcgatctgattgtgtccacacagcccggcgaggttatcaggcatgagatgaccaagtgtattgccgaggagggtatgcccattttcaagaaccccatggagaagggcacgttgatcatccagttcgaggtgatcttcccggaggtgatcaatccgtcggtggtgcccacgcttaaacagtgcctacccccggcgccggaggttgacattccaatcgatgcagagcagacggttttggtgagtatttcagtagtagtttatatcacgatatataaataatatattatttataattaatttatttatcgatttgcttatctttcgcaggaggactttgatcccaagcaacgtcgccagcaacaccagcgcatggcctacgatgaggacgatggcggctatcaggatggcccacgcgtccagcagtgcacatcgagttaagcgcccccgctgcgtgttgcatccccggacacacagccctaataataccccaaccaacaagccgtaataatatgtaaaccagctcccggaacactgtaattgcgcttgcaagtgccgaagaactcccaaaagcaccttaaaacaccatccaattcacactaggaggcccaaccaatcgagagatctaaagttatttcatgcaagctacgatatttaggtataaatcaaagaaacttatcagatatatgcactatgtctataacgcgtggttgtttgtaaaccaacatttttctttatgtttatgttgcgttggattgtcaaagaatcgaaaacggaaactgaaactaaactaaactgaaattgaaattagccgccactagaaccgtatctaaagtccgcgccagcgaacacgtctaggaacaagtttaagttatttaattccagcataaataaaagcgttagtttaaacggatataacaaataaataattaatacacaatttcaacccaaatgctgtatattcttcttcccatagttccagtatcacttgccttcctccggctatctattgattccataatcgctgcatagtcacccgcaggtgtgaatcattcgaataatgccaattggagatatcaggcatatggcagtagtttcgtcttgagtacattatttaaaatgctatctgggataagtaaaagataaaaagaaagataaggatagtttgggatatatatggtaatgccattaaatcgttaaggatataatgagggattttgtagttgttgaggattataaagcatcctataaatgaatctgcggacctgcctgtcgcaaggaataacatcaaaagcaaattcaaaatgtaaaatgttttgtaaatttatttacaaaatttcaaaatgaactacaacataatctggtggaaactagtgcgcaaagtttcggagagcggccacaactccagttccatagatgagcttctcctccacacgctgcc

SEQ ID NO: 41903 - DNA, 1382 bp, DROSOPHILA
tcacactggtttccagttttcttcctagcgtggcggccatagtaagctgttgaaaagtattcgacgtaaattaaatttgttgtaaaagtgaaacttccaggaatcgggctgcgaaagttactatttgctttaggcacgacacgacacgaaaaaagtaaacagcaaacaaaatggttaaggagactggatattatgatatacttggcgtgaagcctaatgccacgcccgacgagctgaagaaggcttaccgcaagctggccctcaagtaccatccggacaagaaccccaacgagggcgagaaattcaaggccatttcgcaggcttacgaagtgctgtccgatgcggacaagcgacaggtgtacgacgaaggcggcgaggcggccatcaagaagggcggcgcagattccggtgacttccgcaatcctatggacttctttgagaagttctttggcgctggattcggaggtagtggcggtggacgcaggcgcgagaggcgtggcaaggacgtggtgcaccagatgtccgtacagctggaggagctgtacaatggagcgacccgcaagctgcagctccagaagaatgtgatctgcgacaagtgcgagggtcgcggcggcaagaagggcagcattgagaagtgcttgcagtgccgtggtaacggtgtggagacacgggttcagcagatcgcccccggcatcatgcagcacatcgagcaggtgtgccgcaagtgttcgggaactggcgagaccattcaggagaaggaccgctgcaagaactgcagtggccgcaaaacggtgcgggaacgcaaggtattggaagtgcacattgagaagggaatgcgggatggccagaagatcgtgttcacgggagagggcgatcatgagccggaatctcagccgggcgatattattattcttttggacgagaaggagcactccacattcgcgcacgccggacaggatttaatgatgaagatgccgttgcaacttgtcgaagcgctctgcggattccagcgaatcgttaaaacgctcgatgatcgcgatctgattgtgtccacacagcccggcgaggttatcaggcatgagatgaccaagtgtattgccgaggagggtatgcccattttcaagaaccccatggagaagggcacgttgatcatccagttcgaggtgatcttcccggaggtgatcaatccgtcggtggtgcccacgcttaaacagtgcctacccccggcgccggaggttgacattccaatcgatgcagagcagacggttttggaggactttgatcccaagcaacgtcgccagcaacaccagcgcatggcctacgatgaggacgatggcggctatcaggatggcccacgcgtccagcagtgcacatcgagttaa

SEQ ID NO: 41904 - protein, 403 aa, DROSOPHILA; identical to SEQ ID NO: 24405

SEQ ID NO: 41905 - DNA, 3596 bp, DROSOPHILA
gattagagcctaagattcgattgcaccacattcaaagcacaaaaatataaaggaagagcaaaaaggaagcacaaaaacaagcacacacacccacgcaactagagagcgtgacaggggggagaaagcaggcacacatacatacatatgcaaatcacgctaaaaataacacacgaaatcgataagacaacaacaaaagcaggcacagtaaggcagtggagaataataagaacgccaagaagcaggcaacacaaaataacacgccaacattgatgcgaatgcaaagcaaacacacacacaagtgtaaattgagtaaattggccgcatgagcgaattatcgatgcattcggggaacacttaagcacgtttgggaatccattgaattaaaaggccaccggagaatagctcaagtatctgcacttgctactttcacacacctacacacacacaagcaatgtcaataaattcctatataaaatttactttatagaaagcacacaaaaagtattctgtttcttttattataaatcacttctttaaaaatcgacctgacttgtaacttgttttatctctcagatttctagtttacgtgaaaaggtaggcaggtctgctgcgttcgaggaaagaaagtattctgagccgtataccgtggaacactgcggccacaaaagcttcattttgtctctcctgccgcaaaaagctatctaagttattctcataaagagagaaaatcactcaaagcacacatatggtactcaacagcaaaattctaaccagaaaccgttttctgcatccgaaactgttttcataatgacatttttaaatagttccgtaatatttgagagctctgtcgctactagcataaaaaattgttcttttgatgagcaataaattgattaaaaattgaataaaactactcagaacaatgttaaaaataagaataaatagcttcgacagtcctaacagtcttgaacagttgtatgtgaaatattcgtggatcaacatgttgttcggacttataggatcatttttgcttatgctgcaaataattcttgtgccttattcaaatggtgcaggtaactttcagcatgcataaactttgtacgcaatttaaaatctatccttccttcagggtgtcaatttgatacggaatgcgtgaatctggataagtgtcccaggaccagagcagttatgaactcatccaggaaaaatataataggtcttagaagatgcggcactaataaagtgtgctgccccaagtgggaaacgtatctgccacacgatacttgtggacaatcaagaagaaaacctacgaagggcaaaataccggcgctgaatgagtttccctggatggccatgctgttatatggaaataaaaacaatttgtcccagaagctggtaccaaaatgtggtggatccctaataaacaactggtacgtcctgaccgcagcgcactgcgtggagtatccatttatggactatccgtatgccctcaaaacagtgagactgggcgaacataacacgtccacaaatcccgatcgggctattgtgaatggaagaagacagtacgctcctctttatatggaaattgaagtggaccaaattattacgcatgaacaattcaaccggggaaggcggctgataaacgacatagcactcgtgcgtcttaagtttcctgtgcggtgagtaatgattctcctctggtcgaaatagaagtaggatatgaattgaaataatatatctttatatcttcctatagctatacgagagccatccaacctatttgccttccaagagcccaaaaattggccgcgcataagcgaaagtttcaagcatccggctggccagacatgggacaaggaattgcaagtgaggtactcttgcgcagcttcatcgcggaacggcatccagatgtgtgcaaatcaaattatgactttaatttgggcagtcagatatgtgctggtggtctggatgggaatgacaccagtcccggcgattccgggggacccttaatggagaccgtgatacgtggaaaggtcacactcacttatgcagccggcataatctcctacggacagaagccctgcgtacttaaaacttgcaagccagcattttacacaaaaacttcatacttttttgaatggataaaatcgaaattgcaaagtccatttatcgacagcgacagcaaatctcgtactagaaaataagcaatttatttaattcctacattttattgcctcaaaaactagtttaactgcatccaggaaaaggttcggcgcgatttttgcgcagtacgaactgaatttttcggttcatgtcctcgttgtaaatggccttgcatttctcgaagttgatgcgacgacgaacctatacaatagtttaatacagtaaataataataaatagttaagttatttaaagtcgaacctgatacggcttttcgtagaatcgcgtgcggcgaaattggtcgagcagttcttcttttcccaagacgcgatttaacagacgacacgcctcctccacattattgttttgcaccagaacggtgcgggccagaaactgcacgtgtctcatttcggataagtagttttattttataaagttttccaaatgtttattaaataatcggctttcaaaacagtgtgaccatttactgtactgctaaacagctgatgaatatcactaaccagggctaacgattgctaataagaatcgtggactcagaaggagtactttgagaaccactcaacttaataaataagaaaaatatttattcaacacagtatttattaatgcattgccaaaattatttctgtaatgcccatcacacttaagaaatacatattatatcccatcaaattatcaaaaattgctaatcacctgaaaatgactaaaataccagttttcggacctttgcggtgcgaggcaaccctgatgttgtggtttttcttgccgtttgccgctctggtcacactggtttccagttttcttcctagcgtggcggccatagtaagctgttgaaaagtattcgacgtaaattaaatttgttgtaaaagtgaaacttccaggaatcgggctgcgaaagttactatttgctttaggcacgacacgacacgaaaaaaggtgagctggggcggctctgggctaattaagattaccacctgattttgcacatttcgtctcgcattgtgcggtttgccaatgtgtgtgtctacttggtagacacttcctttgcgcttggttttctcatctctgtcgttaagtaatcatcgataattgttttttgtcagagaatttgccttcgatttttggcattagatttgcaaaatcgatggccatctagctttttttctcttctttgttcaatcgaattcttctgacgcagcgtcttgcgcggcacatgttggtacgcatacaagcgcaaagtctggtgcatgtgtgtgctaggcactggtgaaaatataataattgtatctattgatttgcctgctaaatcgaaggctgcttctagaattcatttccattcttattttcgactctgccctttctcctttcatttgttccccttttcgttcttttacggttttttcattattaccc

SEQ ID NO: 41906 - DNA, 1236 bp, DROSOPHILA
atgttgttcggacttataggatcatttttgcttatgctgcaaataattcttgtgccttattcaaatggtgcagggtgtcaatttgatacggaatgcgtgaatctggataagtgtcccaggaccagagcagttatgaactcatccaggaaaaatataataggtcttagaagatgcggcactaataaagtgtgctgccccaagtgggaaacgtatctgccacacgatacttgtggacaatcaagaagaaaacctacgaagggcaaaataccggcgctgaatgagtttccctggatggccatgctgttatatggaaataaaaacaatttgtcccagaagctggtaccaaaatgtggtggatccctaataaacaactggtacgtcctgaccgcagcgcactgcgtggagtatccatttatggactatccgtatgccctcaaaacagtgagactgggcgaacataacacgtccacaaatcccgatcgggctattgtgaatggaagaagacagtacgctcctctttatatggaaattgaagtggaccaaattattacgcatgaacaattcaaccggggaaggcggctgataaacgacatagcactcgtgcgtcttaagtttcctgtgcgctatacgagagccatccaacctatttgccttccaagagcccaaaaattggccgcgcataagcgaaagtttcaagcatccggctggccagacatgggacaaggaattgcaagtgaggtactcttgcgcagcttcatcgcggaacggcatccagatgtgtgcaaatcaaattatgactttaatttgggcagtcagatatgtgctggtggtctggatgggaatgacaccagtcccggcgattccgggggacccttaatggagaccgtgatacgtggaaaggtcacactcacttatgcagccggcataatctcctacggacagaagccctgcgtacttaaaacttgcaagccagcattttacacaaaaacttcatacttttttgaatggataaaatcgaaattgcaaagtccatttatcgacagcgacagcaaatctctcgaacctgatacggcttttcgtagaatcgcgtgcggcgaaattggtcgagcagttcttcttttcccaagacgcgatttaacagacgacacgcctcctccacattattgttttgcaccagaacggtgcgggccagaaactgcacgtgtctcatttcggataagtagttttattttataa

SEQ ID NO: 41907 - protein, 367 aa, DROSOPHILA
MNSSRKNIIGLRRCGTNKVCCPKWETYLPHDTCGQSRRKPTKGKIPALNEFPWMAMLLYGNKNNLSQKLVPKCGGSLINNWYVLTAAHCVEYPFMDYPYALKTVRLGEHNTSTNPDRAIVNGRRQYAPLYMEIEVDQIITHEQFNRGRRLINDIALVRLKFPVRYTRAIQPICLPRAQKLAAHKRKFQASGWPDMGQGIASEVLLRSFIAERHPDVCKSNYDFNLGSQICAGGLDGNDTSPGDSGGPLMETVIRGKVTLTYAAGIISYGQKPCVLKTCKPAFYTKTSYFFEWIKSKLQSPFIDSDSKSLEPDTAFRRIACGEIGRAVLLFPRRDLTDDTPPPHYCFAPERCGPETARVSFRISSFIL

SEQ ID NO: 41908 - DNA, 10100 bp, DROSOPHILA
gaggtggtgacatgaccgagaacactaacacttttgatccttcctctggtttccaacttaccgcaattagttggatcttcatggttgatctggacgggtaatctccttttaactttcctgtccctttgtaacacttccgcaaagcgaaaagaaggcactatttggggagaataattttatccacacggtaaacctaggtagtactttttggccaaccgttgatcactgaaatgctgggcacgccaggtgcgcaggcggctttatagctccagctccaacgccaatcggagctttggccagcagcggaaaatttatgtgcggcgtgtgtttggcatggatatgcaattaatggccgggccaaaagtggagcgcatctctcgatgaagtaacgaaagtgacagggcagtctggtatttactttttttgcactcttttgtggacatgagaatggttggtctcgaacagctccgggaacgtgatatagttttaaattacttttaccgcctttaacggttttgtatttattattcagtgcgctggcaacgcttgacaccaagctttaagttaagaccaaccaaactaaagtcataccaacggagcgtatgcgcaatggttgatgcatcggctaagtgctacagttagacaggcttcaaacccgccgtattatagcatctctttataggaacgttttatttagatctttaaagaattaatcgtttataaccttttatattgtttttatattccgaaacacccagtactacaaaatacaaattaatttagcatttaataaaaatactttgtttttaatgcaatgaaggtataaataaaatcatgtatcaacaatataaaatccgtgttaatggtggaatgagaagaaacgatttagtgtgggtgcgcaatgtccccaaaggtccaataaatatcacagttaggcatgtcaaaacggaaaatcagctctgatttcttttaaaataccaattcctattgcagctcttggttagaccacatccttcataaggctgatggcaacggcgccaatcaggccacaaactcccataacattcaagggcagcaggggatcaatgtgctcctgtgaagaggggaaatcagattggtaaaatgaagaccacacaggtaaacgatttgaggacccaccagtttccagagaaagggaacaaggattagggcaatgcccgatgccaggttgcccatgccaacgccaaagtttcgaactattgtgggatattgcatcgctgtgtaggtgggaatgatggcgttgttggctccaatgagacacttggctgggtgacactaggtcatttacagattgttgttgtcaaagatgttagggtacaacttacctatggtggccagtgcaatcacacccgtttgatttgacaccaaattggtggctaagcagcaaagacccggcaacaacatgtaaccaataagactacgtcggattcccactttcaagaccaccaggatgctaatgcaaatggagatggcctccacggttccagccacggcactattgatgtagatattgccacccaaattgctgaggtgcaacgtgagtccaaagtaaatgatgatcagtgtcagccagatgaccagggttaaacatgtggtgcgccagtactttgcactgaataccaccagaaggggattcacatggccacttgcacttggatccggtgcatctgcctccactgccttcgactctacgctggtcgttgcttctggtggagattggaccgcccgcggtacagccgcctcgagggtcttgcgatagttgctgggcaaactggcgctggtgccattcattcgggccgctcgctcaattagcccgcacagctcgtccagccggccctgggccaaaagccagcgtggagactccggcagccagaacctaaaaaggaatgggagcgaatgggtagggttgctgtgagaatcaatgtcatgatcccggtatttattggcttttaggaattttttcatttcatttctaaggcggtcagctaatgtggctctctgtggcctgcttggcacccgaggataaacactgaggaatgtcctggacacggtttctttgtccctgccggaatctaattgatccgaccaattgtgtgttgtgtacggttttatcttgtcaattcatttagttgactgactgctaaaaatgtttacgctttgaagttgaaatgcgttcatttgggctttcaattctccagtaagcggatttttaatagatttaagtttttttttttgcctttaaagtagcactgttatttatattgatttgtatagaaaatagaatagaaaaaattaaaggtcatgaattatgtaaaaatgtctttaaaatatggctaataataataaaatgacttgttaattacaggaaggaaatacatgagtttaattaataaacaaatttcgtaaataaatatcatttagccattgatacaaatcagagctcaaagcaaaatgcataaagagacctcgatttcccttcagccgattttccaattaccaaataaacgcccaacaatggcactgccccacccaggatgcccgcgcagaacttaccaaatgctgagcatgattagccatggccaggagatggccagctggaggtgccgccagtcgcggatgaggtaggccagtccggcggagaggacgtaggagatggccacgggcagaatgttgagaatgccgattacggtgcgccacttgccggagaccagctccaccaccagcacgaagctcacaacagtcacggtcattgatgcgaatccaattataacacgtagcgacatgaacatggccaccgatgttgagaaggccaaaattccacctgcaacggagagcagagaacccatgcaggcggtggccaaaaagggttggcccaaggggtggggtgggttgggtgcggaatgtcagtggcaaggtcgggcacgtaaataagagtgtaaagtcaattaaaatcgcagccgggccagagagcaggacaaatgcgaacgcaaatgcagctgttagtccaacgattcacggacaaagctgcatataaatgacaattagaaaatgaatcccactcaaattgtcatggtcaaaggaacactcgtccttccagccctttaatcggactgttgcaatttcacttctataatctgcacttgcaaaaaagggatctacgcgattatacgttttaaagaattttttcaagttcttagcattcttgtggtaatcaaatattattttagaaacacgaattaagaatatcccatatgtttacaataggcattactcaccaaatacgctctgaatagtgacgaatgccattagagtgtgtcttctgccgaagcgatccgatatccatccgctgagaaccgctcccgctgccgcgcccaccaggaagcaggtttccaccaagctgaggatatcgcgtccgcaaaccagatcaaattcctgcaccagggtcttggccgatccatccacgtcggagaactcaaagtgccagcactgtcggtagcccaaatctgtggcattttcgggccagttgatgagttggttattctcgtaggtgacctgggtgtagtccacatcgaggagcaggcagccattggaggactgactaatattgcgccactcggaaacgctcatctgcatgaggttttccggccgggcacaccaaaagtctttcggcgcaatctttaagagaaattagggttttaggcgtaatttaatggaatttcttttttaataagctttttagcttgtttacccaaattaaaataactatttctggttgaatgaattgagcgatcaaatgactcataataagggttgactttcataggatcataaataactctgcatataaaaatcctattaaaaatccaaaaagaagcatttcggcagaatttaggcaacaccatttgaatttaaatgaattgagaattcacgctcgtagttacgtgaaccaaataagagattttctcctaccaactttcgaagcagccaatcaaagcttgaacgcaatgattgagtgcttgtgaagccataaatcgaatcgcagatcaggcggctggaaaacattttgtcgggcacaatttaaatcggtagtaagccgtttaaatttcttccgcatgttgattgcggttaactcgtagttagtttgttatacagccagccccatttgtcatttgggtttcgattgcgaatgtttcgtttcgtgacagtttaacacggctgaaattactgaatgttgttacaacacgaacggccatctgattgatgatcgcatcaatgaaagcggcttatcaatcgcggcaagccgaaaaggttgttatccaccgcccactctgaaactccgccccataatcgaacccataaacaactacaacctacaacaggttgatagcctcggccgacattgaacgtgcctcaattaaacatttagtatgcgctccgaggaaatggtttcaagttcaagttgaagtgtaacaagaaagcgaaacattttcaacaattaatggtcgatgagagtggcagtggtacaggtggtacaggtgcagtgttagctcttttccctttcgctgaggtttttggttagaagtctggcgaccgttgatcgcgtggcaggctctgatgtcatttgtggtaaaatgtggcagttgttcgttctgtcgccagtcggttacatgtcacgtttcaggcatttgcatagcgaaacagactctcgaccaacaatggatttctgtgccacaacgtgggcagcactcgactttggatccgacactatgcggcccatgtaaatttcgtttcataaattggtttgcagatatgtatgcacgagttgcacctgagagtgcgctttattctaatgacagggtgacaggcacactggttaaggctcaaattactcgtaattcctattttacaatcatatcaaggaaactatttactaaatttgattgccctttaatgagcactgacttcagtccacctcacaggtgatacatcaggtcaagcaccctggctaactttgcatactagatatctctatttagatatgcaagtaaaggcacgattagtgacaatacaaaaactattgtttctaatagaatgatatatccgtaattgagcggttcggagagtttaaaccgatttgcattcaatggctttgaaaaacgtcagtggagtttctttacttagtcataaaatcatttcctggatcctccttcaacataatcgcgtcataatgctagttgaaaagtgtatattttggggtttttaagaaattctgttttagcatattaactttgcttaaagttaatttaacttattaaagttatattaacttatttttgacaattcaaattaaaatgatcaggcttttaaaaacaagttcgataaaattgaactgaattgatttgactattaagatgtgttctctataatctttgaagagattacacaaaaccagactgttaaatacaatttaacgcccatgtggtctaggtgctcatgggtgatcgttaacttaattgttacagggtcatctgactgaccctagatagagaaagtacttgaattgctgttttaaatctgaatttgaatctgaatttggtttctgcggccaattggagaccagtgtgccagacagagtgtggcttacaaaggtatttctgagcattttattattattgtttaattaatatacttagacagttagcggtcaatattggcctgtggcagagagtaacctttcgaagccaaccttgggctggctcgaactcggagcaaaccatcgacaccaccggcaccacctgatatggatcagttgggagtggaaactaattgaaaagtcttgccagtacggtgggaaatcgtgttgtcatggtgtcgaccgcagcgcctaatccacatagctgtcgtcttcatagcaaataacacaaaagcgtgcaatctgcggacatagtcaattaagatagggttattcggcacgaagactgtttcaaatatctacgccattaaatcagtgtaaacaaatcaatgacttttggggtggtaaagtgggcatatagcaaactcgtttcggcctaagccagttcaaatttgttattactccgcaggcaattattgtgtcaataattaagccagaagtggaacaattaaggtggaagagtccaaggcgcatttcagcatcatgagtgtgttaaaatataaaggagcccacttttttaataaaaattaatttttaaaataccaaaatgtggagaaataatacttaaagtacatatacattcaagcaccaactggtttttatgcaatgaaattgcaaaccttcgatgattcttctattcaatcgatctttgtacaacatccagttcaataaacacatttattggtcgtcaaatattgtatctgaagttcccgcatccaaattcgctcaatgaaacaaatctcgtaatcaatcgagagcgcgaacacgggcaactggtttgagtagcacacacacacctgcaatcgcagtcacttaaattcacgttatcacgggaacgcgctgataactgacattgggggaggaggtaccacatgcaggctaatatacagaaccttgtcaattgcggttgcgttgtagttggccaatattagttggcactggcggtgccagcgatgatgggcacaggtggcaggcgatggagcgcaacgatggctaatgttgttggccagaggccgactgactcacctggaacacgtagacgaatatgtggaaggtgcagatggcctggaagatcgagagcagggcgcaccacatgctctgccatggcgttaggcagcccaagagccgctccaggagcttagtgtgcaacagatctaggttctccatgttcccatcgctcaacatgggcgaggcctcgcccgatctcacatccgttagctccattgtggcccggttcgaagtgcaaccgcttacgccgtgcgttgcacgtcaactgagttagaatgttgactttcgaaaatatatcttatgaaatttaaattggtttcagatgcaagattcggtgggccgacgttctgaagtgctccgaggtgtcgagagccgtgagtgcgtatgtcagagagattcggccgtgtctctggtttttatgcaggcgcgccgttgtttctgatttctgtgggggccctaagataatgtccgaacacagcgcgatgttgcgatagtcaaattacttgttagctccgtcttcacacccggccaaatgagtcattaaagaatcacttgatgactttataattttgtagactgtcgacctttctggggagtgccttgaccaactccacccacaaggctaatgcacactcttcgacgagtcaatttcatttggagcatctggccaacataaagtaatctttatagaaccgaactttctttcagttcgacagtcgttatcttatcggtgactgtcaatttttgattgcttcatgtaaattcagtgaatagttttcatagactacagtcttaaacaattggttattgtttgtcttcccaagataacacagtggttatcaaggaaaaaagaagaagaacacagaaacaattaaatcagtacctcctgtgcaataacttttatcaaaaatgcttatttattacctattttactactagtcaattaagtctctataaatgattagacaaatacttcaatatttcaagctgatagatgggtttgacagaacagaaactttaatattgagagatgtcaaagtatttcctctaattgttttatgaacttttccaaatgagctaacacttcctctcagttgcatcacgcaacatgctgaacctaaccattccccccacttattccccaatttacagccgctcaattggtataattaacctctgcaaaataactgtgctcaggcaatcgaacttcttgtgttctttgaatgaccattgcatttgccattggttctggccaagctctattacccaccgttccgcagatcgtgtgtgtcaaggtcgcatgtggtttttgctcagctcccttcgatttggggctactttttcagttggacattagcacgatagacgatgattacgctgattagcggtggcatcgaaacttcaaaacataggcaaatgatgcacacgcaacccgcatgccgataaatggctcctaagtactcagtgttgtgacagcctccctgaatgttggtcaaaggtgctcgaaggtcgagaggcatttcaaaaaatatttaaaacaaaatcaaagccaagtgggtctgaaattgctgggccgaaattggcatgcgagctaccttgattgctggccaacaaactcaagtggcaagctcttcagtgtgttatcacttgttttgttactgttactcgtttatagcaaactcgtttgctgataacgttttgtaatgtcaaactctctttcgttttccactcattgtcaacacctttcagatgatatacacatccaattagccgcctattattagtgcaaattactttacagagtttacagctatcaatcaatttgagttgcataatgttttcttccggtctaagcacaaactatcaaacatccggggaagtttgggaggggtttggtgggcgggtggttttagcgtacaaaaatatttgatttcgatgtttttcgggcgacgcaatcaactggtcaaatatttgccaagccataaaaccaaaactcacctggaagacaaacatgaacaggtgaaaagtggtgggcaactggaacaggcagagcagcagggtccaaagaaaactccagcgggtgtagtggcccaggaaatttgatatcacatcgctgtcctcatcctgactgagatccctgctcggtggctgctccgtttgctccgctgaaggtggtttcttcaggtcctcggaatatcgtcgaaagtccaatgctatgacactgatttccggagtctttgggccgggccttgtctcgcgatatccgccatacaggttcgcctccaggctgcccctgcccttgtcccgcggcccgccaacgcaatcgaaattcagggaaccgcgacgcagcacgccactcatatcgaggaggtatatatataggtttttttttttgtatatggacgatatcaagcgatttcgaaaccctccgattttattactccacttggtgcgccaatcgatcgattgaaaataagtacaaaaccgcgtcgatcgttagtatctcagccgtcggcatcgatctggaaccgttaacggtttggggctctgttataagcactctgtaaatctgcaaaagagcgaaagctatatgcatggcattgccagtatcgaaaaagctcaactcaaagcttcgactactaccccacgatcaattgatttggtataggcctgcgaaagctttcgctcgacttgagtgacattcacttccgccaggactatccatatctccatatcgacacaattgcttttgttttaatttatttatttatttatttatttatgttttattttgacactataattgcgtttgctttggtaattttgatttacaacaattttcataaatttatgtctgtgtttcgctcaaacactttaacttaacaattaatttaatgttgttttagattcgggtattccgtttgtttgaagcttaatgaaatctcttactaatgacaaatagtacataacaaagctgatatgatcttagcgggtaagtacaataggcaacaaaaataaatgtaaaataagcgacattatattgcggaaaataatacaaaatacaaatgagcacataacaacttgataggtaagtacaacaagtaattcaacaggttggctttctctaatttgattgtttttgtttttctctacatatacatacacaaacgcacacatatccatatacacataattgtatacattgttaaatgcattatattggaaatttatttgttcatttcatatacatatattctttgatggctccaaacagtaaaactccttgtatgtcctgtgtctcctccacacacaaacagacaatatatacaaatccataattgaccgatacttagagactgat

SEQ ID NO: 41909 - DNA, 2013 bp, DROSOPHILA
atgagtggcgtgctgcgtcgcggttccctgaatttcgattgcgttggcgggccgcgggacaagggcaggggcagcctggaggcgaacctgtatggcggatatcgcgagacaaggcccggcccaaagactccggaaatcagtgtcatagcattggactttcgacgatattccgaggacctgaagaaaccaccttcagcggagcaaacggagcagccaccgagcagggatctcagtcaggatgaggacagcgatgtgatatcaaatttcctgggccactacacccgctggagttttctttggaccctgctgctctgcctgttccagttgcccaccacttttcacctgttcatgtttgtcttccagctaacggatgtgagatcgggcgaggcctcgcccatgttgagcgatgggaacatggagaacctagatctgttgcacactaagctcctggagcggctcttgggctgcctaacgccatggcagagcatgtggtgcgccctgctctcgatcttccaggccatctgcaccttccacatattcgtctacgtgttccagattgcgccgaaagacttttggtgtgcccggccggaaaacctcatgcagatgagcgtttccgagtggcgcaatattagtcagtcctccaatggctgcctgctcctcgatgtggactacacccaggtcacctacgagaataaccaactcatcaactggcccgaaaatgccacagatttgggctaccgacagtgctggcactttgagttctccgacgtggatggatcggccaagaccctggtgcaggaatttgatctggtttgcggacgcgatatcctcagcttggtggaaacctgcttcctggtgggcgcggcagcgggagcggttctcagcggatggatatcggatcgcttcggcagaagacacactctaatggcattcgtcactattcagagcgtatttggtggaattttggccttctcaacatcggtggccatgttcatgtcgctacgtgttataattggattcgcatcaatgaccgtgactgttgtgagcttcgtgctggtggtggagctggtctccggcaagtggcgcaccgtaatcggcattctcaacattctgcccgtggccatctcctacgtcctctccgccggactggcctacctcatccgcgactggcggcacctccagctggccatctcctggccatggctaatcatgctcagcatttggttctggctgccggagtctccacgctggcttttggcccagggccggctggacgagctgtgcgggctaattgagcgagcggcccgaatgaatggcaccagcgccagtttgcccagcaactatcgcaagaccctcgaggcggctgtaccgcgggcggtccaatctccaccagaagcaacgaccagcgtagagtcgaaggcagtggaggcagatgcaccggatccaagtgcaagtggccatgtgaatccccttctggtggtattcagtgcaaagtactggcgcaccacatgtttaaccctggtcatctggctgacactgatcatcatttactttggactcacgttgcacctcagcaatttgggtggcaatatctacatcaatagtgccgtggctggaaccgtggaggccatctccatttgcattagcatcctggtggtcttgaaagtgggaatccgacgtagtcttattggttacatgttgttgccgggtctttgctgcttagccaccaatttggtgtcaaatcaaacgggtgtgattgcactggccaccatagccaagtgtctcattggagccaacaacgccatcattcccacctacacagcgatgcaatatcccacaatagttcgaaactttggcgttggcatgggcaacctggcatcgggcattgccctaatccttgttccctttctctggaaactggagcacattgatcccctgctgcccttgaatgttatgggagtttgtggcctgattggcgccgttgccatcagccttatgaaggatgtggtctaa

SEQ ID NO: 41910 - protein, 670 aa, DROSOPHILA
MSGVLRRGSLNFDCVGGPRDKGRGSLEANLYGGYRETRPGPKTPEISVIALDFRRYSEDLKKPPSAEQTEQPPSRDLSQDEDSDVISNFLGHYTRWSFLWTLLLCLFQLPTTFHLFMFVFQLTDVRSGEASPMLSDGNMENLDLLHTKLLERLLGCLTPWQSMWCALLSIFQAICTFHIFVYVFQIAPKDFWCARPENLMQMSVSEWRNISQSSNGCLLLDVDYTQVTYENNQLINWPENATDLGYRQCWHFEFSDVDGSAKTLVQEFDLVCGRDILSLVETCFLVGAAAGAVLSGWISDRFGRRHTLMAFVTIQSVFGGILAFSTSVAMFMSLRVIIGFASMTVTVVSFVLVVELVSGKWRTVIGILNILPVAISYVLSAGLAYLIRDWRHLQLAISWPWLIMLSIWFWLPESPRWLLAQGRLDELCGLIERAARMNGTSASLPSNYRKTLEAAVPRAVQSPPEATTSVESKAVEADAPDPSASGHVNPLLVVFSAKYWRTTCLTLVIWLTLIIIYFGLTLHLSNLGGNIYINSAVAGTVEAISICISILVVLKVGIRRSLIGYMLLPGLCCLATNLVSNQTGVIALATIAKCLIGANNAIIPTYTAMQYPTIVRNFGVGMGNLASGIALILVPFLWKLEHIDPLLPLNVMGVCGLIGAVAISLMKDVV

SEQ ID NO: 41911 - DNA, 3187 bp, DROSOPHILA
gtttttagacgattgtcatgccagtggaagcttccagtctgcgtcattcgcggagacgcgtagtttcacgttcgacgacacaaccgctcacagcgaattttgttttcggactagagctgagaaacggcgaattttggtgcttctggaaacatcgattaaactaaaacccgataagtatgcgacaagcggtcacactcggcgatgtgcgataggattgctgcattcgattatatagttatcgaaaagagcaaagagaagccggaatatacggcattaaaagtgcattttgtattaaaattaagaaaattagtaacgatataccgcagaatagggagacatggccaacgtggaatctatgattgtggaggaaaagacgcaggtcaagcagattgaccgcgagaaggtttgtttgtgaccccggtcatgtttacttcgcgtttgctctagatgtgttaataagtttatgtattttccagacctgtcctatgctgctccgtgtcttctgctctacgggacgacaccactccgtgtcggagtatatgttcggcaacgtgcccaccaacgagcttcagatttacacctggcaagacgccaccctgcacgaactgacctctctggtgcgagacgtcaatccggacacccggaagaagggcacctactttgactttgctgtcgtgtaccccaacttccggagtaatcacttccagatgcgcgaaatcggagtgacctgcacgggtcaaaaaggaatcgatgataataagacacttgctcaggccaaattcagcattggagactttctggacatctcgattactccgcccaaccgactgccgccaaccgccaggcgccagcgtccgtactgattcttcactttcatctattctaatcattttaatctttcacttgacactcaatggagtatgaacataattataagtggaatacaagtaagacgaactacgagctgcttgacttaagggactatatgttgtggggagtatcagttcctgtaaaagccgttcgggcgcttcgacttcttcttgcccaactgcgtcatgtcgatctccagaccattgggcagcacggcgcgattctcttcgtagttgacgaacccgttctcttgtagctcttcctcgttgttgcggttgttaggatcgcacttgattccagtctcatagtggtactcacgtttgttgccatctggatcaacgtagccataggttcccctggtgaacgagaagtttgggtaagtgggagaaagaggttggattcaatctgttttactcacttggtgatgcaatcggtgccgatcagctcctccttgaaagatccgtcgtcgttctcatagccccatgtgatgcttccgtcctcgttttcctcacgccacttgcgaatggtctgggaaacgggctgacggcgacgctgctgctgctggtcaacgtgatcgtcctgtagctgattttgatcaatgatgggacgcggctggacaggcttagggcgtggcctggccataggctgtggtggtggtgattcaggtcgtagggcagcggaagacgctggtcttgttcggatcacagccacccgctggggctgttgttgcggtggtggtggcgctgctgcagtgggcgtaggtcgctccaatccgaatctctgcgagttctcaaaccgaccaatgccaaaatcattgaaggcggcgggacggttcaggggcgtcggaatagatggccgttcagcggggaagcgcgaggaaggaggaggcaggatggcagccggctgtgagtcatcggactgaaggaactgctgcaccggcgagggttgttcaacgggttgttggccggccaggaaggcggctgctgcctgctggaactgtgattgttgggcctgagccaactgctgttcccgcagaaggttcggcagatatggctccggctgctcatcctccgctgattccgtcacaggacgcggttcctcaatggcgatgcgctgcgtcaccgctggaagtatggtattctgctggcgcaatgaggctcctggacggcgtactctcaacacaggctgtcggtggggcacttgaccaggtgatgctaccgctccgggaatgctcagacgcgggggatagttttgggcctctgtcaacgcgatcgcgctgcaaacgagctggaatcggaagggaaaaatgtatgtcattagtgcattccaaatggggatcaactgtgccagttgccggaacaaggcgttcccaccgctttggccaccgcgttgccactaactgttgattcgcttttggcactgcccctcttaagaaattagttttacacgctcatttttggcatgctgcttgtccaacggtttcttagaattttcatccgatttgggggtggaaaacagcaaagaatttggtacattcagttaaaacccaattggtcaatgagttcacaagaagaccaaaaacaattatggaatttgaaggatacgtatgtgcattacaagaagtaatacatttctctttaaaaattgcttttattattgttagttatttttggctgtagccttattttcattgacatatatgtatatgtatatatatacaatatgtatattccaaacatttctcaaactttgtctttagcactactaattaaatcgaattcggggttcgtaaaaagcaccacacttgcagcctgacttttgtggcacttcttggctaactgcacaactcgcaccttcgtaaactggtttcaaatttatcaaccgcttatgaacaactgccgcagcaatttgtagttgtaacggtgtggcggtggcaacaaccacagcagcagcagcagcaacaacaactgtggcagtactgtgtaatggctgtaaatgtggaacataaaacaaatcgcgatttctgccccgcctcgctgccgatcgatcataaaagccgaaaccaaagccaaaacaagctgagccatagccaaaagcagaaaaaaacgaaaacatttcagactttggcgtctgggttgcgtaatttgcatggacggagttatgcggcatgtagcatgtggcaagcacattggccaaaagtttccggttcgcgaaagaagtcaaagtctaggacaaatgaccgaccgcttagtcgtatacttaatgctagcacgattttcagtgcgacaacttttaattagtattcgccgtagttgca

SEQ ID NO: 41912 - DNA, 1074 bp, DROSOPHILA
atgacatacatttttcccttccgattccagctcgtttgcagcgcgatcgcgttgacagaggcccaaaactatcccccgcgtctgagcattcccggagcggtagcatcacctggtcaagtgccccaccgacagcctgtgttgagagtacgccgtccaggagcctcattgcgccagcagaataccatacttccagcggtgacgcagcgcatcgccattgaggaaccgcgtcctgtgacggaatcagcggaggatgagcagccggagccatatctgccgaaccttctgcgggaacagcagttggctcaggcccaacaatcacagttccagcaggcagcagccgccttcctggccggccaacaacccccggctgccatcctgcctcctccttcctcgcgcttccccgctgaacggccatctattccgacgcccctgaaccgtcccgccgccttcaatgattttggcattggtcggtttgagaactcgcagagattcggattggagcgacctacgcccactgcagcagcgccaccaccaccgcaacaacagccccagcgggtggctgtgatccgaacaagaccagcgtcttccgctgccctacgacctgaatcaccaccaccacagcctatggccaggccacgccctaagcctgtccagccgcgtcccatcattgatcaaaatcagctacaggacgatcacgttgaccagcagcagcagcgtcgccgtcagcccgtttcccagaccattcgcaagtggcgtgaggaaaacgaggacggaagcatcacatggggctatgagaacgacgacggatctttcaaggaggagctgatcggcaccgattgcatcaccaagggaacctatggctacgttgatccagatggcaacaaacgtgagtaccactatgagactggaatcaagtgcgatcctaacaaccgcaacaacgaggaagagctacaagagaacgggttcgtcaactacgaagagaatcgcgccgtgctgcccaatggtctggagatcgacatgacgcagttgggcaagaagaagtcgaagcgcccgaacggcttttacaggaactga

SEQ ID NO: 41913 - protein, 357 aa, DROSOPHILA
MTYIFPFRFQLVCSAIALTEAQNYPPRLSIPGAVASPGQVPHRQPVLRVRRPGASLRQQNTILPAVTQRIAIEEPRPVTESAEDEQPEPYLPNLLREQQLAQAQQSQFQQAAAAFLAGQQPPAAILPPPSSRFPAERPSIPTPLNRPAAFNDFGIGRFENSQRFGLERPTPTAAAPPPPQQQPQRVAVIRTRPASSAALRPESPPPQPMARPRPKPVQPRPIIDQNQLQDDHVDQQQQRRRQPVSQTIRKWREENEDGSITWGYENDDGSFKEELIGTDCITKGTYGYVDPDGNKREYHYETGIKCDPNNRNNEEELQENGFVNYEENRAVLPNGLEIDMTQLGKKKSKRPNGFYRN

SEQ ID NO: 41914 - DNA, 5470 bp, DROSOPHILA
gttgttgttgttgttgtggtcgttgtactcgttgtgggtgctggtaccacatagatcactcgccgcttgaatcccgatgcggactggaaaagaacgattgcagccaaaacacagatcacaaagtacttcatcgttgatattctctaaatgatccagcagttaataattcgaaatctctcaggtggaacatttatatgcccacacaattcaatgtaagtttctgattgtgtgtcaagaaatacagaacatctgtttggaaggccaagagtctggcggtttggtattagtcgatgggattccaaacagtttcaatatcgatgaaaaaccttgacattggcaggtatacttgcttttattgtttgtatactaacacagatattcggaagtagtgtattttcttatttacatttgactatggcatgtacacatattaaaacgattgattttatacttagtaccttgtggtttcatttagaatgtattaattgtttttgtatttctttcgttcgtggttatcagacagaaaagatttactttagttgtccctcttatgagttctgttttcggtgacgtactagtagttctttaatgcaaaatcttacaggcatacaagtagatcagattcggtagatgttactaaatgaagaacaaaacacggccaggtgagaatttttaatcaatctcggaaccgaataattccccgatgctatgttgcagagcatcgtcgatgatcgaactattttggcaagggatcggatcggttgtcgcaacactcgggctgtcagttctctggtggcattcgtggcgcgtgcatcttgcaatcttttaatatatttatacatcaatacacatagcatatacatagctgattcgagaatacccaagaaagagtactagaaggcgaagttggtagcaggcaggatcaataggatttcatcgtggcaacctgaggacaaacggaagacgctgtggagctgcaaagagaaaaggcgctcgaattcttccgagtcctgacctttgtgctactcttcctgatcatctccctgtatctatatcgattcgcattctaaaggactagcgctgactgcctgggatttttgggtgaggatcgagtccgttgtgtaaccagaccaaaaggggagacagtgattctaatttcattttcgatttctattccgtttcggctcgccttattctcgttctcgatctctcggcgggaccttggacgtggtggtggggtctaattaaagccacagccaagatgcccaaattaccagcggttggcattgatcttggtaccacgtactcgtgtgtcggtgtctttcagcatggcaaggtggagatcatcgccaacgaccagggcaatcgaaccacgcccagctatgtggctttcacggagtcggagcgtctgatcggcgatgcggccaagaaccaggtggccatgaatcccaacaacacgatctttggtgagtctcgttcgcattgtccctgccacagatcttagtgatctctgcctgggtctagatctctcgccatgatcacttttaattactggcaacattttcatgaatgaactgtgcccatattttctttattatctcgcattcgagtttattttaagaaattctcactcactggcgccaaaatgcatttcactcccattgtgagagaaaatctcgcctcccactaaagtccatatccactccccgttggtttcttcgctcattcatttggtttagtgacacctccacttgttgtgtcagttctttcggcctgttttaccgcctcccatggcgcgtctatgatgcggattctcatcctccacatggcatttaatgctcggcccgtgccaacaaaaacttttgccatgtttattggcatcatttgtgtcggccaaataaatgaaaataggtttcagaaatgctttgctttcgcataaatatttttaatgctccctgtggaatgtcgcatatttttgtcaacaatgttttttgaatatcaaatcgaatatatttaaaatttagtttatttagttttctcaacaagagttgccggaaatagaagcttctgaaaatatggaaataataataaatctagattcgtttgagtaattgtttgtttagcattgatcatgagtaatttaggtacttcaaaaaattaaaattataccctccaaatcttaaatatataatcttaaatatttcttaaaattttctttcggatcccaaacattctaaccaaaccaaaatgcgtaaatttgtcaactattatttgttttttcaatgtaaatagtattccagcattcgtttagtcgttttcctaaacattttccatgcacccatccaaaagatttgctgagcagatctaatgcaagcttttctttctattttttgtactttcatttcagtctcagggtccgtatagaaaacctcatagaaagcccagacctgcccagaaacacaaaacaagtccaaaattccagacacacaatgccacataatatcccaacacaccccgcccgtatatgttagctaataaagtaaatatgttgtccaagtgcgatgatgttgtttcattggattctgatcgagtgattctgacttgcagatgccaagcggctgattggccgccgtttcgacgacgccaccgtccagtcggacatgaagcattggcccttcgaggtgttcgccgagaacggaaagccacgcatccgtgtggagtacaagggcgaacggaagagcttctatccggaggaggtgtcctcgatggtgctgacgaaaatgcgagagaccgcggaggcctacctgggcggcacggtgacagatgcggtggtcaccgttccggcgtacttcaacgactcccagcgccaggccaccaaggatgcgggtgccattgcaggattgaatgtccttcgcattatcaacgaaccaacggcggcggccatagcctacggcttggataagcagggcaccagcgaacgaaatgtcttgatcttcgaccttggtggtggcaccttcgacgtttctgtgctgaccatcgaggatggcatcttcgaggtgaaggcaaccgctggcgacacccatctcggcggcgaggacttcgataaccggctggtgaaccacttcgtacaggagtttcagcgcaaacataagaaggatctgggccagaacaagcgggctttgaggcgactccgaaccgcgtgtgaaagggcaaaacgcaccctctcctcatccacgcaggccagcatcgagatcgattccctctttgagggcgtcgacttctacacctcggtgacacgggcccgcttcgaagagttgaatggcgatctgttccgaggtaccatggaaccagtggccaaggcgctgcgtgatgccaagatggacaagggccagatacacgacatcgtccttgtgggtggctccaccaggattcccaaagtgcaacgtctgctgcaggactttttcaacggcaaggaactaaacaagtccatcaatcccgatgaggcggttgcctatggtgctgcagtgcaggcggccatcctccatggcgataaatcggaggcagtgcaggatctgctcctgctggatgtcactcctctgtctctgggtattgagactgctggcggagtgatgactacgctgattaagaggaacaccaccatacccaccaagcaaacgcaaatctttaccacttatgcggacaaccagccaggtgtgcttatccaggtgttcgagggcgagcgggcgatgacgcgagataacaacagcctgggtaagtttgaactctcggcaattccaccggctccacgcggagtgccccaggtggaggtaacgtttgacatcgatgccaatggaatactcaatgtgacggcactggagaagtcgacgggaaaggagaaccgtatcactatcaccaatgacaagggccgtctctccaaggaggacatcgagcgaatggtcaatgatgcggaggcttatcgccaagcggatgagcagcaacgcgaccgcatcaatgccaagaaccagctggagtcgtactgtttccagctgcgctccactctggacgatgagcatctgagcagccgttttagccccgcggatcgggagaccatccagcagcggtccagtgaaacaattgcctggttggatgccaatcaactggccgaacggcaggagttcgagcacaagcagcaggaactggagagaatctgcagtccgatcatcacgaggttgtaccagggcgctggaatggcaccacctccaacagccggaggctccaatccaggagcaactggcggctcgggtccaaccattgaggaggttgattagtgaagtagaaatttactatgggttctacagttgattttaaaatggtttgaaatccgcagcatctcgactaatcttattcacctctaaaatctttcgtaaataaatttagagtgttctgatttctacattctacacgtgctcgaaaatcgtttgtttggatttagttccgatatgatttggtattgatttggtttagttggacagattcttttatagtgttatgtgattagacttgaactcaatcgaatgggtatatgattaagttttgacttagtaaaacgcgttgatttgtttgaaaacacaaaattgcatttatttctatatactcccaacatcaaaccaacaccgaactccagatatgtgtctactcatcgtatgtatagcatagttgagtacaaatacgcacatacttatgtacatgcttgtatagatgtatatgtaacgatctttatagctgctgtaattcgtactattgagaacggatctatagataggataaatcatggaaccaaacgatgtagagcacatcaactacggtcaacaaccttggtatcaaatattaaataatattaccatcgattaagtaacttacatttgatctacacattttttttcgattattgtattcagttgaaacgcctctgtagaaaaattcgtaagtcgtaaattaaaattgactatgcacatccagcaaacggaatatgcgtttagatttctattcctacaaagaaccaaacatatcattcatttcctggcttaatttctcttactttgatctattaacacttttgatttatttcgtggcgatggcttaacataattattgatttagctagaacaatctggcattatccgatcattatcaattatcatcgtgagtacaatttacaagaaactaccgttgtataaaccgattttgtataaattcatattgcgtatattgtatcagtactatctcacactaacgataaacactagactaatttaagctaatcaattcatattgatctacataagtgaaaagccaagtggtatatcaattcttcagcagcaattctcaaatcggtcgccaccattttttcataccccctacacttggccttgtataacttctacaaaaaatgtatgacaatatacacaca

SEQ ID NO: 41915 - DNA, 2329 bp, DROSOPHILA
cttccgagtcctgacctttgtgctactcttcctgatcatctccctgtatctatatcgattcgcattctaaaggactagcgctgactgcctgggatttttgggtgaggatcgagtccgttgtgtaaccagaccaaaaggggagacagtgattctaatttcattttcgatttctattccgtttcggctcgccttattctcgttctcgatctctcggcgggaccttggacgtggtggtggggtctaattaaagccacagccaagatgcccaaattaccagcggttggcattgatcttggtaccacgtactcgtgtgtcggtgtctttcagcatggcaaggtggagatcatcgccaacgaccagggcaatcgaaccacgcccagctatgtggctttcacggagtcggagcgtctgatcggcgatgcggccaagaaccaggtggccatgaatcccaacaacacgatctttgatgccaagcggctgattggccgccgtttcgacgacgccaccgtccagtcggacatgaagcattggcccttcgaggtgttcgccgagaacggaaagccacgcatccgtgtggagtacaagggcgaacggaagagcttctatccggaggaggtgtcctcgatggtgctgacgaaaatgcgagagaccgcggaggcctacctgggcggcacggtgacagatgcggtggtcaccgttccggcgtacttcaacgactcccagcgccaggccaccaaggatgcgggtgccattgcaggattgaatgtccttcgcattatcaacgaaccaacggcggcggccatagcctacggcttggataagcagggcaccagcgaacgaaatgtcttgatcttcgaccttggtggtggcaccttcgacgtttctgtgctgaccatcgaggatggcatcttcgaggtgaaggcaaccgctggcgacacccatctcggcggcgaggacttcgataaccggctggtgaaccacttcgtacaggagtttcagcgcaaacataagaaggatctgggccagaacaagcgggctttgaggcgactccgaaccgcgtgtgaaagggcaaaacgcaccctctcctcatccacgcaggccagcatcgagatcgattccctctttgagggcgtcgacttctacacctcggtgacacgggcccgcttcgaagagttgaatggcgatctgttccgaggtaccatggaaccagtggccaaggcgctgcgtgatgccaagatggacaagggccagatacacgacatcgtccttgtgggtggctccaccaggattcccaaagtgcaacgtctgctgcaggactttttcaacggcaaggaactaaacaagtccatcaatcccgatgaggcggttgcctatggtgctgcagtgcaggcggccatcctccatggcgataaatcggaggcagtgcaggatctgctcctgctggatgtcactcctctgtctctgggtattgagactgctggcggagtgatgactacgctgattaagaggaacaccaccatacccaccaagcaaacgcaaatctttaccacttatgcggacaaccagccaggtgtgcttatccaggtgttcgagggcgagcgggcgatgacgcgagataacaacagcctgggtaagtttgaactctcggcaattccaccggctccacgcggagtgccccaggtggaggtaacgtttgacatcgatgccaatggaatactcaatgtgacggcactggagaagtcgacgggaaaggagaaccgtatcactatcaccaatgacaagggccgtctctccaaggaggacatcgagcgaatggtcaatgatgcggaggcttatcgccaagcggatgagcagcaacgcgaccgcatcaatgccaagaaccagctggagtcgtactgtttccagctgcgctccactctggacgatgagcatctgagcagccgttttagccccgcggatcgggagaccatccagcagcggtccagtgaaacaattgcctggttggatgccaatcaactggccgaacggcaggagttcgagcacaagcagcaggaactggagagaatctgcagtccgatcatcacgaggttgtaccagggcgctggaatggcaccacctccaacagccggaggctccaatccaggagcaactggcggctcgggtccaaccattgaggaggttgattagtgaagtagaaatttactatgggttctacagttgattttaaaatggtttgaaatccgcagcatctcgactaatcttattcacctctaaaatctttcgtaaataaatttagagtgttctgatttctacattctacacgtgctcg

SEQ ID NO: 41916 - protein, 641 aa, DROSOPHILA
MPKLPAVGIDLGTTYSCVGVFQHGKVEIIANDQGNRTTPSYVAFTESERLIGDAAKNQVAMNPNNTIFDAKRLIGRRFDDATVQSDMKHWPFEVFAENGKPRIRVEYKGERKSFYPEEVSSMVLTKMRETAEAYLGGTVTDAVVTVPAYFNDSQRQATKDAGAIAGLNVLRIINEPTAAAIAYGLDKQGTSERNVLIFDLGGGTFDVSVLTIEDGIFEVKATAGDTHLGGEDFDNRLVNHFVQEFQRKHKKDLGQNKRALRRLRTACERAKRTLSSSTQASIEIDSLFEGVDFYTSVTRARFEELNGDLFRGTMEPVAKALRDAKMDKGQIHDIVLVGGSTRIPKVQRLLQDFFNGKELNKSINPDEAVAYGAAVQAAILHGDKSEAVQDLLLLDVTPLSLGIETAGGVMTTLIKRNTTIPTKQTQIFTTYADNQPGVLIQVFEGERAMTRDNNSLGKFELSAIPPAPRGVPQVEVTFDIDANGILNVTALEKSTGKENRITITNDKGRLSKEDIERMVNDAEAYRQADEQQRDRINAKNQLESYCFQLRSTLDDEHLSSRFSPADRETIQQRSSETIAWLDANQLAERQEFEHKQQELERICSPIITRLYQGAGMAPPPTAGGSNPGATGGSGPTIEEVD

SEQ ID NO: 41917 - DNA, 4313 bp, DROSOPHILA
agttcttgctggtataaaaaaaccatgcgatttgggaatcgaacttgtgcgattggcgaacttaacggtactgagccgaacccacagctgtaacggtaaagaacgatgtgtgggcgaggacgacaacgacgacgatgctgctccttcggtggtagcttgacatctgctcggggtcctttcgggatcccgtgctgtccgactatcggttcggtttgagagcgggcgcaatgcagcaaaacttggagtaggttcaagttccgaagagagggtgagactttatatcgctgagacacagagagaagggaagagagagccgagagagagtcgttgtgatgagacagatgagtgactatctatacctcctgactgtcagctgtttaacgaatttaaaaatagaatttttccaatcccgattttgatccctagacacggttttatttttttctgacaaatttttctattttaatcttgaatattagatcattcgcggttttttcgattattttttattgaaagcttagccagaaagaagtgcatccaatattttaaattaaaaaaaaaaacatttaatctcagcactttggtcacactagatgtataaaatatctgtataatcatgtgcaccctgtgcacgcaataaaaattgtaattgctatcgatatttaaaataatattgcaaaatcaaactaaacctcttaagttacaaaatcgaagcacatgatattttattaaaataaagaagcaattcttcagtaagtgaacagaaaagatatttcttctaataaagaaattcttaaataaaagaaaatgttaacggattacatagaattgcgaataatttgtagaataaaatactaccatgacaaaaagcaaagaactttgataagctcttattacaaactagaaagctcttcaaccgattaataccgatgtttttcacggcggcgttatctcctcacccatagaaagttgttgttaaagcaatcggactattgagccggcagaacagtttaattcttcgaaaagataggtagtatactagagtcgggatcaattaatattccagacaattctctggtgaattctcaagaatgcaagtgtttttagctttagccctgctcgcaggcttggctttctcaggtgagttatagacgttagaatgctaaagtgtttagccaaacaaagagtaattgtttctgcgtttgtgtgcgctttaaactaatgcacacatgcatatattaaaacaatcgaggtcatcgttttaggattgaaactttagcttatcatcattttttttgccatgaagtatatttaaaaagtaaaaagaacatgtttttattaaacttttaaattagatcaaataaacgtaaaagggcatgtactgctattttgaccgcagctgtatatatacgaagtatataagcaatggcgtgagcttaaacctcgatggctgccctttaccgtttcttattgtcaagttcccgctcatttctcatctgaatctctccacactttcgccaacgacaatagctaatgccacgaatccgccgaaatgggatccaaactacatagtcaaaggaaccctgtacattccgtacgccgagattgcggaacccttctacgcctggtatgacaagaatacgaggcgatcccgcatcgattactacggcggaatggtgaagacataccaactggctggcgagggtcagtacggaaccctgctgaagctggcaccgattaccaccaagacggagaacaacaagctaacctgtctgcaggtgaatggcaccgccgaccaggctgtcgatattcagagcatcctgcccgatgcgaaacctttcagcctggtgggcaccgaatcctttttgggctacacgtgcgacaagttccgcctggagtcgacaattggccaaaagaagaacatctatacgctgtgggtgcggtacaagaagtcgccgcattatccctccagccgaatgcccattcccgtgcgctacgagatgaggggctataacaccctgctgggatcgcactacgatcattactacttggactatgacagctacgagcacgatgatattcccaacgaggtgttcgagatcgatgacagcctgcagtgcgtcggattccccggacccggcaccggtcactatgccaccttcaatcccatgcaggagtttatatccggaaccgatgagcatgtggacaaggccttccaccatttcaagcgcaagcacggagttgcttatcacagcgacacggaacacgagcatcgcaagaacatcttccgtcagaacctgcgctacatccactcaaagaacagggccaaactcacctacacgctggccgttaatcacttggccgacaagaccgaagaggagttgaaggcacgacgaggatacaaatcatcgggcatttacaacaccggcaaaccgttcccctatgatgtgcccaagtacaaggacgagattcccgaccagtacgactggcggctatacggcgctgtcactccggtgaaaggtgggttcattcattccctaagtacttacttagatgaatttgataatattgaattgcttaaaacgtaaactacccttagatcaatctgtgtgcggatcgtgctggtcatttggcaccattggtcacctggagggcgccttcttcctgaagaatggcggcaatctggtccggctttcccagcaggcgttgattgactgctcgtgggcctatggcaacaatggctgcgatggtggcgaggatttccgcgtgtaccagtggatgctgcagtccggcggagtgcccacggaggaggagtacggtccctatctgggccaggatggctactgtcacgtcaacaacgtgacgctggtggcacctattaagggattcgtcaatgtgacctccaacgatccaaatgccttcaagctggctctgctcaagcacggtcctctgtcggtggccattgatgcttctcccaagacatttagcttctactcgcacggagtttactatgagccaacgtgcaagaacgatgtagatggactggatcatgctgtcttggccgtgggctatggctcgatcaatggagaggactactggctggtgaagaactcgtggtccacctactggggcaacgatggctacatcctgatgtcggccaagaagaacaattgcggtgttatgaccatgcccacttatgtggagatgtagattgtcccgctcccgcctacatatttcttattttgtgtactctttttatttttacgcccacagggcgctaaatatgcaatacatttcataaactcttttgtaatccaagtcttttgaatcttatcactgctccgcttggctggaaatggagctaagtttagcttgggtcattatctccgcagtccatggtgtttcttaagttaattccatgccgataagccgataagcctagaagacaatgaccagttaccagttgaactttgcgcaagttgcaacagttttatgcgaatcggggtctttgccatttgtagtggaaatcatttctacagtaaaaactcgctacatttttaaaaattttaatcatttaatttcatcaatattaaattaaacatataattagttttaagaatctttactttgaataatgattctaaaaataagtataccttcttatttaaaaaacttgcaagcaaagcattgaatttttacattaaacccgttttacagtttttcaattaaaataaattaaaaatataacatgaagaatactttcaactgattctacaattttcactgctactacatttcattttagattaattgttcattttaaataatatatttataagttaatttgatataacaacaaataagtctaaatttaaatacatatttattggcatagatgttgcatccctggaattgcgccaattggtatttttctgttttggcttgatggtcatccgatacagtttagttattctttttgaattgtatttgcttggaatcgaaggaagcaacgaagccatggatgaattggtgaagatgtgccgggtgtgtatggacgagccgaaggacctgctagacatctacgacaacaagagcttgggggacagactgagcgacgatctacagcgaaccaaggaaccggagcccacgccggctgatttgctgaatatctgcagcgcatatccagtggataccggggacggctttccgctgaaaatttgcgaaccgtgccttattaaattgcgtgaggccttgagattcaggagacgctacacaaggaccatggaatacgtggcgcgcgtgaagagggagca

SEQ ID NO: 41918 - DNA, 1844 bp, DROSOPHILA
gcagaacagtttaattcttcgaaaagataggtagtatactagagtcgggatcaattaatattccagacaattctctggtgaattctcaagaatgcaagtgtttttagctttagccctgctcgcaggcttggctttctcagctaatgccacgaatccgccgaaatgggatccaaactacatagtcaaaggaaccctgtacattccgtacgccgagattgcggaacccttctacgcctggtatgacaagaatacgaggcgatcccgcatcgattactacggcggaatggtgaagacataccaactggctggcgagggtcagtacggaaccctgctgaagctggcaccgattaccaccaagacggagaacaacaagctaacctgtctgcaggtgaatggcaccgccgaccaggctgtcgatattcagagcatcctgcccgatgcgaaacctttcagcctggtgggcaccgaatcctttttgggctacacgtgcgacaagttccgcctggagtcgacaattggccaaaagaagaacatctatacgctgtgggtgcggtacaagaagtcgccgcattatccctccagccgaatgcccattcccgtgcgctacgagatgaggggctataacaccctgctgggatcgcactacgatcattactacttggactatgacagctacgagcacgatgatattcccaacgaggtgttcgagatcgatgacagcctgcagtgcgtcggattccccggacccggcaccggtcactatgccaccttcaatcccatgcaggagtttatatccggaaccgatgagcatgtggacaaggccttccaccatttcaagcgcaagcacggagttgcttatcacagcgacacggaacacgagcatcgcaagaacatcttccgtcagaacctgcgctacatccactcaaagaacagggccaaactcacctacacgctggccgttaatcacttggccgacaagaccgaagaggagttgaaggcacgacgaggatacaaatcatcgggcatttacaacaccggcaaaccgttcccctatgatgtgcccaagtacaaggacgagattcccgaccagtacgactggcggctatacggcgctgtcactccggtgaaagatcaatctgtgtgcggatcgtgctggtcatttggcaccattggtcacctggagggcgccttcttcctgaagaatggcggcaatctggtccggctttcccagcaggcgttgattgactgctcgtgggcctatggcaacaatggctgcgatggtggcgaggatttccgcgtgtaccagtggatgctgcagtccggcggagtgcccacggaggaggagtacggtccctatctgggccaggatggctactgtcacgtcaacaacgtgacgctggtggcacctattaagggattcgtcaatgtgacctccaacgatccaaatgccttcaagctggctctgctcaagcacggtcctctgtcggtggccattgatgcttctcccaagacatttagcttctactcgcacggagtttactatgagccaacgtgcaagaacgatgtagatggactggatcatgctgtcttggccgtgggctatggctcgatcaatggagaggactactggctggtgaagaactcgtggtccacctactggggcaacgatggctacatcctgatgtcggccaagaagaacaattgcggtgttatgaccatgcccacttatgtggagatgtagattgtcccgctcccgcctacatatttcttattttgtgtactctttttatttttacgcccacagggcgctaaatatgcaatacatttcataaactcttttgtaa

SEQ ID NO: 41919 - protein, 549 aa, DROSOPHILA
MQVFLALALLAGLAFSANATNPPKWDPNYIVKGTLYIPYAEIAEPFYAWYDKNTRRSRIDYYGGMVKTYQLAGEGQYGTLLKLAPITTKTENNKLTCLQVNGTADQAVDIQSILPDAKPFSLVGTESFLGYTCDKFRLESTIGQKKNIYTLWVRYKKSPHYPSSRMPIPVRYEMRGYNTLLGSHYDHYYLDYDSYEHDDIPNEVFEIDDSLQCVGFPGPGTGHYATFNPMQEFISGTDEHVDKAFHHFKRKHGVAYHSDTEHEHRKNIFRQNLRYIHSKNRAKLTYTLAVNHLADKTEEELKARRGYKSSGIYNTGKPFPYDVPKYKDEIPDQYDWRLYGAVTPVKDQSVCGSCWSFGTIGHLEGAFFLKNGGNLVRLSQQALIDCSWAYGNNGCDGGEDFRVYQWMLQSGGVPTEEEYGPYLGQDGYCHVNNVTLVAPIKGFVNVTSNDPNAFKLALLKHGPLSVAIDASPKTFSFYSHGVYYEPTCKNDVDGLDHAVLAVGYGSINGEDYWLVKNSWSTYWGNDGYILMSAKKNNCGVMTMPTYVEM

SEQ ID NO: 41920 - DNA, 5537 bp, DROSOPHILA
actaattagaagaaagaaggttctaatgtttgtttacattttttcatctaatatgtgtttagccaaaaaaaattaaactgagttttaaaacatacctcttaatttatattttctcatgacttgtcttgagatatgcaaacgcaaattattaaatattttttgtgtgtgttaaacatagttccgagaatgttttgtttgttgttttataagagaaggtctcataacatttgcagatattgcttatatgatacattgccgttataaaattaatgataattacctcacactttttttgtgaaccttgataagagtgacgtttttctagggctgaattccttttattggatcgcatcaaaagggccagagtacttagcttcctatatttgtgcctgtggcgataagaacctactctgcttaaatatttcacatttaatttcaattatgtcaagcctttcaactcgacttagagtgcacttcaaccttaagctatgtaggtgccataatgaagttcactcatccgagtggacactttgcctacgtcagagcttaaattgatttccgtaatctcccgaggaatactgcatggggtgaagttgtgattatgataagcggacaagagggataaggggggggaaggcggcgggcgccgagataagaggcagcgtcgtgataagattctcataaatgtggcgatcttttatttgaaccgctgctgatactcgctccgtggacttgttgtgtttttggttttttcttttcctattcgctttttacttgccgtatttctgtatttccacacgatcgtgctgcctcccaataaacccggtgcagtgagtcagtgtgttgtgtgccccagtcgcgagcggacgatccgtggagatcgcagattgcagatcgctctagatacaaatacattaggcaaacagaccggcagcggaatcgatcgattggcgatctcgtttgaattcgaaacgcgggacgatctagtctgatcggagatctccagcagaacagacgttgtgcctccgccgaaatataggagataacatatataggatatacatagactaggtgacatccagcacttgcactggatgataagagtcggtctctcagctgcattgaacttaagaagtcggaataaaacgcgacaaagccgagcatactttataacctgtttcggatccgtctaagtgtaagtctccgaaggtcgtttgctcgttttgaataagttctgacactgaataagtttgtttgattgtttgtttttattcgaactgctggtttactttttgttttattctttatctgctcgcagcgcctacagaatggccaaaatgccggagacaacgtttgccgacctgagtctggctgataaggtaactacatacatacatacatacatataaccatgggaggaaacagcatagtgaatatttattagccacttgaagttagtaggtgtgttggccagattcccacaactggtttcaatcgctgaacttggcgattaatataaaaacagcacgtgacactgcgacaaccaaacaaagcgcccaaagacgttctctgaacaataaattaaagcgatacattcacctcgaagcgtttaatacccttggtgaaagtgattgagtaaaaaattcagtaaagcagcattgattaaagctgaactaaattatcacagttttgaactatgaacttaacaaaacacatatttaacatggccgccataaatcatgctagtaaatcttacattattagctctgcagactttcaacatgtaatcaaattattgatctgctggggtcatgcgtagatagtggaaaggtataatgttgtagatacaagtgcatgtttattccatatggccagtgaaacgtaaacaacaataggcacaataggccacggtatacagtcgtagatttcattaactcaactgtttacatacactccgggaggccatagacgtaggtctggattgtagatctatagatctatattcgcgatttcatatctctcgaaatcaattggcgcgacgaattatcgccggtatgctaaacgatgccaattagtgaccaatgtatgcgaatgtatttgcttcggcttttctctgcacttaaatctggatttagctggaaacgacgcaaaagtcgcgccttcaaataggttttccatcaagaattaatcaatcccaataatactcacatatgtgcgattttgcatgctttatattcgatggcaatttgttaattgaaaagtgcaataaattcatgggtttgtgaatcgaatccattacccctgattacgcggtatattatacatatatactaagccaagggagtggaatcaaattcattagatgtgggcaaatatattttgtagttattaacacgagaaggtgatgctaaaatatgcaaaaaacacctgattatagataaaatagaataagtctattgtattattttctcccttttgtataacatgatttatgttaattcgaaagagtctatcttttagtttgttagatattattatacgcgcgattaaacaaagcaatttgcgggtctccagatgaaaatgttaacaaagcttatcccacataaatatttaaattgcatttaactttattattattattttttatacaatagactgctgtgaagaagtcaagtattgaagctcggcggttttctgatgtgtccacctgctcattcagttccagtaagtactataactatgactaagatgtaatgtaaagcattattttacatgatctatctataatgaagcataaaggatatcattgttttccatttcaatattctctcttgcgattgaactcacttaatggtcacttgatctctttgttagcctgtttcaccggaagctccgacgaggaagacgtctccccgaaggacaaccatcagcgcaactccgccggaggcactgacttttgcgtgaagagcatctcgaagagtgcatttggaaggcgggagatcgagatcgccgagtcggagatgccgggcatcatgactctgaggaaaagagcgaaggatgagaagcccctaaagggtgccaatatcgtcggatgcacccacgtcaatgctcagtcggcagtgctgatcgagaccctcgtccaactgggcgccacagttcgctgggctgcctgcaacatttattccacacaaaacgcagttgccgccgctctggcagaggcgggaattccgatcttcgcctggcgcggagagacggaggaggagttctggtggtgcttggacagggccatctactccgacggctggcagccgaacctaatcctggacgacggcggcgatgccacgcaccttatgctcaagaagtaccccgactacttcaaggccattcggggcatcgtggaggaaagtgtgaccggggtgcaccggctgtacatgctgtcaaagggcggaaaacttactgttccggccatcaacgttaacgactcagtgaccaagaacaagtttgatactttctacacgtgtcgtgactccatcctggacaggtgagcatagatactcatgattaaggaagagtactatctctgactggtcctttctaataattctcttccagtctgaaacgcaccacggatataatgtttggcggaaagcaggtggtgatctgtgggtacggtgatgtgggaaagggctgtgcccagtccctgaagggccaaggatgcattgtttatgttacggaagtggatcccatatgtgctctacaagctgccatggatggattccgggtggtacggctcaacgaggtcatcaggacggtggatgtggtggttacggcaactggaaacaaaaatgttattaccagggatcacatgaatcgcatgaagaatggttgtatcctctgcaatatgggacattcctgctcggagattgatgtggtatgtattcggggtgattccattgtggccttcatatatcaaaaggtttttaacccactttagaatggcttgcataccccggagctaacgtgggagcgtgtccgttctcaagtggatcacatcaggtggccggacggcaggatgatcattttgctcgccgagggaagactggtgaatttgtcctgttccaccatttcgtcctttgtcgtatccgtggcctcatccacccaggctttggccctgattgaactcttctcagcgccaggaagatataagtcggatgtctacctgctgccaaagaaaatgggtaggttcttagttaaaatagctaaggaaatctttggacaatttaaattaatttaatgaatactttcagatgaatacgtggccagtttgcatctcgccaccttcgatgctcatctcacggagctcacggatgagcagtccaagtttatgggcttaaacaaggccgggccttttaaagccaattactacaggttggttacccttctttccctttcaattttgcactctagttaataatatacttatttcatttgcagatattaatcagtatttaatgctttatcccgttattctcgttctgtaattttgatattatttagaaaatatatgaaaatacattttaacataaatggttttaatttgggagcatacaagtcactgttttcttacaacacatcatattttaaatttttcattttgatttcagagaaataccaattgcttggtgctacccgaagttaaaattctcttcgttttaaatacattttaaataattatttgaaaatttaattgtaggtattactcctaaattaaaattattaaatatttaacattattataattattataattgtcttatcagtctcaattggttcaagtccattccaattaggcaaatttaacttacaaattctgtaaaatgtagcattatggttcgtgttttggctaaagccaattttacacatacttattcgattccaatataatacaaaaattctacgtggaagtttctacacgtctcagtatatctacatgggacttacatatcagtaagtatatcataatatatgatatatataatcagtaaattataaaataatcataaaataataggaaccaaaaagtatttttcgaaaaacattaaagctgaattaagatgctagtactgaccagtcagacattgtaagtctatttacaatacctttaaaattctcagtagctatattttgaaatgtcaaattgggatagaaattgtatgatttttaacttgaccacacaataacacacttgatcacactttcgttcacttaattatcactggccatgggttcgttattaaaggagctcgtatgccagataaaagaaatacagtccgatttgaagaatgacacccatgtaggtgcgactaacggggaatggagccgaaaagaagttcgcaaaatgaagatttgtttagggaaggtaattcttttcacaaggtccttgagggagacatttgcggaaagtcaagagtccgggaatcaagaacaatcctcgaaggctttagttctgttacgatgtaagttaatctttcaaagtg

SEQ ID NO: 41921 - DNA, 1776 bp, DROSOPHILA
ctccagcagaacagacgttgtgcctccgccgaaatataggagataacatatataggatatacatagactaggtgacatccagcacttgcactggatgataagagtcggtctctcagctgcattgaacttaagaagtcggaataaaacgcgacaaagccgagcatactttataacctgtttcggatccgtctaagtatggccaaaatgccggagacaacgtttgccgacctgagtctggctgataagactgctgtgaagaagtcaagtattgaagctcggcggttttctgatgtgtccacctgctcattcagttccacctgtttcaccggaagctccgacgaggaagacgtctccccgaaggacaaccatcagcgcaactccgccggaggcactgacttttgcgtgaagagcatctcgaagagtgcatttggaaggcgggagatcgagatcgccgagtcggagatgccgggcatcatgactctgaggaaaagagcgaaggatgagaagcccctaaagggtgccaatatcgtcggatgcacccacgtcaatgctcagtcggcagtgctgatcgagaccctcgtccaactgggcgccacagttcgctgggctgcctgcaacatttattccacacaaaacgcagttgccgccgctctggcagaggcgggaattccgatcttcgcctggcgcggagagacggaggaggagttctggtggtgcttggacagggccatctactccgacggctggcagccgaacctaatcctggacgacggcggcgatgccacgcaccttatgctcaagaagtaccccgactacttcaaggccattcggggcatcgtggaggaaagtgtgaccggggtgcaccggctgtacatgctgtcaaagggcggaaaacttactgttccggccatcaacgttaacgactcagtgaccaagaacaagtttgatactttctacacgtgtcgtgactccatcctggacagtctgaaacgcaccacggatataatgtttggcggaaagcaggtggtgatctgtgggtacggtgatgtgggaaagggctgtgcccagtccctgaagggccaaggatgcattgtttatgttacggaagtggatcccatatgtgctctacaagctgccatggatggattccgggtggtacggctcaacgaggtcatcaggacggtggatgtggtggttacggcaactggaaacaaaaatgttattaccagggatcacatgaatcgcatgaagaatggttgtatcctctgcaatatgggacattcctgctcggagattgatgtgaatggcttgcataccccggagctaacgtgggagcgtgtccgttctcaagtggatcacatcaggtggccggacggcaggatgatcattttgctcgccgagggaagactggtgaatttgtcctgttccaccatttcgtcctttgtcgtatccgtggcctcatccacccaggctttggccctgattgaactcttctcagcgccaggaagatataagtcggatgtctacctgctgccaaagaaaatggatgaatacgtggccagtttgcatctcgccaccttcgatgctcatctcacggagctcacggatgagcagtccaagtttatgggcttaaacaaggccgggccttttaaagccaattactacaggttggttacccttctttccctttcaattttgcactctagttaataatatacttatttcatttgcagatattaatcagtatttaatgctttatcccgttattctcgttct

SEQ ID NO: 41922 - protein, 504 aa, DROSOPHILA
MAKMPETTFADLSLADKTAVKKSSIEARRFSDVSTCSFSSTCFTGSSDEEDVSPKDNHQRNSAGGTDFCVKSISKSAFGRREIEIAESEMPGIMTLRKRAKDEKPLKGANIVGCTHVNAQSAVLIETLVQLGATVRWAACNIYSTQNAVAAALAEAGIPIFAWRGETEEEFWWCLDRAIYSDGWQPNLILDDGGDATHLMLKKYPDYFKAIRGIVEESVTGVHRLYMLSKGGKLTVPAINVNDSVTKNKFDTFYTCRDSILDSLKRTTDIMFGGKQVVICGYGDVGKGCAQSLKGQGCIVYVTEVDPICALQAAMDGFRVVRLNEVIRTVDVVVTATGNKNVITRDHMNRMKNGCILCNMGHSCSEIDVNGLHTPELTWERVRSQVDHIRWPDGRMIILLAEGRLVNLSCSTISSFVVSVASSTQALALIELFSAPGRYKSDVYLLPKKMDEYVASLHLATFDAHLTELTDEQSKFMGLNKAGPFKANYYRLVTLLSLSILHSS

SEQ ID NO: 41923 - DNA, 3763 bp, DROSOPHILA
gagctcacggatgagcagtccaagtttatgggcttaaacaaggccgggccttttaaagccaattactacaggttggttacccttctttccctttcaattttgcactctagttaataatatacttatttcatttgcagatattaatcagtatttaatgctttatcccgttattctcgttctgtaattttgatattatttagaaaatatatgaaaatacattttaacataaatggttttaatttgggagcatacaagtcactgttttcttacaacacatcatattttaaatttttcattttgatttcagagaaataccaattgcttggtgctacccgaagttaaaattctcttcgttttaaatacattttaaataattatttgaaaatttaattgtaggtattactcctaaattaaaattattaaatatttaacattattataattattataattgtcttatcagtctcaattggttcaagtccattccaattaggcaaatttaacttacaaattctgtaaaatgtagcattatggttcgtgttttggctaaagccaattttacacatacttattcgattccaatataatacaaaaattctacgtggaagtttctacacgtctcagtatatctacatgggacttacatatcagtaagtatatcataatatatgatatatataatcagtaaattataaaataatcataaaataataggaaccaaaaagtatttttcgaaaaacattaaagctgaattaagatgctagtactgaccagtcagacattgtaagtctatttacaatacctttaaaattctcagtagctatattttgaaatgtcaaattgggatagaaattgtatgatttttaacttgaccacacaataacacacttgatcacactttcgttcacttaattatcactggccatgggttcgttattaaaggagctcgtatgccagataaaagaaatacagtccgatttgaagaatgacacccatgtaggtgcgactaacggggaatggagccgaaaagaagttcgcaaaatgaagatttgtttagggaaggtaattcttttcacaaggtccttgagggagacatttgcggaaagtcaagagtccgggaatcaagaacaatcctcgaaggctttagttctgttacgatgtaagttaatctttcaaagtgaaattattatataaatacgtatatttttgagtaggtactcggtacattaagcgcttgtctatggtcctgacactacttgagactgaagaaggcttaaataaagtgaataaaacgctcttccaactggacgttgatacaattctttttgaactggagtgtattgtcaaggaggccttgaaatctctttcagtgtcgcgattcccgtaccaagagtcatcttgtaccactacagaaactttagtaaaagaaagtcccatttgtgagttgaataaattgcggctaatgttgaaaaatgagaagaaaaagcaggagctagaaataatgggccacaatttaatcataatgaaggagaaaactttggttcttcaggcccgtaaaaatcaaagggcagcggaaaatagactagctgagaagcaggatcgcatcaaggcactcgaagaatgtctagccaactgcaagtttcagttgaagaacgtcaacgaacagtatcagaaattgaagaaagccagcaatcaattaataagggaaagtaatcagattaggccacagaaaagttggagtgtgctagtagggcggagaaaaggcagaatatcgactaggaccagttttgtatggaagtcgcttaagctagatcaatcggaacgggaaactcttatgggtctaaagaagcgccttagtgaggaaaaagaaattaagttgagagccaagactgaaatgagtaaaatcagaaaggccatggacgagctgtgtcttggtaaaggagaacttcaatttggattacaaaataagagtgaaacagatgccagtaaggataccttggttgtcattgataaagccttgagtgctctttcccaatacaacacgcttaaatttccggattgcaacttccaattgagccgccttatgaaatctctttatggcagcttaactacgatccgagatagatggatccgaaaaattagcagtgcagttgaaccaacaccaagctgtttaaaaagtaatactccctcattaccagagcccccactgacggtttctttctcaaccgacctattttgggacaagatatacaagccctgcacccaatcaaatcctgttatgcccaatacgagtttgatcccggttctgccgaagaaacagccaaaatcgttacagctaacctgtgagccttcagttcaatacaaagtggcgtcccgctcttccactacagcaccggtgccgaagtacctgggaaaaacattcggagatcgacgtttaagcctgctccgctggtgccaagagagggttaaaccgtacggaattccaatgtacgagtttagtgcctcatggattagtgggcgtgctttgtgcgccatcatccactcctatcttcccgacctcattgacaaaacatacctcgccaaaaagaagcccgaagaagtcttagcatatggcattaaagtggccaaatcaattggtgtttctgattccgtcgatctaattagggagcttcggcaggggcgtcccaacctagagaagatcgtcgatttcgtggaggagctgcaaggctatcttgatatgtatgatacaaatatatgagtaaaaaattgaaatttttttatttttgtacacgtatatttcatagctacaataaaatatattttaaaacgttcagaaaagcaaaataattttagattatttttgctatgcatttttatagcttctgcagcgacggcaaatgaattcatagattctctataggcctttcacacatgctacttataaaaacgtgcaataatcatttaataacacataaatattttattccaaagccggcggcatatttgatttggtatagttcgataatatatggccttgaataaaagccgattggcgacggggacacagaaagttttgcaattattttcaagaagatagtcttaaaacgattggtttctaaacacgaacattttggacacttaggcctgcatgtaaaaatatataatctgcggcttttctatgggtccttttcatcgtggataatggacctgggccagtaggttatcatgccgaggataatcttctgtttggctcgcggtccggtcagtggattcaactgcatcacgaaggtgaccatccaggccaagtagcagcatacagccgttaggatcacacagcaccggattagaccacgctcctcgtatcggtaggacaccaggaacccaatgatggcgaatagtagccagaaaacggtgatgaccatgaatgccacgtgcttatccatttccggagagtttgccagctggctggatgttaagttctgacaagtttccaccctgtgtcctggatctcggagcttgggcaatcccaatttgggtgcctgcactcataaacttttatggctgcgaacatttcgatattttatggcaaacagcagaggctgcaggcgcagtggagcgcgatggctgtaaatggaaaactgtatacattttccgagtgctggagcggtccataaaactgctgcacgcatcctgactaagcgcaaaatccgttttacgagactgccagctctccagttatcctgccatcctccccaggatcatc

SEQ ID NO: 41924 - DNA, 1708 bp, DROSOPHILA
gtgcgactaacggggaatggagccgaaaagaagttcgcaaaatgaagatttgtttagggaaggtaattcttttcacaaggtccttgagggagacatttgcggaaagtcaagagtccgggaatcaagaacaatcctcgaaggctttagttctgttacgatgtactcggtacattaagcgcttgtctatggtcctgacactacttgagactgaagaaggcttaaataaagtgaataaaacgctcttccaactggacgttgatacaattctttttgaactggagtgtattgtcaaggaggccttgaaatctctttcagtgtcgcgattcccgtaccaagagtcatcttgtaccactacagaaactttagtaaaagaaagtcccatttgtgagttgaataaattgcggctaatgttgaaaaatgagaagaaaaagcaggagctagaaataatgggccacaatttaatcataatgaaggagaaaactttggttcttcaggcccgtaaaaatcaaagggcagcggaaaatagactagctgagaagcaggatcgcatcaaggcactcgaagaatgtctagccaactgcaagtttcagttgaagaacgtcaacgaacagtatcagaaattgaagaaagccagcaatcaattaataagggaaagtaatcagattaggccacagaaaagttggagtgtgctagtagggcggagaaaaggcagaatatcgactaggaccagttttgtatggaagtcgcttaagctagatcaatcggaacgggaaactcttatgggtctaaagaagcgccttagtgaggaaaaagaaattaagttgagagccaagactgaaatgagtaaaatcagaaaggccatggacgagctgtgtcttggtaaaggagaacttcaatttggattacaaaataagagtgaaacagatgccagtaaggataccttggttgtcattgataaagccttgagtgctctttcccaatacaacacgcttaaatttccggattgcaacttccaattgagccgccttatgaaatctctttatggcagcttaactacgatccgagatagatggatccgaaaaattagcagtgcagttgaaccaacaccaagctgtttaaaaagtaatactccctcattaccagagcccccactgacggtttctttctcaaccgacctattttgggacaagatatacaagccctgcacccaatcaaatcctgttatgcccaatacgagtttgatcccggttctgccgaagaaacagccaaaatcgttacagctaacctgtgagccttcagttcaatacaaagtggcgtcccgctcttccactacagcaccggtgccgaagtacctgggaaaaacattcggagatcgacgtttaagcctgctccgctggtgccaagagagggttaaaccgtacggaattccaatgtacgagtttagtgcctcatggattagtgggcgtgctttgtgcgccatcatccactcctatcttcccgacctcattgacaaaacatacctcgccaaaaagaagcccgaagaagtcttagcatatggcattaaagtggccaaatcaattggtgtttctgattccgtcgatctaattagggagcttcggcaggggcgtcccaacctagagaagatcgtcgatttcgtggaggagctgcaaggctatcttgatatgtatgatacaaatatatgagtaaa

SEQ ID NO: 41925 - protein, 553 aa, DROSOPHILA
MKICLGKVILFTRSLRETFAESQESGNQEQSSKALVLLRCTRYIKRLSMVLTLLETEEGLNKVNKTLFQLDVDTILFELECIVKEALKSLSVSRFPYQESSCTTTETLVKESPICELNKLRLMLKNEKKKQELEIMGHNLIIMKEKTLVLQARKNQRAAENRLAEKQDRIKALEECLANCKFQLKNVNEQYQKLKKASNQLIRESNQIRPQKSWSVLVGRRKGRISTRTSFVWKSLKLDQSERETLMGLKKRLSEEKEIKLRAKTEMSKIRKAMDELCLGKGELQFGLQNKSETDASKDTLVVIDKALSALSQYNTLKFPDCNFQLSRLMKSLYGSLTTIRDRWIRKISSAVEPTPSCLKSNTPSLPEPPLTVSFSTDLFWDKIYKPCTQSNPVMPNTSLIPVLPKKQPKSLQLTCEPSVQYKVASRSSTTAPVPKYLGKTFGDRRLSLLRWCQERVKPYGIPMYEFSASWISGRALCAIIHSYLPDLIDKTYLAKKKPEEVLAYGIKVAKSIGVSDSVDLIRELRQGRPNLEKIVDFVEELQGYLDMYDTNI

SEQ ID NO: 41926 - DNA, 3143 bp, DROSOPHILA
agaacaattaagtaaaggaacacgcgattgtccttataatataataatcgaaaggatcatttttgaagtatttgcggcatgtgacagctcacagtttgagtgcgacaacggcagctgcatttcgcagtacgatgtctgcaatggcgagaagaactgcccggatggatccgatgagacggcgttgacctgtgtctcccagcggcagcactgcaccaagccctatttccagtgcacctatggagcatgtgtgatcgggacagctgggtgcaatggagtcaatgagtgcgcagatggttccgatgagaccaggttgagatgcggcaacgaggacgatatacggcagcacgaccgacggcttcaaggcaattgcaagtgagtactgaaatgtagaatgtagataacaggatgaggactaggaatggatacattaattgcttctcttcccctttagggaaaatgagttcaaatgcccatccggaatttgcctggacaagagcaactttctgtgcgacggcaaggacgactgtgcggatggaacgggctttgacgagtcggtggaactgtgcggccacatggagtgtccagcgtactccttcaagtgcggaacaggtggctgcatctcggggtcattgtcatgcaatggggaaaacgactgctatgacggatccgatgaggcaccactgctatgcaacaccaccaaaaaggtgaccacacccgtggtgactgagactccgctggagctgctcggatgccccttgccacttggcgacgaaaggcccatcctgacgggtgacggcagccgcgtcctcactggacccatcacccggggaacagtgcgattctcctgcaagcagggatatgtgctggagggagaggagagcagctactgcgccaagaacaagtggagtacttccacaatcccgaaatgcgtgagtgagtgactgtgttttgcccgttccctggtaataatttctcacatgtactccttgcttttccgtagaatactgcagcactgccggagaattcgatggctactccacgaaggccttgtgcacccacaatggacagcaagtggaatgccgcaaaccattccatccgcccggcaccgaagtgaagtttgtctgctccaccggattcaagaccctgagcccactgccagaaatgcggtgcatgaagggaggatactggaaccgcggacgccagcgatgcgagcaggactgcggccagctagccacgcccataaaacagttctcgtccggcggctatacgatcaacaacacggttgtgccctggcatgtgggactgtaagtctgctaactatccatcccgatgatttcattgatattccctgtgtagatatgtgtggcacaacgagaaggactaccactttcagtgcggaggatcgctactcaccccggacctagtcataaccgccgcacattgcgtatacgacgagggtactcgactgccctacagctacgacaccttccgggtgattgcggccaagttctatcgcaattacggagaaactactccggaagaaaagcgacgggatgtgaggctcatagaaatagcaccgtaagtaaaaagaaactggctccttcatgtttcttagcactggtttattacctgcagtggctacaaaggaaggacggaaaactattaccaggatctggcccttctgaccctcgacgagcccttcgagctgagccacgtaatccggcccatttgcgttaccttcgccagctttgcagagaaggagagcgtcacggatgatgtgcagggcaagttcgctggctggaacatcgagaacaagcacgaactccagtttgtgccggccgtgtccaagtcgaattccgtgtgccgtcggaatctgcgggacatccaggcggacaagttctgcatcttcacgcagggcaagtcgctcgcctgccagggtgacagtggcggtggattcacctccgagctgccgaccaacgccttctccacctggaacaccgcccgtcacttcctcttcggggtgatcagcaatgcacccaatgcagatcagtgtgcccacagcctgaccgtgatgaccaacatccagcacttcgaggatatgatcctgaatgcgatgaacaggagcgtggaaactaggtcctgagtccgggcacttattgtgattacaatagatttattttaagagattttatttaagtcgtcaaacctattttctatcgaaacattgcgaagggtgaatctcaaagggcaattgtgtattaggttatttcaagtcagttctttgtaaaggacaattgccaattgccacactaagctatttaccctctaatcctcaacattatgtttattgatacttcataaattttgaaataccaaattattgagcaataccggttaagtgaaatttgattcaaattttgaccggctaacaaaaatcgaacttaattcctatcgataagtcggaaactcaagcccaccactgcaatcgtatttaatcaactattatgactaatcagctgattatgagtcaaccgcaccgcaatttcatttggttggccaattgaatgatgtaaacatgtctgcacattactgcggctacaacccgccgccgccgaacttcaaaaccttttttcccgaaaaatacaaggaccgactgcagcgacttcccaattttggaaaattgcgatcatcgtgggagatccacaggcgaccgaccctcgtggttcttcatgtgtttgcggatgatatcggtgcgctagacaaatggatagatgtggtataccgactagctgcccctgggtttcttggcggcgagatggactttttcgtggacgatctgtggcagtcgttcatcttcaatgaggatgacttcagcttctctcggagtgacgaaggatgtacagtggactcatttcccctgatatacgccgcaaattcaactggaaaggtattcttctttggggatttcactgggcctaaactgcccgacctggagagtctaagggatttctgcgatcaggtgattaaggggatagccgaggagcccactgctagagatcccaaggttgagaatataagccttgatagctggaacgaacttatgtacgccagtgataatgatatagcgatttgcttctacaact

SEQ ID NO: 41927 - DNA, 1034 bp, DROSOPHILA
aatactgcagcactgccggagaattcgatggctactccacgaaggccttgtgcacccacaatggacagcaagtggaatgccgcaaaccattccatccgcccggcaccgaagtgaagtttgtctgctccaccggattcaagaccctgagcccactgccagaaatgcggtgcatgaagggaggatactggaaccgcggacgccagcgatgcgagcaggactgcggccagctagccacgcccataaaacagttctcgtccggcggctatacgatcaacaacacggttgtgccctggcatgtgggactatatgtgtggcacaacgagaaggactaccactttcagtgcggaggatcgctactcaccccggacctagtcataaccgccgcacattgcgtatacgacgagggtactcgactgccctacagctacgacaccttccgggtgattgcggccaagttctatcgcaattacggagaaactactccggaagaaaagcgacgggatgtgaggctcatagaaatagcacctggctacaaaggaaggacggaaaactattaccaggatctggcccttctgaccctcgacgagcccttcgagctgagccacgtaatccggcccatttgcgttaccttcgccagctttgcagagaaggagagcgtcacggatgatgtgcagggcaagttcgctggctggaacatcgagaacaagcacgaactccagtttgtgccggccgtgtccaagtcgaattccgtgtgccgtcggaatctgcgggacatccaggcggacaagttctgcatcttcacgcagggcaagtcgctcgcctgccagggtgacagtggcggtggattcacctccgagctgccgaccaacgccttctccacctggaacaccgcccgtcacttcctcttcggggtgatcagcaatgcacccaatgcagatcagtgtgcccacagcctgaccgtgatgaccaacatccagcacttcgaggatatgatcctgaatgcgatgaacaggagcgtggaaactaggtcctga

SEQ ID NO: 41928 - protein, 290 aa, DROSOPHILA
MRCMKGGYWNRGRQRCEQDCGQLATPIKQFSSGGYTINNTVVPWHVGLYVWHNEKDYHFQCGGSLLTPDLVITAAHCVYDEGTRLPYSYDTFRVIAAKFYRNYGETTPEEKRRDVRLIEIAPGYKGRTENYYQDLALLTLDEPFELSHVIRPICVTFASFAEKESVTDDVQGKFAGWNIENKHELQFVPAVSKSNSVCRRNLRDIQADKFCIFTQGKSLACQGDSGGGFTSELPTNAFSTWNTARHFLFGVISNAPNADQCAHSLTVMTNIQHFEDMILNAMNRSVETRS

SEQ ID NO: 41929 - DNA, 4106 bp, DROSOPHILA
gattcccaatcaatcccgattcttcaaccacaatgtggacaatctgcctgcactactgcaccaacttctgcccgcctacgatctcatcgtgctggatcctccgtggcggaataagtacatccgcaggctgaagcgggccaagccggagctgggatactcgatgctgagcaatgagcaattgtcgcacataccgctctcgaagcttacgcacccacggtcactggtggccatctggtgcaccaattcgacgctgcatcagttggccctggagcagcagctgctgcccagttggaatctccggttgctccacaagctccgatggtacaaacttagcacagaccatgaactaattgctcccccgcagtcggatctcacccagaagcagccttacgagatgctctacgtggcctgtcgctccgatgcttctgaaaactatggaaaagatatccaacagaccgagctgatcttcagcgtgcccagcattgtgcattcccacaagccaccactgctgtcttggctgagggagcacctcctgttggataaggaccagctggaaccaaactgcctggagctgtttgcccgatatctgcatccccacttcacttcaattggcttagaagtgctcaaactgatggacgaaaggctatatgaagtccgtaaagtagaacattgcaaccaggaggaggtaaattagctacgcctaattattgtatttaatttttacaagtacctcattaaataagggatttataagcagctatgagttttaacaattttatttgtgtactgttaatgagagcaaatgcatttgaattttgtgtgtaggcggccggcggatgggtttccttcttccagagaagccaacgatgcctggctgaagctaaatgttaaacatttggggtggcgtgtgtgggattttgttttgttttttcttttgagtgttaaattaagtattaaaggatagtaagcattattaatacacgtggttaatcgcaggctactactcctgaccctgggccatggccgccggattggtgggctcgttgccgccgcgtttctttgatccagagacgatatcatcgatgcgcagcagcaggatggccgtctccacggcggtcttgtaggtctgaagcttgacggccagcggctcccagatgttcttcacgttcatgtccacgatttcgccggactcgccgtcgatgccccaggcgcagacaccatcgccggtgtgggaggcgtgcttggcgcggagagcagtcagagcacggatcgtgttggcgccgcaattctgagccagtgtgcgcggtatgatctctagggcgtgggccaccgccgtgtatggtcccttaacctgcttgcgcgtgagcagctgggaggcagccatctcaacggctccgccgccagccaccaggcgtggctccagcaccaagttgcgggccacgtgcagggcgtcctgcaggttgcgctccgtttcgttcaagatgtccttgctggcaccgcgcagcaggatggtgcaggccttgggctccttgcactccgtcacgaaagtgaagtactcatcgccgatctttttgacttcgaacagtccagctcccgtgcccacatccttctcggttagctcctcagtgcggttcacgatggtggcaccacaggcgcgggcgatgcgcagattgtcagtcttacgcagccgacggatggccgtgatgccagccttcagcaaatagtgctgggcgagatcggagacacccttctcagtgaataccaaatccggtttcacggcaatgatgtcggcgcagatgcgctgcacaaactcctcctcgatctgcagcatgcgggtgaagtcttgctccccgattatctccacgttggtttggctctcgcccttcttgtactccagcgagcagtcaagcagcacgatgcggggattctcgatgaggcgtcgcatcttgggatgcgtcacgtctttgttgatcatcacgcccttaagaacacacgactcctcgatggcgccacccgggatcttctccaccttggcatagctgtgaaagtaacaaagttaaaattatttattcaaaaataatatgcataacaaatttcgttcttaccgtttaatgtctacctccagacggccgttctcacttagcgtcactgtctcgactgcgtccagggcaatcttgacggcaaggtcggaccacttgccaatgaacttggtgcccacacaggccttgaccacatcggccatcttggccttatccttgacgtccaactggatgctaagctgggactgcaggtggccgacgatgtcctcgagggcctcgcgataggcgcgaatgataacagtggggtggatctgttgctggaggaagggctcggcggcggccagcatctcgccggccaggacgatgaccgatgtggtaccatcgccaacctcctcgtcttgtgtgcgagcaatttcaatcatgctcttggccgccgggtgctgcacagtgatctcacgcaggatggcgttgccatcgttggtcatcacgatgccgcccattgggtccatcagcatcttcagcatggcctgtggccccagacatgtgcgtatcacatcggcgatggcctggaaaaagacgttttaatcaacagatggtcggaaaacgcgagaacacaaaaacccaagacccagacatgtgagtcacgcatacctttccggcttggatgttctccaactgcactttgcggcccgattctctctttgtgttttgacctgtcggcgggtaattcgattgcaattgggctctacgacgtgcaaatttcatactcactcaacacgagtattggctgctgtccaccgaacatctttctggctgtttaatttatttctgcgtgaaaacaattgaactcgtgctggcgctgccgctgtttgaaagagaatgagtgaggttagaaccgccgatgacacattattcgagaaggttcgataggatattgagcggaccggcttgttagttacttctgccagttccttcttctagtttcttttctttcctcacttactgctaactgacttttgcgatcgcttataagtttaattcaaattctccacaattcgaagcagcagctctcttaagaatcgatatcgagaaacagtatacttacactatgcagcttttgttatcgatgtcacagaattacattcgtcataactgcgattttttgaaggcgcctaacttggttttaaattttccaccctgaggtttaagcgaaatcaaaacattaaacttgtaacaataaataatattttctacggtgtaagtgatactggaaattaatttatattacgaatggattttaaatttatgttatatagcatatttctatcacatcataattaaaatgtggaaattttgaagcctaaaaagcctaaccaactaaactcaaaagaagttaaaatataatttatgaaaattgtatcaccttcgaaaaagaaaatgttggaggatattctgaatataacgggggaaaagtgattacttggaatgatgagttacataaacagcgtcgaactttttaatatttgaagatcctgtgctgtattcaataaaactgctcaaaacgtattaaatggatttcatggtagtttttatatataaatggaaaaacaaataagttttgcaaatactttaaaagtgtagtgtaagcgtttcataaattaaataaattatcgatatcgataacaaaccgcgagtcagctgtggcctgtttgtttacgatacatttcggcttcaatttgtttttaatagttattaattttttaactagacaacatggaggccaagaagatatcttttggctttagtaaattgtccaagaaaccaaacattctgcccagcaagcagccgaaagaggaaagcaaggtggagttgataaaatgcttggaaggaaacgaaatcatgccagtcgagtaagttaaaatatcttgaaatagttttatactcatatgtaatatttagcgaaaaggtggaagctgctcctcttaccatcaaaatgataggcatgcagaagacttcgtccgctttggcgagtctgatgaggaggcgggcagttctgctgggcgagga

SEQ ID NO: 41930 - DNA, 1759 bp, DROSOPHILA
ctgctgcttcgaattgtggagaatttgaattaaacttataagcgatcgcaaaagtcagttagcacggcagcgccagcacgagttcaattgttttcacgcagaaataaattaaacagccagaaagatgttcggtggacagcagccaatactcgtgttgagtcaaaacacaaagagagaatcgggccgcaaagtgcagttggagaacatccaagccggaaaggccatcgccgatgtgatacgcacatgtctggggccacaggccatgctgaagatgctgatggacccaatgggcggcatcgtgatgaccaacgatggcaacgccatcctgcgtgagatcactgtgcagcacccggcggccaagagcatgattgaaattgctcgcacacaagacgaggaggttggcgatggtaccacatcggtcatcgtcctggccggcgagatgctggccgccgccgagcccttcctccagcaacagatccaccccactgttatcattcgcgcctatcgcgaggccctcgaggacatcgtcggccacctgcagtcccagcttagcatccagttggacgtcaaggataaggccaagatggccgatgtggtcaaggcctgtgtgggcaccaagttcattggcaagtggtccgaccttgccgtcaagattgccctggacgcagtcgagacagtgacgctaagtgagaacggccgtctggaggtagacattaaacgctatgccaaggtggagaagatcccgggtggcgccatcgaggagtcgtgtgttcttaagggcgtgatgatcaacaaagacgtgacgcatcccaagatgcgacgcctcatcgagaatccccgcatcgtgctgcttgactgctcgctggagtacaagaagggcgagagccaaaccaacgtggagataatcggggagcaagacttcacccgcatgctgcagatcgaggaggagtttgtgcagcgcatctgcgccgacatcattgccgtgaaaccggatttggtattcactgagaagggtgtctccgatctcgcccagcactatttgctgaaggctggcatcacggccatccgtcggctgcgtaagactgacaatctgcgcatcgcccgcgcctgtggtgccaccatcgtgaaccgcactgaggagctaaccgagaaggatgtgggcacgggagctggactgttcgaagtcaaaaagatcggcgatgagtacttcactttcgtgacggagtgcaaggagcccaaggcctgcaccatcctgctgcgcggtgccagcaaggacatcttgaacgaaacggagcgcaacctgcaggacgccctgcacgtggcccgcaacttggtgctggagccacgcctggtggctggcggcggagccgttgagatggctgcctcccagctgctcacgcgcaagcaggttaagggaccatacacggcggtggcccacgccctagagatcataccgcgcacactggctcagaattgcggcgccaacacgatccgtgctctgactgctctccgcgccaagcacgcctcccacaccggcgatggtgtctgcgcctggggcatcgacggcgagtccggcgaaatcgtggacatgaacgtgaagaacatctgggagccgctggccgtcaagcttcagacctacaagaccgccgtggagacggccatcctgctgctgcgcatcgatgatatcgtctctggatcaaagaaacgcggcggcaacgagcccaccaatccggcggccatggcccagggtcaggagtag

SEQ ID NO: 41931 - protein, 544 aa, DROSOPHILA
MFGGQQPILVLSQNTKRESGRKVQLENIQAGKAIADVIRTCLGPQAMLKMLMDPMGGIVMTNDGNAILREITVQHPAAKSMIEIARTQDEEVGDGTTSVIVLAGEMLAAAEPFLQQQIHPTVIIRAYREALEDIVGHLQSQLSIQLDVKDKAKMADVVKACVGTKFIGKWSDLAVKIALDAVETVTLSENGRLEVDIKRYAKVEKIPGGAIEESCVLKGVMINKDVTHPKMRRLIENPRIVLLDCSLEYKKGESQTNVEIIGEQDFTRMLQIEEEFVQRICADIIAVKPDLVFTEKGVSDLAQHYLLKAGITAIRRLRKTDNLRIARACGATIVNRTEELTEKDVGTGAGLFEVKKIGDEYFTFVTECKEPKACTILLRGASKDILNETERNLQDALHVARNLVLEPRLVAGGGAVEMAASQLLTRKQVKGPYTAVAHALEIIPRTLAQNCGANTIRALTALRAKHASHTGDGVCAWGIDGESGEIVDMNVKNIWEPLAVKLQTYKTAVETAILLLRIDDIVSGSKKRGGNEPTNPAAMAQGQE

SEQ ID NO: 41932 - DNA, 8778 bp, DROSOPHILA
acatttgtgtccaatggatcctcgcaaccaactatctcgaagggtattaatgggttcatagtacctcttctgcaatgggatctactcagatttgagtttgatttatcgagctggaggagctgggaaaagaactgaaaactctgctcacacttgtgacggaagtgaaaggcattttgagcggccaccaggcaggtaggacagatcttttgtggcatttcatcccgtttcacgcgacagatctccggcagaattgagttcaacatttcccaaatggggggatcagagatctccttggagaaaaggtccaccagtatggatgagtgttcggcgcaggctcggcagttctttcccatgctggcgtccactgatctttccatttttcccgatgatctcccaaccatagaggccggaatttcaaaagaatcaacaaatgttgggcacttgctctcctgccaagtagtcaatgtgaacgtattcgcacagagttgtcagctgcatccgatgattactcgatagtcgataaggtttcatatgccatctccattaacgtcgtgaggttaactgtgactgggaacaaatctgcggcattcaaaacaatggtgtcgataggtaggattccaatcatatttaaatcaaaatgtatgtaaatctatattaaaggcattaacaatgaaaataagaatattagagataattttaattttaataaataatttacaaatcaagtaaagttacaaatcagtctgtattataaaaacgtttaattaacatataatctttaacaagcgtgcatgcaatgatttaggtattaaaggttatcattttaatatttatcttcatatttaagttgaaatttgctaactttgccaacagctgcaataattactttcactttcgctttcacagtcacaagattgactcatcggcttaaaaataccagtgactcgccacggaatcgcggatatcgctcatctctatcagctttgagcaaaattagtatcttgtattggccaaacagacaagcgagcgaaggcctttttgttgtcgtttctggcaatgatttaggtcttcatcaagtgttattaagctaggcataaagttttacccatcgctggacatggatatcctggacatcgatgaggcactaaaggatgattcatatatgtgagtgaaaccactcctgttgtttttgttcctgttgttgttgctgctgcagctgctgctactgctgctggcacttcacaggcagaggcatcgatgctataaatactcatatgcctggtactccttggcagatttctggcggataagacccacgacgatgtctccaacatattgcagcagtggaagacgaacaatcagccgccgttgcagcaattgcacttgcagtacaacaacgagggtaagccttttccacacataccgatgcacccgatcacaaacatacacacatgtgcagcacatcatgcagttgcgctttctaaatcaaatttgggttaaactggcggctacgttgacaaagttcaagtcgcatgtgggcagcattacttggccagtagttaccgttgtctttcaaagtggccgattgccataattggcaacagcgccaatgttattgttacggtaattaatcaagtctcaatacgcacacacacacacgcgttcccattgcaaacagctgtgcgtggtacggcaataatattgaaggaaaaaaactggctatgctaatatggcaagaatctcgcattatacgcaaacattattatataaatccaatttacttcctgcccagccagcgaaagtcaatcaagcaatacgcaaataaactatttgcgtacaattaaataaacaattaccaccgaactaaagacgaggatcaaaaatcgattaggcgatttaatttgagtgaaatattgtcatgctgagctatttttaatgattttccaaagtggaatgccagaattccaaatattgctaaaaatataagttaaataaaactatttacaacaaagttcatacttaatagtcattcctgtaaatgtatgcaatggttaaactcagcatagataaatattttaaatagcttaaataatatatacaaaatattcttttaagcgataacaatagtagaagtggaagtaagaaaattacgttaacaaacaacaattacttataattatatatgaaagcttcagggcgtttatccagtaagttaaaaaatagctaaatgctaacttaacggtaaaatatcaaatagtgtgctgaacacatcgcttttgcgaagcgtcctttggatctttactaacactaaaaaaattgtaaactcccggagattgctagtagtgtgcacggaatttaattactgggtttatttcctcaaaagattttgtaattttactagtttcctgaaaactttgcgatgcaaatatttgccactttcaaatcccacgagccggacagccgcttgatccaaaacttcaaaaagcacgtgaattcgcagtcgccacttgacgatttgcgaaaaaatctaaatgaaaaaagtaaaattcgagaatatgtacaagagctgattggaaatgagcaacaaatgggatccgtgctggacacgatctcttccaccgaagaggaccaccgcgtggccactgtgaccggatggtccacggtgaacatcgccaactgcgccggcgtttccaattcttcaatttttgtggcactgaagtgggtgatgatgcccattaaggtggagatattcaacttcaagcgaagtggaccggaagataatatggcacgtggacaatttctgttggacaacctgttaagcgcaaatcgcctaaaacgcttgcaagaggaagtagcagttattaacacgtgccagaaaatcgaggtgcgtgtcacacccggtctgcccaaatcgatgatgtgtgcccagataacagacgaatttacaactgccattcaggaggcccttagatcacgctatgaggtggattcacgcaccttagatctctccaggttccacgccagtccggagttgtctctgcacttttgtccgctgcatatggtcaagctgctagaaacagtgctagttctttcaaaccatttatttccccatgtgaccagcctagtactgagcaacaattatttgtgttccctgaaagcgtttgcgggaaattcccaaagttttgccagcctagagcggttggacataagcgcaaacaggattcaagatttgggagaactcaattacatcaacaaactgagttgcaagacgatcttcttggcaggaaacggtttggccaagctaagcgtggacgtcattcgaaaaatgctaccacagttgaaaaatgttcatggctgtgtgcagttgggggaaagtacagaagctgttgataatattccgaagtctcaacaacttcaaggcggtgggactaatggtttaaagttttgccaggacttcataagttcatactacactttctttgacgataccgaagagcgtttcaaacttaagaagtattacgacgaccaagccatgttctcgcttagcgtgccggtacaactaaattatgtctacggctacaagctgtacaacagaaaccagaagcgccagcattcctcgtttgcacaaaacgccaagctgcaagtgggtagagctgcgctacttctcgctttaagccgcttgcctttgatgcatacagacttagagaatgtcgggctagacatccaggtgttcacttcgagtctacgcatctttacgttgacgggatactttaaggagatatcatcggatactctggaaccacgacgctttcagcgcacattcgtattgcagacttccaatagccccggctggttgataaccaacgacatgctgtgcataacttcgactatgccggacccgaaaaaaaccattaaatttaaaccagaaactaatatgataaataccgacccgtcggtagaaaaaataaataaacctgcagtgacagttttagacagaaagtctaaagaggatgtccaaatttctagacccctatcaggaaaagagctgaatcctcttaataaggcagtgcagaaaatgagcctttcccaggtggaccatcttcccagtgagaacttcaacgatatgccaccattagtagccattggtccattgactaccgggcaaaattgtttggactatgaaatggaggatattttagtggccgatgagaataactttgacttggacattgatgatgacatcctgtttggatgcgatgacctttaaatatgaacaaaaaaaattaaacaattcaaacaaatagcttttagaaaccttgcacctatcggttaagacaccatacattactattcattactttaacgagtgcagaactcaaggatctaatttatttttaaacttttatattttacgaaagccttcaaaaacaattcgaaaacctttactcgcccaaagcgtcggaatctggatttcgtaagtacaaataagcaattgcaactaatttgtatattaaagtatcttattttttcagagccaaaatggagcgggaaatgacagcggtgttggaaccgggtcggtcgcgggtgccccagcaatgcttcagctggaaattggcggtcttgtcacgacgaatatgcacaaatccttcctgcaagacacctcaccgccgtcttccatctgctcctccatgaacactgaacggatgaacaactcgctaatcacctcagcagactttacgaacttgaacttccttcaatccacaattggtcttgagcaggatccaaaccttaccactacgcttaccaaccagacaactgataacatgggaatcggcggcagcataggcggatatacgctcagtgacatgatccgggatcgcaaggcgctggagtcgctgaccatgtgtgaggacgatgggactcttatcaaagactcgcacatcgggcaaattgacgaaatatcgttgacactgagcaaaactgcttccggctgcagcacaatggacaacagcacagacagtatgtccattcccctggccgcagatcgaacgatgcccgttgtggtatcggcagtttgtcctgccctacagcgtaccatgattttaggggaggagatgatcggcgacacaacttttaacctcgtggatagccttacaacttctgcgctgcaatcagagtctgagtctctgccagtcgatggaaatgcgacattcaaaagacccactgcgagtgctactacagcggacgaaacccaggtgctaacaggtaggcagatgaatactaccttcaccgacggttgcaacactcctgagggccgctgtgaaacgcctgaaaatattgacaggaagctggccttgctcaccatggaatcctccacaccacttacaacaaacatgcgctcacactgctaccacaataacaacaataataacaaggcaggatatacccctaccctaaagggaaggggagatatgaacctgtccccaattgttggcgcaacaccgcaaaaaccaactggaaccgcaccagggcgattaaacaacacctttgagcccgtggcaaaaacagctccgttcaacggcgagaagttcgtgctggacactatggagctcttggagcagatcgaacagccgctggatggcacttacaacctgcaaatgtctgaacagcacaggcagatgcaatgcgtcatggacttggctgaggcggaagtggagatgctggcccagcagggcgacgaagagcaattcgagaatatgcttgccgagctgggcaaggtgaataccctaaacgaggagcaactgaagatgcaaaagtcgctagataccatcaaacggcgcttccatagagatgaggcggaggcagaggagcgtgaagaggaattgcagcagtcggcagccgaaaaggtggacaccccagttctaaatcagagccactccagcagcaacagcagcggcggtggtggcgaacggctgctcagtcgccgaagtcgtctctacgacgatgtcaaccttagtgcaatgcacggcagtaatggaagttcgaccagcaccaactctgcctcattcatcgtccagcgtagagatatgccacaagtggagcagcctgcaccagatcctgatcccgaaccagcggaagagcctccaaagtcccaggtgacagcagagattgatccggcaagctataagctgccggagcgaagagagcgggatcgcgatcgcttcaagaccattaagatttcgaaagaaatgcgactgcagccggaaattattgtgccttgtatagacgatgaaccacagcaactcgaggacgagcaaaagcaattagtagaagatgttcggtacgaggaggatcagcgacagggttcaccaccgggtcgactttctcgtcgagatcagaccacagcaattagcaacaacgcagatgctagtgcgagtaactatctgacctacaaaaaacccaaggaaaagagccttatccaacgacgtccgcagcagcaggaagcgcctttattagccgagccagcgcctgcgtcgactcttccccagccgcgttccttgtccaggcctcgctacatcagtggtcttcagaagtttactacggtgagcaaggcaacttcagccggagcgggactaaacgccactccagccgctgctatgccgactactgttacagtgccggccaacggtaacggggagctgaagagccctatgggtattaaatccaaatctttccacaacttgtcctccacaatgagcggcgttggctctggagccctgccaagacctagtttgggcggtggactgcggcgtcccagtgcgcagccgagcaagcttatgagcggattgcgtggaccaactcaagcccaagaggttcgtttcgaaactatttttcttatcgacctgtttaattctcatatttttgacttttcaggatgactccgctgtatttaaagtaccgaaattggtgagtgggctgcgtgctcctggccttgccccgaaacgagcaggagctaatggtttagctcgaccttcgtccggatattacagtctgagtgttaagacggcaccagaggcagacactcctgaggttagttaatgcaagatttgttaagggaacgctcaagatctagcttttgtgcttagttaaaactaaaattggaaactgccaatcttggcgcaaaatatttcagagcctctcctcagcctcttcgcgtggcagcctctatggccacaaggactccggtagaaccgttaacggcggaaatgttcctcaacagaatccacagcaaaccttcgacatgcaggcgcttacctctaagctgacccaggtgactacgggagcgaccggcataccaaagccctcggggttgagaccaccatcgcaaataaagcgtagcggtctgccgcgaccttccagcattgttaggcgctgagagctgatcacttcctccgccgccgattgtatgcatatgtcacacacccgcctgaaccgactttccatgttatcagtaaaatagtctaaatctattctttttgtactttgtgttcagttctatttttgtgtttgtcatcccagcatagatgctcatcttgcctagtggtttcaaggcactagcaactatgattttgaattaatattacgacaaattgtgcatttagttgaacgatacataaatagagaacttggcgacttgtaaaacaattacgcactcccagaaccgcttacatttatatatagaacaaatacatcaacacgaactttgccttacgaaccataataataaaacaaacgatttaggggatgagaaagagaagattgaagcgagaaataataacgataatgaattgataataactgtatatttttgtaaagcgatgcaaaaattctacgaacgttattttttgttggagcggcaaagcaagcaagcaaatcgaataaatattactaaataacgaatatacaataagatcctgctcagtggccactaaaccacaaaaaaaaaggaacgtataaaaccaaactgaaattgatagtaactgataagagtattgagaaacgtgttaaaaatcgaacttacaatattatctattattatcgcatatatatacaaatacaaaaaagaaaaaaaacgacagcaatatacattgactcatcagatacttagaccagaaggttaatgacctgtttatattttgctattgctagttctgaaacgaaaatgatcatacttgtaatttcatgaggtgcacagtatattacaattccctttgtaccccaatgaaaattataaacttcggctctgctgatgtgctatatacatacatattatatagatttttgtaaaccatctgaaaaattaagttttcagttattttcggttgccaaattgaaaagtgaaactaaacttttgttagttaccatcgaaaaatgtcttaataaatctatgccgtattggtcaaaaataaaattcctaaagatcttcaatctattgaagcctttgtccatcacacatgcatatcctaagttaagtttagtgcgcattgtttaaccctaatgtagaattagtttaatctgtaagggacaagtattgtttcaccctcatcaactaaccaataaccacataactaacccaaaccaagcctctattttgtattctagcgctaacccattaagctttaatcctattcggtgatgatttgcatggatcgaatttagttagctactaagactagtatggattattatttttgctaacgctttcatatgagccttata

SEQ ID NO: 41933 - DNA, 3409 bp, DROSOPHILA
cttgtattggccaaacagacaagcgagcgaaggcctttttgttgtcgtttctggcaatgatttaggtcttcatcaagtgttattaagctaggcataaagttttacccatcgctggacatggatatcctggacatcgatgaggcactaaaggatgattcatatatatttctggcggataagacccacgacgatgtctccaacatattgcagcagtggaagacgaacaatcagccgccgttgcagcaattgcacttgcagtacaacaacgaggccttcaaaaacaattcgaaaacctttactcgcccaaagcgtcggaatctggatttcagccaaaatggagcgggaaatgacagcggtgttggaaccgggtcggtcgcgggtgccccagcaatgcttcagctggaaattggcggtcttgtcacgacgaatatgcacaaatccttcctgcaagacacctcaccgccgtcttccatctgctcctccatgaacactgaacggatgaacaactcgctaatcacctcagcagactttacgaacttgaacttccttcaatccacaattggtcttgagcaggatccaaaccttaccactacgcttaccaaccagacaactgataacatgggaatcggcggcagcataggcggatatacgctcagtgacatgatccgggatcgcaaggcgctggagtcgctgaccatgtgtgaggacgatgggactcttatcaaagactcgcacatcgggcaaattgacgaaatatcgttgacactgagcaaaactgcttccggctgcagcacaatggacaacagcacagacagtatgtccattcccctggccgcagatcgaacgatgcccgttgtggtatcggcagtttgtcctgccctacagcgtaccatgattttaggggaggagatgatcggcgacacaacttttaacctcgtggatagccttacaacttctgcgctgcaatcagagtctgagtctctgccagtcgatggaaatgcgacattcaaaagacccactgcgagtgctactacagcggacgaaacccaggtgctaacaggtaggcagatgaatactaccttcaccgacggttgcaacactcctgagggccgctgtgaaacgcctgaaaatattgacaggaagctggccttgctcaccatggaatcctccacaccacttacaacaaacatgcgctcacactgctaccacaataacaacaataataacaaggcaggatatacccctaccctaaagggaaggggagatatgaacctgtccccaattgttggcgcaacaccgcaaaaaccaactggaaccgcaccagggcgattaaacaacacctttgagcccgtggcaaaaacagctccgttcaacggcgagaagttcgtgctggacactatggagctcttggagcagatcgaacagccgctggatggcacttacaacctgcaaatgtctgaacagcacaggcagatgcaatgcgtcatggacttggctgaggcggaagtggagatgctggcccagcagggcgacgaagagcaattcgagaatatgcttgccgagctgggcaaggtgaataccctaaacgaggagcaactgaagatgcaaaagtcgctagataccatcaaacggcgcttccatagagatgaggcggaggcagaggagcgtgaagaggaattgcagcagtcggcagccgaaaaggtggacaccccagttctaaatcagagccactccagcagcaacagcagcggcggtggtggcgaacggctgctcagtcgccgaagtcgtctctacgacgatgtcaaccttagtgcaatgcacggcagtaatggaagttcgaccagcaccaactctgcctcattcatcgtccagcgtagagatatgccacaagtggagcagcctgcaccagatcctgatcccgaaccagcggaagagcctccaaagtcccaggtgacagcagagattgatccggcaagctataagctgccggagcgaagagagcgggatcgcgatcgcttcaagaccattaagatttcgaaagaaatgcgactgcagccggaaattattgtgccttgtatagacgatgaaccacagcaactcgaggacgagcaaaagcaattagtagaagatgttcggtacgaggaggatcagcgacagggttcaccaccgggtcgactttctcgtcgagatcagaccacagcaattagcaacaacgcagatgctagtgcgagtaactatctgacctacaaaaaacccaaggaaaagagccttatccaacgacgtccgcagcagcaggaagcgcctttattagccgagccagcgcctgcgtcgactcttccccagccgcgttccttgtccaggcctcgctacatcagtggtcttcagaagtttactacggtgagcaaggcaacttcagccggagcgggactaaacgccactccagccgctgctatgccgactactgttacagtgccggccaacggtaacggggagctgaagagccctatgggtattaaatccaaatctttccacaacttgtcctccacaatgagcggcgttggctctggagccctgccaagacctagtttgggcggtggactgcggcgtcccagtgcgcagccgagcaagcttatgagcggattgcgtggaccaactcaagcccaagaggatgactccgctgtatttaaagtaccgaaattggtgagtgggctgcgtgctcctggccttgccccgaaacgagcaggagctaatggtttagctcgaccttcgtccggatattacagtctgagtgttaagacggcaccagaggcagacactcctgagagcctctcctcagcctcttcgcgtggcagcctctatggccacaaggactccggtagaaccgttaacggcggaaatgttcctcaacagaatccacagcaaaccttcgacatgcaggcgcttacctctaagctgacccaggtgactacgggagcgaccggcataccaaagccctcggggttgagaccaccatcgcaaataaagcgtagcggtctgccgcgaccttccagcattgttaggcgctgagagctgatcacttcctccgccgccgattgtatgcatatgtcacacacccgcctgaaccgactttccatgttatcagtaaaatagtctaaatctattctttttgtactttgtgttcagttctatttttgtgtttgtcatcccagcatagatgctcatcttgcctagtggtttcaaggcactagcaactatgattttgaattaatattacgacaaattgtgcatttagttgaacgatacataaatagagaacttggcgacttgtaaaacaattacgcactcccagaaccgcttacatttatatatagaacaaatacatcaacacgaactttgccttacgaaccat

SEQ ID NO: 41934 - protein, 982 aa, DROSOPHILA
MDILDIDEALKDDSYIFLADKTHDDVSNILQQWKTNNQPPLQQLHLQYNNEAFKNNSKTFTRPKRRNLDFSQNGAGNDSGVGTGSVAGAPAMLQLEIGGLVTTNMHKSFLQDTSPPSSICSSMNTERMNNSLITSADFTNLNFLQSTIGLEQDPNLTTTLTNQTTDNMGIGGSIGGYTLSDMIRDRKALESLTMCEDDGTLIKDSHIGQIDEISLTLSKTASGCSTMDNSTDSMSIPLAADRTMPVVVSAVCPALQRTMILGEEMIGDTTFNLVDSLTTSALQSESESLPVDGNATFKRPTASATTADETQVLTGRQMNTTFTDGCNTPEGRCETPENIDRKLALLTMESSTPLTTNMRSHCYHNNNNNNKAGYTPTLKGRGDMNLSPIVGATPQKPTGTAPGRLNNTFEPVAKTAPFNGEKFVLDTMELLEQIEQPLDGTYNLQMSEQHRQMQCVMDLAEAEVEMLAQQGDEEQFENMLAELGKVNTLNEEQLKMQKSLDTIKRRFHRDEAEAEEREEELQQSAAEKVDTPVLNQSHSSSNSSGGGGERLLSRRSRLYDDVNLSAMHGSNGSSTSTNSASFIVQRRDMPQVEQPAPDPDPEPAEEPPKSQVTAEIDPASYKLPERRERDRDRFKTIKISKEMRLQPEIIVPCIDDEPQQLEDEQKQLVEDVRYEEDQRQGSPPGRLSRRDQTTAISNNADASASNYLTYKKPKEKSLIQRRPQQQEAPLLAEPAPASTLPQPRSLSRPRYISGLQKFTTVSKATSAGAGLNATPAAAMPTTVTVPANGNGELKSPMGIKSKSFHNLSSTMSGVGSGALPRPSLGGGLRRPSAQPSKLMSGLRGPTQAQEDDSAVFKVPKLVSGLRAPGLAPKRAGANGLARPSSGYYSLSVKTAPEADTPESLSSASSRGSLYGHKDSGRTVNGGNVPQQNPQQTFDMQALTSKLTQVTTGATGIPKPSGLRPPSQIKRSGLPRPSSIVRR

SEQ ID NO: 41935 - DNA, 17729 bp, DROSOPHILA
gcctgtgcatgcagcgcaaaaacaatgttgatgagcatctgttgcttggccattggaccacttctctgctccttttgcggtatcagagtgggatgactgacaaagcgtacgtcgttcagtttgagttcaaacttttggttgcatagctgtggtttaacagcaaacagagcggacaggacctcatctgcgaatccctgcagttgtccttggctcttggcagcacccaagtgggtgggtgtctgcagcagatcgtccgtattggccacggcatagggattgcgctttctgtgattgaataaatcggtatagtcaagctgagtgccctttgaattaataggtagtacctggacttccgctgctcgtcgttggccacctccgtttggccgagagtctggtacggatacctgtacagtaaccgatcccccttgctatcgaagtaaaccaggattacggccaggggattcacattagtttccatggcacacagacacttccccttttatgtaaattaaaatatgaacatttgcattatcaactggggtcagggtcaacaaatagttggctatgttttcaaaaatactttataaatcgtagtttgctacagaaactacctcaacaactctttatttatttattagtacctcaatttgacttcattgagaaatggaagcaaagtaaataaatgtaaaatataaaatatatttacagcagtgtggctctcttttagtttgcataaaataccaaaaacttatttaaaatagtagtcatgtcagttttcattttgcaggcgaaacaataatataaatgcaacgcaatggaatttttttaaatcgtttaaatttaccatagataccttagataatatattcaaaaactaaaaaatactaaacgaaaaacggtcttactatataaataaatatatatcggcaaggctaatagtataggatccctggtcgagcgataacgatctatcgctccgctgtagtgtgaccgtcttcggttggtcagtctctaattttttagaagcggaaagttgtgagcaaaacgtgtggaaattgtgctcgaaacgtcaacaaaaaatttgtgaaaataactgggagcgtagtatgcgaacgcggcaatcgcagaactatgaaattcccctgtgaaacatgttagtttggctgtaaaagcacttttaaaaatgacgatttcttattagcgtgttggaaaagaggaaaacacacacattgtgagaggcaaaatacgtgcggatcgtaggtgggagcgagacgacgctaaacgtgtactagccgcggtctatatatacatatatataatatttgtgtgagtgtaggagaggtataactaattctacaaaaaaatatagtttacttggctgagtggttcgcttctgaattagtttcgcactcttcggcagtatggtggccaataagttaatttcaactaattgtcatttacttgtaggtttgtttttctactatgtcttcgtttctgtatctattccttgtattttggaaaataggattaataagtgcctaaaatgtaaatagcttgtggttaaatagttaataacataactattttactttttgtgtatatgtgcgccaacatccgtgtgtatagattttacacatacctacgtagaaaggcatgcacagatatacgtttgtgtgggtatcaacgaataggcggaaaggcgaaatcgaaatatgtacgtacagcatttcggaatggccaggcgcagtagtaataggctaaacagggaaacagcgcaacacaaaaaccaagaagaagaagcagggcaggcgaacaaaataaaataggcgataatagtcagttggcatgtcttgtccataggctagaacggtcacactagctatatggtctgctcaaaccgactggtcgtctcgctcttacacacgtcttaagcaatcccagtttatgtgttttcctgcgcgttttgtcttctgcttcttgtgccatacggtattaataataataaaattgattaatcaaagtagaaacattttaatttgtgcaggtagtaaacgttcgaaacaacgtcgcgccatcacttaaatgctgcaaatcaacaatgtgcaacggaacaaaaaagaaccagtgttaaagtgtatacaaatttaatttgtatttataaaattgaaatataaagtttcgaaataaaaaataaaccacgtagcttgtcgttaaattaaattaagttgtgcaaaatgaagtgaaaattcaaaataacagagtaaacggtgagtaaaactagtgtgtgtgtttgtatgtgagtgcgcgcccaaatcggaaatattttgaatcgaaaaatatacagtcgaatgggttatacatatctattggatcacatatatatgaaattcagattttattttgagtcgagccagttaaataaatatttcatttgttgatgcgtcgattttgtatggtttttttttttgcatactgtgtgtcgccatatttgattgcatattcttttttcaactaaccgtcagtatagcgtgctcgctcgcacagctttgcgggttcatttgttttgctttcgattccgttttgtgcaacgtgaaggtagatgtgcgtattatgcccctcgcacagagttgccaacccgaagcaattgttttgttaaatttcaagttgtttttagtttgttttgctcgagtttctaaggagattatctaaatcagtattaaaatcatatttcgatttggcacacccctccgcatttggattgcaatgtgtatgccgtgcagtgtttttgttgtctctaccaaaattttgacatgcgcatcagctagtcggaaaaacttaacaacaaatcgaccgcaaagtgaaattaaagttgatgagaattagttgaacgatatcgacgacgccatgttgttcccattatccagaatgttagcacagagctatatagtttttattttattttctttcgccctgttttcgtcaaactttttattgcgtgctccagcgtttacacgcctgtacgccgtgaagttggccgcagttaacatagctaagtgttagtgtgtgtgtggggagagctatggtggtctcgctctcgcttacaggcattgctcgaatgttcctgttctgctctttgcgcatacgtgatttttgcaattgttatttatgccttgtgctttgtacgcgcgaattttcgccacaaaatgaaagcaaaagttgatagacaactttttgcctgcgctcggctttcgttattttctgcgcagcgcagacaagaccatcgtcaaaatattatttcgcgaaagctaagccattcgataatttcaaaggttgtcgcggaacgaaaccaaaccgccacaaccccctaaaaccacctcccaaccccacagatttttttaatggtgtaatatccataataaaatcccatgcagtctcaattcttgattagtaattgaccgaattagacggaccagaactagcgagcaagtgaattaaaataagacgcaattaaagttgacactttgtagctggtatgcaaaaactaaaacccattttacgcttggcgactgtttcaatgaaagtacagccaaagcaatgcccctgatattgtgcagtcacgtagtccattggtcaacaagctaatatgagcagcattactatttttaattgtaggttcatttttattccgtagatcacaataggagtctttctcttttcgactcactcgtttagatgtgtgcgtctgcgagcctcgataagctttgtatttgttctacttcatctagcgatgcaacaaaagccatagcaacaaaaagaaatccccaacaaaaacgacacgaaagcagtggcggattaaaaatcctgcttgcggggaagctctcggaatttaaagaaaacagcaaacaaaacttaattctttcgataatattttgttgatataatgaattagattttggcgcatatgtatatcccaaatgaacccccttggaaccgcccctgtacgaaagcaccgtggccacttttcatgtgtttgtgtgctcgcgataagtttcaacgtgcatttgcaggcacgatttacggggatctgctgctgtcttgctcacacccacgaaccgataatgcgcgcgaatggggcttattgtgtgagcttgtgtgtaatttgtttatggcgcgcattttacttgcggatgttgttgttgttgttgttgtagtatttgttggggttggggtagggttggtcccgcacacgtgcgtgtgtgtgagtgtagttcaccttctttccgacgatgagcgaaccaaattctccttcgcccctcgctctttcgtgtgtatttttaactaagagcattgtaagattctttctaaatgttgagatgtagcgtcgatgctagtgtgtgtatttgtaacccaaatcaaaatttacgacagccccaaccgctctatgtgtggcgttatcttttgtggcccattgagaaatatgaaacaaaacatgtaacggaaatgagaaatgcataccacagtcactatcaaagagttctaagctcaacatcctggcttatcaaaacgcagcttgaagttgaaaaatcagttttatcgattaacctggtggtggcctttacatatgtagttgcatcttgtatcccacaatctataggcagtaacccaatggttacataagcatttcgttcccagatttactattcaattggggaatcaattgcgctgctccccattctctattccaattagaaactgtatctacaataggcgcaaattggctgccagcacaatcgcacaagcagtcgcacacacacgcaggtgggatatggcagatatgcccaagtgcaagtggcctgtgtaatgtgtaatagatacaagaaactaaaaagccagcgacaaaagcaacgacaacagaaaaacaagaagaagaaaactactagcgatgaatgccgcgccggatgccaaggcgaaattagtgcattcacttttcgctccgctttgcttttttgctttggctctctgctttgcaatgcgaatgacggggcaaacgcccggaatgtgcagtaaattagagaattagagaacagtggcagtacttggcaaatgtcgacatctttcagagacggtcgttttttgaggtgtaagcgtttaaaaacgtttagtaaattgattccaatgatagaaaatgaaaggtctttaaattattaaaaaatcatttattagtgacccaatagtagattccatagtataagaacatgtaatatcttaacctttacaaagcttatcaagttagcaaacttgtaaaatagtcgaatgtttattaattgatttgggacgcatattgcgttggaaaattgcattagcctttcagcgatgcggataaacaaaagcaaaataggaaaacttgtttccacaaaagccaaatgaacaagtgctaaacgttgttagtgcttttttttattggccaggggggtcacactacacctacacacatccacgtattcaggcacacgcacacaagtgtaaacaatgcacaatccctttgttgctttagctttggcgcacctttcacactgtttctgctttgctgtttcgctgcttttccacttttccgctccgtgatgctgcgttcaagtttacagcaagtgcagcagccaccacgaagcacattccgaaagcgtagacgaaaatacatacgtagaataaacgcggatattgatgtttgaagtgcgcatgcgtatttttggcgcccgttggcagtgctgtgctttttattttgttacataactcaaatctgatttgcagttggcaatgctactcctggataatagagatgagctccttaacttttatcgataaaggcaatgtacccgtggtacactagaaaataaaatctgaactttacatccgaagatatgcatccttgttttaattttttgctttaattattttctaacattattttacatttgtttgtttaccacgtttttgtttaaaacagctaagaattaatttttaaattggtactttttattgttaatagttctgtatggcctatatttaatagttatatttttactcattgcagatacaacgaaatatcgtttatggaaagaccgtatccaaagaattcaatatccaacatacaacgacggacaacaacgcaatatcaattgggcgggactattagttttgcgagattggatcagctttaggataaggctccgtatacagggagtcaaacaaaggacgcaaaagcgaagaagccggggagcacgcagtggaagttgccgaatctctcccagcgttatgattgtgatggctgacaatgtgatgtggcacagagttggacaccgtctatgcaaatcgagcgcgcaccaccgcctacgcctacagttgtcaccactgggagtttcagcttccgtcatccgtgccagagccagaggttatgcattgagcccccaatgttttgggggcacgtcaacaaaggcccagcgacagcaggagcagaatctgcatcagcagaaccggcagcaacatgacggctttatctgtgaagtagtgttgtgaaatagaaactaaatcgagaccgaaaccatactctatcaaaagagtgaactctcaagccgagccaaggctccttccctgtaaacacacgtctaattttagttagcggaccaaactgccgcagcaccaccaccatgcccatgtccagtcacgactcggttttcgtggagcctgctgtcagtagcagtggcggcggcagcaccagcagcataaatcgcatcggagtagccagtgggccacagccgccaccccctcatatcgtcatcgatggcagcagcttgtccacacaggcacaactgcgcatcatgcaacgtcgcatgtcgataagtacgcgccagatccttagcgccagccagtctcagtcgatcaatcagtcgcaaaagtacgcggtgcgtacagcagccggaaccggagctttagctgcgggggcagcctcttcggggagctccggtcaggagctaattaatccccagatctacaagattgtgaccacggacggtagcaccagcaacgtcatcattgacgcatcagctgcggcaccaccgcacaactccaaactgttgcttagtaatctcactgtgctctccaaacaggcaccagtccaaggagcagccggtcagcagcagcagcagctcaactatctgggagccaagagtctgccgtatgtgagtgcgtcgccggctaagacgcagcagcagccccagaagtttggcagcatcagcgcatttaaggcgcaacatcagcagcagcaacaacatcctcatgctaccctacagaaagtgactttgggctccagagtggcaacccgtctccagtcgtacgtcccggcatcaccgtcgcagataatggtgcagccggcgcaaccaaagtatgtgaatgccacggcgacaacgataggtgggaatgctgctctgctcaaaaaggccaatcaaaagatcacggtcaagagtgttagcaatatgtcacaacagcaacaacagcagcaacaacaacagcagcagcaactactacaggctcagcagctaaaaacctttatcacgcagcagcaacagcagcaaacctacaaggcgggggccaaggcaaagtttgtgaaacagacgactgccttgtccattgctgcattgccccaacagcagcagcaaactacctacgccaaacagtcaatggtcaccacgtcgacacccgcgaaggtaactaaactgaatagcaagtatgtgcaacagcagatcagcctaccgcagggaacgcaactgcagcacaaagcgtcgccgaatgtcaccggaggaggatatcttctgcagcagtctcaggccgccgtcggaggaactattaagtttgtcaactcacatggcacagttatccagcagcacccccaacagcagcaggcaacaaagcgtacccactacaacagtagcgggagtagcgacaatgagcagcacgctgtagcgaactcctcactgataaccgatgatgttatgatcgtcaatggaactcagatgaccgacgaactgtctgcccgcatcctgcagagcatggcccagaagtcgtttagccagcagcaaagattccatcaggttcccgccactggcagcggcaacatgccaccacccacccaaatcatctatagcaacagcaccagcaacggggccgctgcaagtagtccgggtggaaatgcatccggcaatatgctgcttgcccactatcaggcagccggcacaaagccggtctcctccgcttcgttcatcacggtcactggtacgccgccggttacagtggccacaacgccgtcggtgagcatctcatcgcacggctttgccagtggcagtgcggccatatcctcctacatgtcatcggcaaccgcagctcgtcgccagtctgtgagtgcgcccagtagcagggcggtgtctctggagcggaagcagcatcaccagcaactgcagcacgatgtgattggtggcgggcgaaaggcgccaacggtcatcgagtattacaataagcacgggtaagtgttaatgatttacagaaaaataagattaaatcattaatcatcattaaatgaggcttttaaatgtaaacggttttagaatcgagtagttagtcaaatgtatcgatgtttcaaataattgtcaatttggtgcaaggcatcgatagttagcttgtctagtgtcaaagtttgtatttacaactatcggccaattagttagtagttttattgcagtcgcagtacaaatagtctcgtcaatggcggatttcaaattgtcatattttcaaaaaagatcaaatagaaattcctaattataattcttcaattgcagcgtgaatagcatagttggcagcagcaataacctggcccaaagcaacagtatgagcaatctcgcaggcccgcgaagtaacagtggaagcggattcgccacgaccactccaacgccagctaccccacttcacctgacaccagtgaacgttccagtccacgtggaggcagcaccaccgtcttcgccagctctggtcaagggttcgtcccaaccgccggcgcagccacaacaacaacaacaacaagcgcatcccttgggccccaatcaactgaatgccaacgatgaggagctgtacatagaagaggtgcgcccggttccagtgctgacgcaggatttacgtctgcagcaactgcatgccatcatgcaggatcacacgtacgcctcacagcaacagcagcaacagcctcagcaagcggctggtgatacgacgaatcctggagcagcacagcaggtccagcagccgcagcaatggtccctaggcggtattggtgtcacggtgtctggtagccagggtacacctacagcggtaggaggatattgcagctattttggtcagcaaagtaagtaaatgaaaattaaattttagtgaaatcctttgcattttgcacaaagctatatgcaatcgcttgcttgctattcatattaatctaataaactctgtttactcagttgctcgctctcaagctgacgatgatgcccactctgctataagcagtagttcccggatgggattagccagcacagatattgatcctggagaggagactgaaacagcaccagaagccgaggccgaggatgactccgtaacgcgctgcatatgcgaactaacccacgacgatgggtatatgatatgctgcgataagtgctcgtaagtatcattgtcgtaacttgaaggcaatcggattgcttaaaatgttgaatttgttaaaaaagactggtacatgataaacctgatttattttttgtagggcatggcaacatgtggactgcatgggcatcgaccgtcaaaacatcccggaggagtacatgtgtgaactttgccagccacgtgcagtggataaggcgagagcacgagcactgcagcgtcaaaagcgcaaggaacacatgctgctggtggccactcaagcggccaatggtgctgcagccgtggcagcaggaacaacgctcagcggtggactcggcagtggtttgcccatgtcagaggaactacagcacagactggcatctggacttaatggaggatttgccacgggcaccggcatgtcaaagaagtcgaagaaaaccaaagagaattcgggaagtacctctaccttaaagaaaactaaaaagagcgctgttggtatgggcggagagaagaacgccagcggaagcggtactcctactggcagtagcggtaagaccagcaagaagagcagcaaacgcaagagcaagtctggcggagacggatcaagcggtgggggaagcagtcccgctttaacagccgccgagaagcatgccgccaatctgcgccagtggatcgagaactacgagtatgcggtgacaaaccactattcgccagaacttcgcgcccgcctgcacgccatccagaagcagcctagcctattgcagagcatacaaaacacggagaataaggcgttgcggcaaattcaacagcaactctccacggctggcagtgcagagcagcttgagcagagggcacagcttattccgtatgcaggcgccaaggtgctaataagcagcgttgacttgtcgccccatgcccccatccacgagttacgcggcaagtatatgctgaccacccagttccgtacccagaatcccaccgtcaacatgaacacaccgccgccgagcaactaccttaacagcttcaaggcgcacaagactccgggacagtttgtattcttttaccagctgcccggagtggaggcacccatgcagactcttcggccggacggaagtgtgccacaagttgcgcagcagccaccatcctacctaaagggtccggaggtgtgtgtggatacgcggacctatggcaacgatgcacgattcgtgcgtcgatcttgccgaccaaatgccgagttgcagcactacttcgagaagggaacgctgcatttgtatatagtggcattaacacacatacgtgcccagacggagatcacgatccgccacgagccacacgacttgacggcggtggagcagaagaagtcacacgctgccgtcatccagccaacaagtacccgttgtgcctgcgacatgggaagtgattgtctcttcgccctaccactggccgtccagcaacagcttcaagctccacctacgcagcccaggagcagtcaccggaacaaggcggcagcagcagcggctgcggcagctgctgctaacagtgcggcagccatacagttaaccatgggattgggcgtcggagcaacggtggcggcaggagcgtctgtgttgccaaattctcgaaatcgttccacatcctccagcggcgagagcagtcaaatgggactaaacagtccgcagcttggacaattgaatttgggctttaaaacgtctgtgacagcaacatcgctgacagcgccagttccaggagtgcactgcaacaacagcggcggaagcagtagcagcagcaacaactcttgctcggtgtccatgtccagtgtgctacacgattccggtatttgcacttcgtcctcttcgccgtcggtgtccattccctcaccgacacccacccagatgcagtcgccgaccttacaacagcatccgcaacagataccgcagcaacaattgtcgcttttgcagcgcagtccaacgcaacagcatcagcaacagatcctagctgcgctgcccacgccgatgctcacgcctatgctttcaccccaattgccaaaaccagcacaacaacaagctcacgtggtattgccgcagtcgcagcaaacttccttgctgcagcagcagcaatcacagcaaagtcaggagcctttggctgttatagcagcagcagcagctgcgcagcagcccatggccacctattttgttcgacaaccgcagcaacagcaacaacagcaatcgccaaagccgcaagcgcttgtggcacaacagcaacatgtggtcggtgcgcaacagcagcaacactttctgcagcaacagcagaagcagcagcagcagcaaatggcggatgaggctagaatggcagtgagtgcgttgcaaacactgcatgccgcccccacttcgcatatagtgtcgccaatcaaagtggcagcagtgcagcagcaatcgcaaccgcaacagcaacagcaaaatacgcatcaacaaccacataaccagcaagcagtacaacagcaatccaatcaactgcaacaacaacaatcgcagcagcccaactacccgcagtcgccacagcgtcagcaaaagcctcaacccgtacagcatcagccgcagatagtaatttcaacgggagcacaggcgattccagcgacaatgcccaccaaattaagttcacccacaaaaagtgcggcgccagtgataagcaacaataacattacggtcagtgctcaatcctcggtggtgggcggaaagaaaacacctgccaagcatccccagcagcaacaacaacaacagcagcagccagtgacacctgtttcggctgctacggctccagcagcaactccttcgtcatcggaatccaaagaggatgatgtgtcggcaagttccacaactactcccacaacacgaacgcctgccaaggataagccgaagcagtcgcgcgaagatcgcaagctggaggccattctgcgagctattgaaaaaatggagaaacaagaagctcgcggaaagaaggacacacgccagagcagcggtggcaagaggcaggcgagcaactcgcccgcttcgcccaacaaacgtaatagctcaaactccattagcgaggatgtggagacgccgacgagtactaactccgcagcggcagctgcccaacgtcgaaataagaaaaagcgaaaggttagtcgcagcttgaataacaacacgaatggcttgggctcgggtggtggcagcaataacaaacgacggaagagtatcgtagtggagtcggatggagagtctcatgcattaaccaactccgagtcggaggatcaaggtcagcatcctcagtcacatcacagcggatccgaggatcaggcggcgggtcttcttctggccttggcccacaacaactcctcaccgaatgagccattcaagtcgccattatcccaatcacattccctgccagcaactccagcctctgtgagtagtgcttgtctgctaattgaggccgctatgggaccactgcagcagcaaccggcaccggcttcagcgtcgccttccttagccgaattcaagtacccacccggtggggccaagaccaaaaagtcgcttatgtccagttggttccagcaggcagaacagcagcacgcatccggtttggacagcctcgtgcaggctgctatgagcgaaatcaacggcgagcgtgagcagcttcaacgccaaccgcaaggcgaatccttgccagcgccggctttgctgaaggtagagcagtttatacatcaggcagagtccacaactgctgttcctgctcgggaacaattgcacctaccactacaaaacaattcgtcagtgaagaagcgctggttgcgacaagctatcagcgaagagaccacaccagtcgatgaacttcagcagtcacaaaatcagtcggtaactgccactccctctccacagccggtaccaactgtttctccgctggcgaacggatttagtactccgcttaagaagaggcgcctggtggtcgtaagcaatggaacgaacgtggagtctgatgagacgcatatcgacgtgattggggagccaaaggatgaagcagaagagaatgtcgcaatgactgaattgaaggtggaaatagaaaaccatcatcaagagcaagatgacgacgtagacatcctccgttcacccagtccgggtactcatcaaatagtggcagaggataatctggttaagatcgagccggaggacacaagtgctgcggccgatgatgtgaagatcgatgtggaacgagaggagagccaggcatgcgataagtttgaggaaatggtgaaggtgaagcgcgaagaggaagagcagcgtgagaaggaaatcaaacagctgcaagaacggcaggaacatgaacagccgaaagttgagcccgccccggtggaaccaaagcttgaaaataccgtagcgaaagcggagcccaaagtggagccaagtcaagagatagtgtctaaaaaggagccaacaaaggtggaacccaagcccggcgagtctctgctgcgctcgacagcgactgtaactgcaacacctactgcggcaacaatcgctgcgacaactctgctcgatgtgagcaaagtggcattcaagactcgaccacctctcaaactggaggatgaaccgcaaaagaaaaagccaaagctggagtcgatactaccagcgccagtagcaacagtgcctccagtttcagttcctccgataccagctgcatcaaatgcaactacatcggcggtaactaacactgctgcggcgtcacttacaacaacaactgctccttcaagtaccaaaaatctcaccgagcacgatatacaggaacgtttgctgtcgttccatgcagctaacatttcctatttgcagtctagaaacaaaaaggcaaccgcagctttgacctccgcctcccccagccagaagagcaatagcagcagtggcggtagtggcactgagtcgaaaaaatcatccaaggataaggatgaaaagcgcgacaaggagaagcagctcaaaaaatcgaaaaaggagaagaaaaaatcgaaggataaggagaagcaaaaggcagcagttaatgttaattcaacttcgcaaattgttgacaccaagaaaaagacaactcagccatcgaagccagacagcaaatcttcgatagcgcccgtcctagttccacctagtttgccagttgctactgcaaatggcaagaccaagcacacagcgtacaacaacgtggatcagcaacagcagcagcaaatgaggcgccgcaccatgtctatgtgtattacaccagtcactccgactccggtggtcacgccatccccgttgcatggaacgccaccctcaactaagaagcgtcagaccaactttgagcaggaactcaccaagcccaacagtcagatcctgagcagtagcatcctattgaacagcagtaagggacttggcctgcctctcgccgcccccacagtggttagtgtgcccacggccgttcaacagcagcagcatcgtaaagagaataaccaccaggaggcgactccagccagtggcggtcctatgagtctggcggctgctattgctagcggaaaactgaatgctattagccgaaggcgagagtccatgtgtggtagccggcagcagcaggctctaattgcggctgccttgaagaaggaaaagaaggagaaaaagaagagcaagaaaaaggatcgggaaaagcaaaagcacgataagcaaaagggcaaggagaaggagcgagaaaaggacaaagagaaggataacaagcaaaagactaatcacatacagaaacctgctcatccgacaacagtgccagctaactcgatgccaatttcggcacccgctccagttcctgtattggttccaacgcccgtaacgacgcccaaggctgctcctatcccagttttgataacccagcccacgccgtcaccgatccatgtaacccaaccattggttaacaattgctcgaccaaggtagcatcgcttcccttctacaacacaatctacggcaagttgcaggacccttcgacgccaactagcagccccattcccgtcactaacaccatgcccagtctggccgaatatctggagtctaccaaatccaagacaacagcactatcggcagtcaaacccattggaattgcagcagtaacgcctctcagtagcgccataactcctgccaaagttgcgccttcctcccttgagatgccacctccggccaccacaccattgaaactgtatacgcggaccgccagccatgatccgcggctgaatcccatgctcacggttccagaccccactcccatgccgaaacgtaagctctccatcagcgaataccggatgcgccatcgtccatcggtagacacggcgccaacgacgccgacaacacccacaactcctaccactccaactacaccgccgggcagcaataaggatcgctcctttgccaagccacagaccattaacaagtgctcacttcagtcgccggaacgctttcaggcggcgattcgggagcggcgcaactcgatcagtgcgcaccatccgcagcaaaacgctcaccacaatttgaacaacaataaaggaggcattagcaacaagagcggaagcagcagcggtaatcatttgcagcaagcgttgggcgtcgctggtggaagattgcaatccaagaatgcgatagtagatccagcggccaccaccttaagtacggtgaatagcatacttagtacggctcaaaagctgcacatgtttgatgataagccaaaaggtaagtaaattataattgacccttgtataattgggctagcaattctaaccaagtaccgtctacaggtggccacttcaatgctgcacccacactactcgagcagcagcaggagaagatgagcgaacgatcgcgctgcttgcagcggacaatatcctgtgactcgcgggtcatcgagcgattgggcacaggcgccgctgcaggtgccttggagaaagttaccacggcatcaaccaggcgcgatgccgtctgattaggtatgtggatattgagaaaaccttgaatctgaaaagtcttaattgaatgcctttcaatccatagtaaactaaaccaactgctgaccacaaaaaagtaatacagcttcatacaaaggccgctttattgcaggttgattcaaattttatgtatctgataatagctaaccggtaccaaacaattaaagcaaccaacccgttctttgattttgcaaaaccaaattataacaacaattacaaggcgcataaagtatgagcttgcacacctttatgtaatgtgaattgaaatcaggagacggacgccatgcaaccaaatgctatcaatgaatgtatattgggagacaaacacacactttgcatagcaagagagtttgggaaaactgaaaacgaagattaactaaattacttagttactttatagtatcgtttatgtcacagcaatcaaaccgcttaacctacttataaacaaggaacctacaatatatatatatgcacatgtatatgctagacacctttaaatagagcctatgtagcgcgatataagcataaacttacatagcacatagaatacgaatacagattaggcagccaaatttgaagttgtaaaaatgttagaaatcactcttggcttatttactaattgaatatgtatttttagttattaagttcaatcaatcctgaaaaagttccgttttcgccattgcagaggagccgaaagtagatgcgcggatggtctatccctacataatatatatttttgtgtcactttcgtttaaattttgaattacttataatcgtagaaataaaaagtatatattaatcacacttaactacaatatttacccaaaaaaacagtttagccagacttaaaaaaaaaatgcaagcaatatttaaaacacattacctagtacagaacttggcaaataatacaaactgtaattgttagagagaccagcgaaaacaaaatccggaactaacaaaattgtaaataatattttt

SEQ ID NO: 41936 - DNA, 10314 bp, DROSOPHILA
ttggtcagtctctaattttttagaagcggaaagttgtgagcaaaacgtgtggaaattgtgctcgaaacgtcaacaaaaaatttgtgaaaataactgggagcgtagtatgcgaacgcggcaatcgcagaactatgaaattcccctgtgaaacatgtagtaaacgttcgaaacaacgtcgcgccatcacttaaatgctgcaaatcaacaatgtgcaacggaacaaaaaagaaccagtgttaaagtgtatacaaatttaatttgtatttataaaattgaaatataaagtttcgaaataaaaaataaaccacgtagcttgtcgttaaattaaattaagttgtgcaaaatgaagtgaaaattcaaaataacagagtaaacgatacaacgaaatatcgtttatggaaagaccgtatccaaagaattcaatatccaacatacaacgacggacaacaacgcaatatcaattgggcgggactattagttttgcgagattggatcagctttaggataaggctccgtatacagggagtcaaacaaaggacgcaaaagcgaagaagccggggagcacgcagtggaagttgccgaatctctcccagcgttatgattgtgatggctgacaatgtgatgtggcacagagttggacaccgtctatgcaaatcgagcgcgcaccaccgcctacgcctacagttgtcaccactgggagtttcagcttccgtcatccgtgccagagccagaggttatgcattgagcccccaatgttttgggggcacgtcaacaaaggcccagcgacagcaggagcagaatctgcatcagcagaaccggcagcaacatgacggctttatctttagcggaccaaactgccgcagcaccaccaccatgcccatgtccagtcacgactcggttttcgtggagcctgctgtcagtagcagtggcggcggcagcaccagcagcataaatcgcatcggagtagccagtgggccacagccgccaccccctcatatcgtcatcgatggcagcagcttgtccacacaggcacaactgcgcatcatgcaacgtcgcatgtcgataagtacgcgccagatccttagcgccagccagtctcagtcgatcaatcagtcgcaaaagtacgcggtgcgtacagcagccggaaccggagctttagctgcgggggcagcctcttcggggagctccggtcaggagctaattaatccccagatctacaagattgtgaccacggacggtagcaccagcaacgtcatcattgacgcatcagctgcggcaccaccgcacaactccaaactgttgcttagtaatctcactgtgctctccaaacaggcaccagtccaaggagcagccggtcagcagcagcagcagctcaactatctgggagccaagagtctgccgtatgtgagtgcgtcgccggctaagacgcagcagcagccccagaagtttggcagcatcagcgcatttaaggcgcaacatcagcagcagcaacaacatcctcatgctaccctacagaaagtgactttgggctccagagtggcaacccgtctccagtcgtacgtcccggcatcaccgtcgcagataatggtgcagccggcgcaaccaaagtatgtgaatgccacggcgacaacgataggtgggaatgctgctctgctcaaaaaggccaatcaaaagatcacggtcaagagtgttagcaatatgtcacaacagcaacaacagcagcaacaacaacagcagcagcaactactacaggctcagcagctaaaaacctttatcacgcagcagcaacagcagcaaacctacaaggcgggggccaaggcaaagtttgtgaaacagacgactgccttgtccattgctgcattgccccaacagcagcagcaaactacctacgccaaacagtcaatggtcaccacgtcgacacccgcgaaggtaactaaactgaatagcaagtatgtgcaacagcagatcagcctaccgcagggaacgcaactgcagcacaaagcgtcgccgaatgtcaccggaggaggatatcttctgcagcagtctcaggccgccgtcggaggaactattaagtttgtcaactcacatggcacagttatccagcagcacccccaacagcagcaggcaacaaagcgtacccactacaacagtagcgggagtagcgacaatgagcagcacgctgtagcgaactcctcactgataaccgatgatgttatgatcgtcaatggaactcagatgaccgacgaactgtctgcccgcatcctgcagagcatggcccagaagtcgtttagccagcagcaaagattccatcaggttcccgccactggcagcggcaacatgccaccacccacccaaatcatctatagcaacagcaccagcaacggggccgctgcaagtagtccgggtggaaatgcatccggcaatatgctgcttgcccactatcaggcagccggcacaaagccggtctcctccgcttcgttcatcacggtcactggtacgccgccggttacagtggccacaacgccgtcggtgagcatctcatcgcacggctttgccagtggcagtgcggccatatcctcctacatgtcatcggcaaccgcagctcgtcgccagtctgtgagtgcgcccagtagcagggcggtgtctctggagcggaagcagcatcaccagcaactgcagcacgatgtgattggtggcgggcgaaaggcgccaacggtcatcgagtattacaataagcacggcgtgaatagcatagttggcagcagcaataacctggcccaaagcaacagtatgagcaatctcgcaggcccgcgaagtaacagtggaagcggattcgccacgaccactccaacgccagctaccccacttcacctgacaccagtgaacgttccagtccacgtggaggcagcaccaccgtcttcgccagctctggtcaagggttcgtcccaaccgccggcgcagccacaacaacaacaacaacaagcgcatcccttgggccccaatcaactgaatgccaacgatgaggagctgtacatagaagaggtgcgcccggttccagtgctgacgcaggatttacgtctgcagcaactgcatgccatcatgcaggatcacacgtacgcctcacagcaacagcagcaacagcctcagcaagcggctggtgatacgacgaatcctggagcagcacagcaggtccagcagccgcagcaatggtccctaggcggtattggtgtcacggtgtctggtagccagggtacacctacagcggtaggaggatattgcagctattttggtcagcaaattgctcgctctcaagctgacgatgatgcccactctgctataagcagtagttcccggatgggattagccagcacagatattgatcctggagaggagactgaaacagcaccagaagccgaggccgaggatgactccgtaacgcgctgcatatgcgaactaacccacgacgatgggtatatgatatgctgcgataagtgctcggcatggcaacatgtggactgcatgggcatcgaccgtcaaaacatcccggaggagtacatgtgtgaactttgccagccacgtgcagtggataaggcgagagcacgagcactgcagcgtcaaaagcgcaaggaacacatgctgctggtggccactcaagcggccaatggtgctgcagccgtggcagcaggaacaacgctcagcggtggactcggcagtggtttgcccatgtcagaggaactacagcacagactggcatctggacttaatggaggatttgccacgggcaccggcatgtcaaagaagtcgaagaaaaccaaagagaattcgggaagtacctctaccttaaagaaaactaaaaagagcgctgttggtatgggcggagagaagaacgccagcggaagcggtactcctactggcagtagcggtaagaccagcaagaagagcagcaaacgcaagagcaagtctggcggagacggatcaagcggtgggggaagcagtcccgctttaacagccgccgagaagcatgccgccaatctgcgccagtggatcgagaactacgagtatgcggtgacaaaccactattcgccagaacttcgcgcccgcctgcacgccatccagaagcagcctagcctattgcagagcatacaaaacacggagaataaggcgttgcggcaaattcaacagcaactctccacggctggcagtgcagagcagcttgagcagagggcacagcttattccgtatgcaggcgccaaggtgctaataagcagcgttgacttgtcgccccatgcccccatccacgagttacgcggcaagtatatgctgaccacccagttccgtacccagaatcccaccgtcaacatgaacacaccgccgccgagcaactaccttaacagcttcaaggcgcacaagactccgggacagtttgtattcttttaccagctgcccggagtggaggcacccatgcagactcttcggccggacggaagtgtgccacaagttgcgcagcagccaccatcctacctaaagggtccggaggtgtgtgtggatacgcggacctatggcaacgatgcacgattcgtgcgtcgatcttgccgaccaaatgccgagttgcagcactacttcgagaagggaacgctgcatttgtatatagtggcattaacacacatacgtgcccagacggagatcacgatccgccacgagccacacgacttgacggcggtggagcagaagaagtcacacgctgccgtcatccagccaacaagtacccgttgtgcctgcgacatgggaagtgattgtctcttcgccctaccactggccgtccagcaacagcttcaagctccacctacgcagcccaggagcagtcaccggaacaaggcggcagcagcagcggctgcggcagctgctgctaacagtgcggcagccatacagttaaccatgggattgggcgtcggagcaacggtggcggcaggagcgtctgtgttgccaaattctcgaaatcgttccacatcctccagcggcgagagcagtcaaatgggactaaacagtccgcagcttggacaattgaatttgggctttaaaacgtctgtgacagcaacatcgctgacagcgccagttccaggagtgcactgcaacaacagcggcggaagcagtagcagcagcaacaactcttgctcggtgtccatgtccagtgtgctacacgattccggtatttgcacttcgtcctcttcgccgtcggtgtccattccctcaccgacacccacccagatgcagtcgccgaccttacaacagcatccgcaacagataccgcagcaacaattgtcgcttttgcagcgcagtccaacgcaacagcatcagcaacagatcctagctgcgctgcccacgccgatgctcacgcctatgctttcaccccaattgccaaaaccagcacaacaacaagctcacgtggtattgccgcagtcgcagcaaacttccttgctgcagcagcagcaatcacagcaaagtcaggagcctttggctgttatagcagcagcagcagctgcgcagcagcccatggccacctattttgttcgacaaccgcagcaacagcaacaacagcaatcgccaaagccgcaagcgcttgtggcacaacagcaacatgtggtcggtgcgcaacagcagcaacactttctgcagcaacagcagaagcagcagcagcagcaaatggcggatgaggctagaatggcagtgagtgcgttgcaaacactgcatgccgcccccacttcgcatatagtgtcgccaatcaaagtggcagcagtgcagcagcaatcgcaaccgcaacagcaacagcaaaatacgcatcaacaaccacataaccagcaagcagtacaacagcaatccaatcaactgcaacaacaacaatcgcagcagcccaactacccgcagtcgccacagcgtcagcaaaagcctcaacccgtacagcatcagccgcagatagtaatttcaacgggagcacaggcgattccagcgacaatgcccaccaaattaagttcacccacaaaaagtgcggcgccagtgataagcaacaataacattacggtcagtgctcaatcctcggtggtgggcggaaagaaaacacctgccaagcatccccagcagcaacaacaacaacagcagcagccagtgacacctgtttcggctgctacggctccagcagcaactccttcgtcatcggaatccaaagaggatgatgtgtcggcaagttccacaactactcccacaacacgaacgcctgccaaggataagccgaagcagtcgcgcgaagatcgcaagctggaggccattctgcgagctattgaaaaaatggagaaacaagaagctcgcggaaagaaggacacacgccagagcagcggtggcaagaggcaggcgagcaactcgcccgcttcgcccaacaaacgtaatagctcaaactccattagcgaggatgtggagacgccgacgagtactaactccgcagcggcagctgcccaacgtcgaaataagaaaaagcgaaaggttagtcgcagcttgaataacaacacgaatggcttgggctcgggtggtggcagcaataacaaacgacggaagagtatcgtagtggagtcggatggagagtctcatgcattaaccaactccgagtcggaggatcaaggtcagcatcctcagtcacatcacagcggatccgaggatcaggcggcgggtcttcttctggccttggcccacaacaactcctcaccgaatgagccattcaagtcgccattatcccaatcacattccctgccagcaactccagcctctgtgagtagtgcttgtctgctaattgaggccgctatgggaccactgcagcagcaaccggcaccggcttcagcgtcgccttccttagccgaattcaagtacccacccggtggggccaagaccaaaaagtcgcttatgtccagttggttccagcaggcagaacagcagcacgcatccggtttggacagcctcgtgcaggctgctatgagcgaaatcaacggcgagcgtgagcagcttcaacgccaaccgcaaggcgaatccttgccagcgccggctttgctgaaggtagagcagtttatacatcaggcagagtccacaactgctgttcctgctcgggaacaattgcacctaccactacaaaacaattcgtcagtgaagaagcgctggttgcgacaagctatcagcgaagagaccacaccagtcgatgaacttcagcagtcacaaaatcagtcggtaactgccactccctctccacagccggtaccaactgtttctccgctggcgaacggatttagtactccgcttaagaagaggcgcctggtggtcgtaagcaatggaacgaacgtggagtctgatgagacgcatatcgacgtgattggggagccaaaggatgaagcagaagagaatgtcgcaatgactgaattgaaggtggaaatagaaaaccatcatcaagagcaagatgacgacgtagacatcctccgttcacccagtccgggtactcatcaaatagtggcagaggataatctggttaagatcgagccggaggacacaagtgctgcggccgatgatgtgaagatcgatgtggaacgagaggagagccaggcatgcgataagtttgaggaaatggtgaaggtgaagcgcgaagaggaagagcagcgtgagaaggaaatcaaacagctgcaagaacggcaggaacatgaacagccgaaagttgagcccgccccggtggaaccaaagcttgaaaataccgtagcgaaagcggagcccaaagtggagccaagtcaagagatagtgtctaaaaaggagccaacaaaggtggaacccaagcccggcgagtctctgctgcgctcgacagcgactgtaactgcaacacctactgcggcaacaatcgctgcgacaactctgctcgatgtgagcaaagtggcattcaagactcgaccacctctcaaactggaggatgaaccgcaaaagaaaaagccaaagctggagtcgatactaccagcgccagtagcaacagtgcctccagtttcagttcctccgataccagctgcatcaaatgcaactacatcggcggtaactaacactgctgcggcgtcacttacaacaacaactgctccttcaagtaccaaaaatctcaccgagcacgatatacaggaacgtttgctgtcgttccatgcagctaacatttcctatttgcagtctagaaacaaaaaggcaaccgcagctttgacctccgcctcccccagccagaagagcaatagcagcagtggcggtagtggcactgagtcgaaaaaatcatccaaggataaggatgaaaagcgcgacaaggagaagcagctcaaaaaatcgaaaaaggagaagaaaaaatcgaaggataaggagaagcaaaaggcagcagttaatgttaattcaacttcgcaaattgttgacaccaagaaaaagacaactcagccatcgaagccagacagcaaatcttcgatagcgcccgtcctagttccacctagtttgccagttgctactgcaaatggcaagaccaagcacacagcgtacaacaacgtggatcagcaacagcagcagcaaatgaggcgccgcaccatgtctatgtgtattacaccagtcactccgactccggtggtcacgccatccccgttgcatggaacgccaccctcaactaagaagcgtcagaccaactttgagcaggaactcaccaagcccaacagtcagatcctgagcagtagcatcctattgaacagcagtaagggacttggcctgcctctcgccgcccccacagtggttagtgtgcccacggccgttcaacagcagcagcatcgtaaagagaataaccaccaggaggcgactccagccagtggcggtcctatgagtctggcggctgctattgctagcggaaaactgaatgctattagccgaaggcgagagtccatgtgtggtagccggcagcagcaggctctaattgcggctgccttgaagaaggaaaagaaggagaaaaagaagagcaagaaaaaggatcgggaaaagcaaaagcacgataagcaaaagggcaaggagaaggagcgagaaaaggacaaagagaaggataacaagcaaaagactaatcacatacagaaacctgctcatccgacaacagtgccagctaactcgatgccaatttcggcacccgctccagttcctgtattggttccaacgcccgtaacgacgcccaaggctgctcctatcccagttttgataacccagcccacgccgtcaccgatccatgtaacccaaccattggttaacaattgctcgaccaaggtagcatcgcttcccttctacaacacaatctacggcaagttgcaggacccttcgacgccaactagcagccccattcccgtcactaacaccatgcccagtctggccgaatatctggagtctaccaaatccaagacaacagcactatcggcagtcaaacccattggaattgcagcagtaacgcctctcagtagcgccataactcctgccaaagttgcgccttcctcccttgagatgccacctccggccaccacaccattgaaactgtatacgcggaccgccagccatgatccgcggctgaatcccatgctcacggttccagaccccactcccatgccgaaacgtaagctctccatcagcgaataccggatgcgccatcgtccatcggtagacacggcgccaacgacgccgacaacacccacaactcctaccactccaactacaccgccgggcagcaataaggatcgctcctttgccaagccacagaccattaacaagtgctcacttcagtcgccggaacgctttcaggcggcgattcgggagcggcgcaactcgatcagtgcgcaccatccgcagcaaaacgctcaccacaatttgaacaacaataaaggaggcattagcaacaagagcggaagcagcagcggtaatcatttgcagcaagcgttgggcgtcgctggtggaagattgcaatccaagaatgcgatagtagatccagcggccaccaccttaagtacggtgaatagcatacttagtacggctcaaaagctgcacatgtttgatgataagccaaaaggtggccacttcaatgctgcacccacactactcgagcagcagcaggagaagatgagcgaacgatcgcgctgcttgcagcggacaatatcctgtgactcgcgggtcatcgagcgattgggcacaggcgccgctgcaggtgccttggagaaagttaccacggcatcaaccaggcgcgatgccgtctga

SEQ ID NO: 41937 - protein, 3238 aa, DROSOPHILA
MIVMADNVMWHRVGHRLCKSSAHHRLRLQLSPLGVSASVIRARARGYALSPQCFGGTSTKAQRQQEQNLHQQNRQQHDGFIFSGPNCRSTTTMPMSSHDSVFVEPAVSSSGGGSTSSINRIGVASGPQPPPPHIVIDGSSLSTQAQLRIMQRRMSISTRQILSASQSQSINQSQKYAVRTAAGTGALAAGAASSGSSGQELINPQIYKIVTTDGSTSNVIIDASAAAPPHNSKLLLSNLTVLSKQAPVQGAAGQQQQQLNYLGAKSLPYVSASPAKTQQQPQKFGSISAFKAQHQQQQQHPHATLQKVTLGSRVATRLQSYVPASPSQIMVQPAQPKYVNATATTIGGNAALLKKANQKITVKSVSNMSQQQQQQQQQQQQQLLQAQQLKTFITQQQQQQTYKAGAKAKFVKQTTALSIAALPQQQQQTTYAKQSMVTTSTPAKVTKLNSKYVQQQISLPQGTQLQHKASPNVTGGGYLLQQSQAAVGGTIKFVNSHGTVIQQHPQQQQATKRTHYNSSGSSDNEQHAVANSSLITDDVMIVNGTQMTDELSARILQSMAQKSFSQQQRFHQVPATGSGNMPPPTQIIYSNSTSNGAAASSPGGNASGNMLLAHYQAAGTKPVSSASFITVTGTPPVTVATTPSVSISSHGFASGSAAISSYMSSATAARRQSVSAPSSRAVSLERKQHHQQLQHDVIGGGRKAPTVIEYYNKHGVNSIVGSSNNLAQSNSMSNLAGPRSNSGSGFATTTPTPATPLHLTPVNVPVHVEAAPPSSPALVKGSSQPPAQPQQQQQQAHPLGPNQLNANDEELYIEEVRPVPVLTQDLRLQQLHAIMQDHTYASQQQQQQPQQAAGDTTNPGAAQQVQQPQQWSLGGIGVTVSGSQGTPTAVGGYCSYFGQQIARSQADDDAHSAISSSSRMGLASTDIDPGEETETAPEAEAEDDSVTRCICELTHDDGYMICCDKCSAWQHVDCMGIDRQNIPEEYMCELCQPRAVDKARARALQRQKRKEHMLLVATQAANGAAAVAAGTTLSGGLGSGLPMSEELQHRLASGLNGGFATGTGMSKKSKKTKENSGSTSTLKKTKKSAVGMGGEKNASGSGTPTGSSGKTSKKSSKRKSKSGGDGSSGGGSSPALTAAEKHAANLRQWIENYEYAVTNHYSPELRARLHAIQKQPSLLQSIQNTENKALRQIQQQLSTAGSAEQLEQRAQLIPYAGAKVLISSVDLSPHAPIHELRGKYMLTTQFRTQNPTVNMNTPPPSNYLNSFKAHKTPGQFVFFYQLPGVEAPMQTLRPDGSVPQVAQQPPSYLKGPEVCVDTRTYGNDARFVRRSCRPNAELQHYFEKGTLHLYIVALTHIRAQTEITIRHEPHDLTAVEQKKSHAAVIQPTSTRCACDMGSDCLFALPLAVQQQLQAPPTQPRSSHRNKAAAAAAAAAAANSAAAIQLTMGLGVGATVAAGASVLPNSRNRSTSSSGESSQMGLNSPQLGQLNLGFKTSVTATSLTAPVPGVHCNNSGGSSSSSNNSCSVSMSSVLHDSGICTSSSSPSVSIPSPTPTQMQSPTLQQHPQQIPQQQLSLLQRSPTQQHQQQILAALPTPMLTPMLSPQLPKPAQQQAHVVLPQSQQTSLLQQQQSQQSQEPLAVIAAAAAAQQPMATYFVRQPQQQQQQQSPKPQALVAQQQHVVGAQQQQHFLQQQQKQQQQQMADEARMAVSALQTLHAAPTSHIVSPIKVAAVQQQSQPQQQQQNTHQQPHNQQAVQQQSNQLQQQQSQQPNYPQSPQRQQKPQPVQHQPQIVISTGAQAIPATMPTKLSSPTKSAAPVISNNNITVSAQSSVVGGKKTPAKHPQQQQQQQQQPVTPVSAATAPAATPSSSESKEDDVSASSTTTPTTRTPAKDKPKQSREDRKLEAILRAIEKMEKQEARGKKDTRQSSGGKRQASNSPASPNKRNSSNSISEDVETPTSTNSAAAAAQRRNKKKRKVSRSLNNNTNGLGSGGGSNNKRRKSIVVESDGESHALTNSESEDQGQHPQSHHSGSEDQAAGLLLALAHNNSSPNEPFKSPLSQSHSLPATPASVSSACLLIEAAMGPLQQQPAPASASPSLAEFKYPPGGAKTKKSLMSSWFQQAEQQHASGLDSLVQAAMSEINGEREQLQRQPQGESLPAPALLKVEQFIHQAESTTAVPAREQLHLPLQNNSSVKKRWLRQAISEETTPVDELQQSQNQSVTATPSPQPVPTVSPLANGFSTPLKKRRLVVVSNGTNVESDETHIDVIGEPKDEAEENVAMTELKVEIENHHQEQDDDVDILRSPSPGTHQIVAEDNLVKIEPEDTSAAADDVKIDVEREESQACDKFEEMVKVKREEEEQREKEIKQLQERQEHEQPKVEPAPVEPKLENTVAKAEPKVEPSQEIVSKKEPTKVEPKPGESLLRSTATVTATPTAATIAATTLLDVSKVAFKTRPPLKLEDEPQKKKPKLESILPAPVATVPPVSVPPIPAASNATTSAVTNTAAASLTTTTAPSSTKNLTEHDIQERLLSFHAANISYLQSRNKKATAALTSASPSQKSNSSSGGSGTESKKSSKDKDEKRDKEKQLKKSKKEKKKSKDKEKQKAAVNVNSTSQIVDTKKKTTQPSKPDSKSSIAPVLVPPSLPVATANGKTKHTAYNNVDQQQQQQMRRRTMSMCITPVTPTPVVTPSPLHGTPPSTKKRQTNFEQELTKPNSQILSSSILLNSSKGLGLPLAAPTVVSVPTAVQQQQHRKENNHQEATPASGGPMSLAAAIASGKLNAISRRRESMCGSRQQQALIAAALKKEKKEKKKSKKKDREKQKHDKQKGKEKEREKDKEKDNKQKTNHIQKPAHPTTVPANSMPISAPAPVPVLVPTPVTTPKAAPIPVLITQPTPSPIHVTQPLVNNCSTKVASLPFYNTIYGKLQDPSTPTSSPIPVTNTMPSLAEYLESTKSKTTALSAVKPIGIAAVTPLSSAITPAKVAPSSLEMPPPATTPLKLYTRTASHDPRLNPMLTVPDPTPMPKRKLSISEYRMRHRPSVDTAPTTPTTPTTPTTPTTPPGSNKDRSFAKPQTINKCSLQSPERFQAAIRERRNSISAHHPQQNAHHNLNNNKGGISNKSGSSSGNHLQQALGVAGGRLQSKNAIVDPAATTLSTVNSILSTAQKLHMFDDKPKGGHFNAAPTLLEQQQEKMSERSRCLQRTISCDSRVIERLGTGAAAGALEKVTTASTRRDAV

SEQ ID NO: 41938 - DNA, 2677 bp, DROSOPHILA
ttacggaagcaccaactgctgctccagttgtcaaaaagaacaaaagagctggtgccaggaaaaacaacaggaacaacaagaataaggcagcagctaaacgtcgcaatgccgccgctgccaagaaaagtaataacaagaaggcggctaagaagcgaacacctgttgccgccaagaagcgggcaaatgctggacccaacaaacgtaggcgctctggataaatccagtttattatattcgtagctacaaattataaaaataaaaaattataccaaaaaaatttgttcccaaaattaccaagatttttttctatgacgtttataagttaggttttgaattaatatataataatgataatgatatttaccaagaatgtggttgttgggtatgggtgtttattattatgaattttgtacaaaacttgaatatcacagaaattttgaaatatatttaactatttcacccaatgttcaaaagacaagaaaacattctacataagtttttatcggcacgtgttttttccctcatttgtaaataaatatatttttgataaacaaaaacatacaccgcatatacttgaaaaattatataattttaaagacgtttaatgtcatatctattttttctataaaactactagcaggtcgcctaacgcgtaaaccatagacaaattgttcaaaaatccagataagacatttgtgaccttggctcttttaatataaaagagtttatattactttttcgtgctctaacacaaaatataatttcataatttcaacatatagcaatcgaaaaatgttaaacaaatacaagcagcacacacaggtgctctaagccaccgaaaattaagacgatgaattaaaaaaccaatatttgcattctacagatgtacatagaaaaataatgtaaaaaagctttatatatttataaatttcttcagaggagaaaaaactataaatacccagtgttgaagacttttaaactcagacgtttatacctaaggttacctatctgttcgttgactctatagatacaaaaaaaaaaagatgaggctgctgttggttttaagcctggccatattggttgccttcgtaacgggtgctgatgacactgacgatgactattacgattattacgactatggtgatgactactatgacgactctgatgtagagtccagttcggaaagtggtgttggtgcatccagtagctcagaagatgatgctagtacctccgaggacagttcctccggcgaagcttccgatacaggtagttcttcagaaacttctggagatggttcctccgccgaaacgacctccagttcaactccaaccaaggcagaaaaagccaagaaaactgctgcacgcagagctagacggcgcaggcgcaccaccaccgctgctcccaaacgcaaagtagcggcagccgcgtctgccaagaagcaaacacctgttgcccaaaagaagaagacacctgtggcagccaagaagaaggcgaatactgccgccaacaaacgcaaacgcacaggctaagcagttcgaaaaaaggataaattccccatagtcactgaaagtttttacatcaaacttttaagaggaccaagagacatcttgtagaatctacattagtctgggaatatttcatatgttgttttctgtacaaaaaatccatataaaaatacaaagataaggagacgttttgtaatttaccaaaaatatacattattaatccaaaatatacaacaattttgtatttgagggcttaaatgatctttcttcggagagaaactaatcattacaaatcgtttctgaatacttaaaatcgaaagccaactaaaaatcaagtattccttaaaaggaaaaaaattttttgaacgaaacattcatttaataaactgttgtggtttatatacaagtctctgcagccagattagtataaatcgttctagtggcgtagtattaccaaagtcagctgcattttgctgcatatttttaggcgcccacatttacatttaccagcgctttggcgcattgtgtttctatttagacgtaagccaatagcatctataaatagtaattatgccctcatacaagtagacataaatgcacagggacacttaattactgatgcgcacaggcgacaattgtttaatggcgaaaggataacgaaaagggaggagcctgagtagcgccatcggccaccacaatgggaccattgttttcgatttcaatgccgacattctggcagtggcactgccaacagaaatcccgtgtatccagtgcactgcggcccagatgaaagccactccgcatccaagtgtttgtgtttgcccgagagagatccaatcttccagtgtgctggtggcggcaaagcacacatccatagacacaaccacactcacacaccgatgtttcctcttgtggcacccgctgggccgcttagtgagccaagtgtggcaacaatctgaatcatcgttttagtttccaccctacatccccaccaccagatcaccagggtatgaaccgatttgtgaattcgccgggaatcttaggttgggatgaccagtcaataacaatatcaagcaggaaatggttgcaaattatcgaaaattctatgtatctactagatttggtgttatctacgcaaatgtctaaaagttgcattaaattgtggataactt

SEQ ID NO: 41939 - DNA, 677 bp, DROSOPHILA
ttacctatctgttcgttgactctatagatacaaaaaaaaaaagatgaggctgctgttggttttaagcctggccatattggttgccttcgtaacgggtgctgatgacactgacgatgactattacgattattacgactatggtgatgactactatgacgactctgatgtagagtccagttcggaaagtggtgttggtgcatccagtagctcagaagatgatgctagtacctccgaggacagttcctccggcgaagcttccgatacaggtagttcttcagaaacttctggagatggttcctccgccgaaacgacctccagttcaactccaaccaaggcagaaaaagccaagaaaactgctgcacgcagagctagacggcgcaggcgcaccaccaccgctgctcccaaacgcaaagtagcggcagccgcgtctgccaagaagcaaacacctgttgcccaaaagaagaagacacctgtggcagccaagaagaaggcgaatactgccgccaacaaacgcaaacgcacaggctaagcagttcgaaaaaaggataaattccccatagtcactgaaagtttttacatcaaacttttaagaggaccaagagacatcttgtagaatctacattagtctgggaatatttcatatgttgttttctgtacaaaaaatccatataaaaata

SEQ ID NO: 41940 - protein, 161 aa, DROSOPHILA
MRLLLVLSLAILVAFVTGADDTDDDYYDYYDYGDDYYDDSDVESSSESGVGASSSSEDDASTSEDSSSGEASDTGSSSETSGDGSSAETTSSSTPTKAEKAKKTAARRARRRRRTTTAAPKRKVAAAASAKKQTPVAQKKKTPVAAKKKANTAANKRKRTG

SEQ ID NO: 41941 - DNA, 4456 bp, DROSOPHILA
tttcgatacgacagcaaccgttttatatcggtacgtcttacgaacttctattaaaccaaaaactaagctaaattgcatgtaaaatcattaataacgattatattcagtttggccggaacgccctgctccgcttcatcggtcaaaatgtactaacgcgtggcacacgccacacagctgctgtgacacatatggagtagagtggaacgacatgttgcgcctgtaaaagggaatcagatcgactgggattcaattaaaaggcgagccgcagagctccgaagcgattctgttaggatgggcgaaccgaaagccaccgcagaccctggggaggagcaggccttcaactgcgaggacgaagccaacgccataattaacgatgttaaggctcacgtcgctgagatttgcatctcatccaaactggcaagcgatgccacgcaaatttacctgaacatccggactatcgagagcgccacttgctgcgttcaggtgagcagtcgtggcttcaagatcgtctcctcccagtacgacaccatagacgaggacagccggatctctgcactgcttcgcaacggacaagagcaaggcgacgacgaggaggaggagatatttgaaacgccgtacgcgctgctggacaagatcagcccccgctacgtcgagtcgttcggcaaccagctgtgccagcagcttagagcgctgcaacagatgcgaaccgagttcaacgaggaggacgaggaggaggaggaggaggcggaggaggaggagaagaagtgacggtaaccggactccagctttcaaacgaggctgtttactctttagacagacgattttaatgttagtttaattaaatgtttatttttaatagcagagcttgagctccgacttcctacatatacaaaattgtgtgtttgtgccgcaaaagtatttccgcgtgagttggtcttgcacttctcaattcaccacatcctttccttgcatagcaaacaaatgtcgctccagatccgcgttagaccttaagacgtttcaagaataaagattgtgattgcaactctagctccgtcagtttgcgtacagttggcaccagctgctcgacgtggtcttcgtagccgctgccagttcttaaattcttttgaccgtacacgaccttgccgtcgaagtcattaactggcacatccatggtcttgtccacctgctggatggtgatgttcaagtggtcctcaacttcggccagtaggtttggttcgttgtaccagatgcagcatcctcggacttcggttaagtttgtgttgttgcagctacggccgcgcgacttgcaccactcgccgtggtaccaaaccttctccggcactgttgccaccaaactaatggccaaccccatgcgttccgccctgcccacacgtccgatgcgatgaacgtaattggtcttgtcatcgggcagcgtcacatttatcactgaggataaggaagtaaattatttggaaaatggtttaacgacggttattgtttcaaaatttgagaacttactaaacggcagccccgtaatgtctagaccacgagccgccacgtccgtgcaaatcagaaacttgacttgttgccgcttaaacatttccaggttttctttacgctcctgcggctttcggtcaccatgaaggcagacgcacgagtaatgttttccgcctcgctggcggagaaatctttctaagttatcacagtcttgcttggtgcggcagaagataatggctcggtccatattgtgtttatctatagcgtgcacacagtattcgcccttgagcagcttgactgcctgcgacaacgtctccttcgaatgattgcctggatgaacgttgtcacggtcgtggacgccgtcggtgccaatgggttggcgcagcgactgccaggtggtgtccatctgcgggtcgactagacagacgacgtggtgaaccgtctcagggacagcatcctcccccttcagatccacccaggtggggaagtgcatcaggcgctcagccattttcttcacctcaaatgcatgcaacgtggccgagcagacgaccatctgcagacggcgaccatccgatgtgatcttcggaatttgtttgtgtagacggtcaatcagctcggtgtaaccctgcttcagaagtgcgtcagcctcatccagaacaaaaaagcggcaatgggtgagcaggaccagtccactgttgatcatctcctccagccgcccgggcgtgcccaccactatgtgagtgccctgcatcagctgcgccttttgctcttccaacctcactccaccgataagcagcagggagcgaacctctgggttgctcaggtggtatttaaacttctcgatctggttgtaggtttgctcggccaattctctgctgggctccatgataatggcctgaggggcgttaggcgccggtttggcggacggtgctccagctgcgggaccggttatcggattggccttgctatgctcgggtccagcctggcaagcgccaacgaacccgttacccggggcatacttgaagtcagtctttccaaagttaaactgcatttcggcgttcttcagcaccaccgccgggtaaaaggtctccttggcaaggttgtccggcaggcggaaggctacgcccaggttctggccattcttggtgaagctcacttcctggtttttcaaatcgagcaggcagccgatgacatctgccttgccgaatgcctcaccgtagtcatcaaactggcggttgttggacttcttgccggtgccgccgaatccaaagcccatgcgacaggtgcccaaatcgaggtttgcctgctgtgtagaccagcccacacgacacagtccctcgtccgttaccgtggcctcaaagtagaacttgccctttccgcgaacgccagtggtggcccgacacccgtgccactccttgaactcccgcgactggcaacgcagaccatcaggagtgacggcaagcgcgtttcctcggtcgaagaaggacatggtccacggagtcacagctcctccaattgcaccgcccttgccagccttcccctcctccagatcacgcaaggtctcccacacgatttgcagaatggggaggcagaaggcacccgtttttccggaaccagtttcggcggccatcagtacatcgccgccacccaggatcagaggaatggcctcagcctggacatcggtgggcaggctgaaaattcataaatgtgaaggcaataggcagacagaactgttttttcttacgtccagtccaattcgtctgtggccattcccagctccggaagcacgccaaactctgcgaggcaagtcaaataagcaatgcacaccttaaatattaattttcacttaccttcgaatgcagtcattttgagaatacttcacaaatctcctttttgttctgcctctcgaaagccggttgatttatttagttcgagatgcgttgaattagttcgaattgacagtggttgttggtgaactagatcgcggactcgaaattcgggaactttttagtgttgtaagcttgcgcaggtcaatgaattgaagtatttaataactttattttgaatgaagggtttgaacataaaaaatatcttcgggaattcctttttaacaacactcattagttgttggtaactttacttgactatactggaataggataaatgccaatgttacttgactttatgagataaaactatgaagggtagaacatttagttcgtgatctaatcataatgtatttatttaattattgtttaaaagatgaatttaaaacgataagaaggctcgtatagccgaaaatagaagtaacccaaaatgcattcacttgtcgattttttaagaaacagctgatgggtgcagaaaagctagcctgacatcactgttgccttcttaaaatcagtggtgcgaaacggcgattggcaaacagctgtgattttggaacgctggccaacactcatatttgtatacgcgtaaaatcgctcagattttttgttgtgctgtggaatgttgtctaaaagtgctaattgatcggggcagatcatgtaaaactgggcgtaacccacataagctaaatgcacccgcaccagaccgcaggttgaattcgtttttccgcactcccgctcttgctaatgaacttttccgtttgcgcagtaacttttcacacggaggatgtactatccagtgggctggcccaagcgggtgggcctggcgctgcccggcgagagcgccagcatccggcacatctgctgcgacgcggtgaaaatacttgtggccgccgtgggcgacgactttctgggcatctggtacgcgaatccactcattcccattgcttatttccggcggacggaggactcccttcgccagtacggggccaaccagctgatcgtgtggaagccggactctcggcagcttgccctgcttaccgcgtccggctccctgttgttgtaccaactggact

SEQ ID NO: 41942 - DNA, 2277 bp, DROSOPHILA
tcaattcgaactaattcaacgcatctcgaactaaataaatcaaccggctttcgagaggcagaacaaaaaggagatttgtgaagtattctcaaaatgactgcattcgaagagtttggcgtgcttccggagctgggaatggccacagacgaattggactggaccctgcccaccgatgtccaggctgaggccattcctctgatcctgggtggcggcgatgtactgatggccgccgaaactggttccggaaaaacgggtgccttctgcctccccattctgcaaatcgtgtgggagaccttgcgtgatctggaggaggggaaggctggcaagggcggtgcaattggaggagctgtgactccgtggaccatgtccttcttcgaccgaggaaacgcgcttgccgtcactcctgatggtctgcgttgccagtcgcgggagttcaaggagtggcacgggtgtcgggccaccactggcgttcgcggaaagggcaagttctactttgaggccacggtaacggacgagggactgtgtcgtgtgggctggtctacacagcaggcaaacctcgatttgggcacctgtcgcatgggctttggattcggcggcaccggcaagaagtccaacaaccgccagtttgatgactacggtgaggcattcggcaaggcagatgtcatcggctgcctgctcgatttgaaaaaccaggaagtgagcttcaccaagaatggccagaacctgggcgtagccttccgcctgccggacaaccttgccaaggagaccttttacccggcggtggtgctgaagaacgccgaaatgcagtttaactttggaaagactgacttcaagtatgccccgggtaacgggttcgttggcgcttgccaggctggacccgagcatagcaaggccaatccgataaccggtcccgcagctggagcaccgtccgccaaaccggcgcctaacgcccctcaggccattatcatggagcccagcagagaattggccgagcaaacctacaaccagatcgagaagtttaaataccacctgagcaacccagaggttcgctccctgctgcttatcggtggagtgaggttggaagagcaaaaggcgcagctgatgcagggcactcacatagtggtgggcacgcccgggcggctggaggagatgatcaacagtggactggtcctgctcacccattgccgcttttttgttctggatgaggctgacgcacttctgaagcagggttacaccgagctgattgaccgtctacacaaacaaattccgaagatcacatcggatggtcgccgtctgcagatggtcgtctgctcggccacgttgcatgcatttgaggtgaagaaaatggctgagcgcctgatgcacttccccacctgggtggatctgaagggggaggatgctgtccctgagacggttcaccacgtcgtctgtctagtcgacccgcagatggacaccacctggcagtcgctgcgccaacccattggcaccgacggcgtccacgaccgtgacaacgttcatccaggcaatcattcgaaggagacgttgtcgcaggcagtcaagctgctcaagggcgaatactgtgtgcacgctatagataaacacaatatggaccgagccattatcttctgccgcaccaagcaagactgtgataacttagaaagatttctccgccagcgaggcggaaaacattactcgtgcgtctgccttcatggtgaccgaaagccgcaggagcgtaaagaaaacctggaaatgtttaagcggcaacaagtcaagtttctgatttgcacggacgtggcggctcgtggtctagacattacggggctgccgtttatgataaatgtgacgctgcccgatgacaagaccaattacgttcatcgcatcggacgtgtgggcagggcggaacgcatggggttggccattagtttggtggcaacagtgccggagaaggtttggtaccacggcgagtggtgcaagtcgcgcggccgtagctgcaacaacacaaacttaaccgaagtccgaggatgctgcatctggtacaacgaaccaaacctactggccgaagttgaggaccacttgaacatcaccatccagcaggtggacaagaccatggatgtgccagttaatgacttcgacggcaaggtcgtgtacggtcaaaagaatttaagaactggcagcggctacgaagaccacgtcgagcagctggtgccaactgtacgcaaactgacggagctagagttgcaatcacaatctttattcttgaaacgtcttaaggtctaa

SEQ ID NO: 41943 - protein, 727 aa, DROSOPHILA
MTAFEEFGVLPELGMATDELDWTLPTDVQAEAIPLILGGGDVLMAAETGSGKTGAFCLPILQIVWETLRDLEEGKAGKGGAIGGAVTPWTMSFFDRGNALAVTPDGLRCQSREFKEWHGCRATTGVRGKGKFYFEATVTDEGLCRVGWSTQQANLDLGTCRMGFGFGGTGKKSNNRQFDDYGEAFGKADVIGCLLDLKNQEVSFTKNGQNLGVAFRLPDNLAKETFYPAVVLKNAEMQFNFGKTDFKYAPGNGFVGACQAGPEHSKANPITGPAAGAPSAKPAPNAPQAIIMEPSRELAEQTYNQIEKFKYHLSNPEVRSLLLIGGVRLEEQKAQLMQGTHIVVGTPGRLEEMINSGLVLLTHCRFFVLDEADALLKQGYTELIDRLHKQIPKITSDGRRLQMVVCSATLHAFEVKKMAERLMHFPTWVDLKGEDAVPETVHHVVCLVDPQMDTTWQSLRQPIGTDGVHDRDNVHPGNHSKETLSQAVKLLKGEYCVHAIDKHNMDRAIIFCRTKQDCDNLERFLRQRGGKHYSCVCLHGDRKPQERKENLEMFKRQQVKFLICTDVAARGLDITGLPFMINVTLPDDKTNYVHRIGRVGRAERMGLAISLVATVPEKVWYHGEWCKSRGRSCNNTNLTEVRGCCIWYNEPNLLAEVEDHLNITIQQVDKTMDVPVNDFDGKVVYGQKNLRTGSGYEDHVEQLVPTVRKLTELELQSQSLFLKRLKV

SEQ ID NO: 41944 - DNA, 7128 bp, DROSOPHILA
cggtcgaagaaggacatggtccacggagtcacagctcctccaattgcaccgcccttgccagccttcccctcctccagatcacgcaaggtctcccacacgatttgcagaatggggaggcagaaggcacccgtttttccggaaccagtttcggcggccatcagtacatcgccgccacccaggatcagaggaatggcctcagcctggacatcggtgggcaggctgaaaattcataaatgtgaaggcaataggcagacagaactgttttttcttacgtccagtccaattcgtctgtggccattcccagctccggaagcacgccaaactctgcgaggcaagtcaaataagcaatgcacaccttaaatattaattttcacttaccttcgaatgcagtcattttgagaatacttcacaaatctcctttttgttctgcctctcgaaagccggttgatttatttagttcgagatgcgttgaattagttcgaattgacagtggttgttggtgaactagatcgcggactcgaaattcgggaactttttagtgttgtaagcttgcgcaggtcaatgaattgaagtatttaataactttattttgaatgaagggtttgaacataaaaaatatcttcgggaattcctttttaacaacactcattagttgttggtaactttacttgactatactggaataggataaatgccaatgttacttgactttatgagataaaactatgaagggtagaacatttagttcgtgatctaatcataatgtatttatttaattattgtttaaaagatgaatttaaaacgataagaaggctcgtatagccgaaaatagaagtaacccaaaatgcattcacttgtcgattttttaagaaacagctgatgggtgcagaaaagctagcctgacatcactgttgccttcttaaaatcagtggtgcgaaacggcgattggcaaacagctgtgattttggaacgctggccaacactcatatttgtatacgcgtaaaatcgctcagattttttgttgtgctgtggaatgttgtctaaaagtgctaattgatcggggcagatcatgtaaaactgggcgtaacccacataagctaaatgcacccgcaccagaccgcaggttgaattcgtttttccgcactcccgctcttgctaatgaacttttccgtttgcgcagtaacttttcacacggaggatgtactatccagtgggctggcccaagcgggtgggcctggcgctgcccggcgagagcgccagcatccggcacatctgctgcgacgcggtgaaaatacttgtggccgccgtgggcgacgactttctgggcatctggtacgcgaatccactcattcccattgcttatttccggcggacggaggactcccttcgccagtacggggccaaccagctgatcgtgtggaagccggactctcggcagcttgccctgcttaccgcgtccggctccctgttgttgtaccaactggacttcgaagccaacggcatgggaatcctgcagcagatagatccgcccgccgcgagcctcaaacgcgactccgccgagctgtttatcaaggaaaacataccccggctgagccttcgcgaactgtgtagcgtcaccttgggctccgtcatcaccactgtgtgctgcattagcctcagcgaattactcttggccacccagtcctgcgaactgctgcgtctgcagtggaccgaactggagcacgcagagaacgacctagagttgccagccctatcttcaattaagctgcgcgacattcccttctacgtccagcagcagcctcagcagtccgcgcgcaatgtgccgcccttgaacagggactcgtacgtagcttctctggaatactcgccgttcatcggtggctgtgcagccgtcttcagtgaccgacgagccgccttcctgattgccaaccatctaagatttgagaccgatcacatgcacggcttctgggtgccggatgttgaggatgcgagtgtctgcagtgtcaatcacaaatttcgactgttggcatatggtcaagagagctcggcggtgaaggtgtacgcaattgatgatgccaccgggggactagagttttctcatcgacttatcctcacggaaaacatactcccagacagcctgggttcagtaaacgagctaaagtggagccctgacggctgcgtccttgctgtgagttggacaaatggaggcttgtccctatggagcacattcggagcattgttaatgtctactctgagctgggatttcggccttaacgtagatttggtttgtcaaaatccactcaagatccgtcggctcgaatggtcaaccgagggttatcagctttttatgctaaaactgcatccggaaaaagacaaaagtaatgtgcttcagctgcagtttgtgaagagcgctctgagtatgaatccctgcatgacgactagtccgcacatcctgctgcagggtgacgactgcctgtaccttaaccagggcaataatctggagctaacgtatgccggaagccatggaacgtttccatcaagcggcctgggctctgacgaagacatttccggtgatggcgactgtctggagttaaaacaaagcccgcacacaggcagcattcttacggagagtaagtattggacagtgttgcagctgccgctcaactacgcggccacaaactggccaatccgatatgctgctatcgatcccgatggactccacttggcggtggctggtcgcactggactggcgcactactccctagtgacccggcgctggaagctttttggcaatgagtcgcaggagaaggacttcgttgtctctggcggcctactgtggtggcatggctttgtagtcatgggctgctattcgcttctagaccgcacggatgagttgcgttgctatccggcagattgcaaactcgacaaccaatacgggcacaagctgcaggtccgagcaccagttattagcctgaactcattccgacaccagttgattgtactcactgccgatggaatagtgagcctgttcaatatgtcgaaaaactcagcgtacgccctggatattgaatgcgcctatgaattggacgtgaagagcatttgcatccatcctgcctgcattgttagtctgactgtgactaacctcaagaatgagctaaagccccagggacagctgggtggagatcaggcagagactatcatcgtgaatgtatgcggccgcatattgatgatacagcgcgatgccggcgaacaggtatgtttgaaaaatattaattgtcgaaatgcttaaagttggagagatgcaaatcatttatacatttcatatgtgaatttaccgttatctcaaagtaaagcgaacgtcagcatgtcttctatttggaaatgtctttggttatcgagccaaccataacaaggaatttgagtatgcatcttttcaacttcgcggacaattattacgatatatcatatagcaactaaagtcaaaatctatgtttaccaaataggtcccaaacaccttgctggccacctgcctggctagctgcgttgaggtcttctggctgtcacactccctggaacgctgtgcgatgcgtgactgcctttggctttactccggtgcccacggaatgcgcgtatggcttccaatactgccgccgggaagggagcgtcgcgaaggcgagcagggcggcgcccaacgtctgcacagttttatgtcaaagcgaatcatgctgagctttccgctgaaactttatccgctcgtcgtgctctttgacaatgtgatcgttctgggggtggagaacgaaagcacgctttacgccaatgagcaggtctcccacttctctctgccgttcgccgttatggaacgcaagtcgcagatctatctgcacaaggtacttcgccaactgatcaagcggaatttgggctactctgcctgggaaatggcacagtcgtgttgctcgctaccatattttccgcacgctctggaactgcttctacacgaggttctcgaggaagaggctactagcaaacagcccatcccggatgcacagctgcccagtattctggactttataagagagtttcccgtctacttggaaacaattgttcaatgtgcccgcaaaacagagatcgccctgtggccgtacctattttcgatggctggtaaaccgaaggatttattccagatgtgtctgcagtcggagcagctggacacggctgcgagctacttgataatcctgcagaatctagaaccctctgttgttagcaagcaatatgccaccatgctgctggacattgctctacagcagcgaaagtgggagctggctaaggacttgatccggtttttaaaggctatagatccaaatgagatcgactcaccgcggtcgtcgatggtggtgaatgtgaaaattgctcctcctccccaggtgaatacacagcagcaagtgaaccagaatgcggatgcctttaacatggttctgggtcccattgccagagagagaagcttctccaccacggtgactagcaatctgcccaaagataagcaggcatctgggactcctggggttgcacctgtgaccgaaagcagcagtgcaggagcaccctcggtggtgcgccggcggtcgactaagcagcgagagacgttctgcatcgatctgatactgcagcgccatgctcgacaactacttcagaaccacaaactaatggatttaggctacatgtgtgcttatctggactttcaccttgtcagctggctttcgcaggaatcagagcgggcagccaagttggatgatttcgccggcgctctgcaggcgctacacgaagaactagatctccccattccatttccgactgcggcaaaggacgactttgctcagatacgcggcagtcttcgacagacaggaggcggtggatcttcgcaaacgtcagagtctggctattttagcttggccacgcccaatggagccgcaacacagtcgccacagctgcagccaagcattagggaagaggaggaagaactgcagcagcctagctccctaccaatacttaagacgcggtctggatcgcaactgtcgttcgataactttcgctaccgccggctgtactcgctaccgacatcagaggacgacctagccgtggatattctgcctcagaagctgtccattaagctgcgttacttgttacagctgtttatcgaggcgaactgcacggactacgcgctggttctttccattttgctccaggacgcggcttccatctcgcggattgtaaacggaataatccgaagcgaatcggttcacacctgtcgacgtacggaatctgcactcaaacagttaagtcagagcacctttgaacacagcggatctttgtaccgggggttcgtcctcaccttgcaaccgcatgtttacctgctagaacagtacatacagtctctgggggatgctccctgttcgcagctccaagatgccggcccgggtaccgagcagggcgtggacgtcagcacgggactccagggactgcagaacgaagtgggcgaatttgttccaaattcccagcaggctaacggaaaccaatggactgtggcggaccttaacccgaatcaccagcggctcacgcggcacgccagtctagagtctaacgggaacgcagtggtggccagcggttcctctgcccattcaacgcccacccagcgccaactgtcacggcagaacagccgcgagcgggagggctgtcgcctcatgtaagccgttagccgtaatccgtaatgcgagaggcgtaatccgtactccacatactcagcgcaaagacgcagatacgtactttttttgtaggtccgtggggtgaagcgttttgttgctgtagctcgttgttaaaattttttgttaattgtaagccggcgtacacactcacacagggttagagaaacaaccggatggaaactcacacgcagacaacgaagcgtcgccggctaaacaaaacaaaccgtaaaaccgtatgaagcatacgcaacgtaatccataatttagtagatgaaatttgctgcaatatttgttaattaaaattatacaaacaatatacttaaatatacaaatcaaatacaattatatttttactaataaatgaaaccatttaacaattaccacccttgtattcttaagcagctcgttcaggtgtcaattcgaactgattaattttactgcgatgaacctgaaaaccactacgaataaaataaaaaatagaaggaaattgtttttattcgaaagagaacaagaagtgaaaatcaattgccaaattctttcgtacggctttgtgataggccaacattaattcattcaatatctacattggcatctgtcagctggtgcaggaaaccggaaatagttcgtattttcaagtttccttgattttctagggatcaaaggccatgccattcaccctctgcgactattgtgacctggcggcaggttgactctgcgacaacgtcggttgtaatttgttcgcccgctgctgctgtaaaagttaatcgctgtgactgattcattacgtgccctgcttgatttggtaatgcaggtggtagttaggatggtgccaacgccgaagtgctgtccctcccagtcgagtttgtgtccgtgttgtgctgcgcttttgaagttttcctccaagttaccggattgccaattcacaacgctcgaaactcacatgcacacttctactagatacactcaggaaaataataataaataattctgaagagggccctagcaactgtcggctctcgataatcattcgaactcgttgaatgggttgctatttcattagatagattgaatttatgatacccgtatctgcataccatgtatattccatatatcatgctaaacaatttgaactatctcaagaaacagtctagacagcacctagatttttgtggagtgtggaaatccgagtctgaggatggcaaacacggcaggttacaataaaaccgtaagtcttgctgggtgtaatcactgtaatgttgcgacgcggcaggcgaagtcgcagaagttgcgagctgtgcctctcaaaagtcgaggcccccggggcgcaatatttaagttgggaagcaggaatccgtgttcagcgcatccttccgca

SEQ ID NO: 41945 - DNA, 4821 bp, DROSOPHILA
taaaatcgctcagattttttgttgtgctgtggaatgttgtctaaaagtgctaattgatcggggcagatcatgtaaaactgggcgtaacccacataagctaaatgcacccgcaccagaccgcagtaacttttcacacggaggatgtactatccagtgggctggcccaagcgggtgggcctggcgctgcccggcgagagcgccagcatccggcacatctgctgcgacgcggtgaaaatacttgtggccgccgtgggcgacgactttctgggcatctggtacgcgaatccactcattcccattgcttatttccggcggacggaggactcccttcgccagtacggggccaaccagctgatcgtgtggaagccggactctcggcagcttgccctgcttaccgcgtccggctccctgttgttgtaccaactggacttcgaagccaacggcatgggaatcctgcagcagatagatccgcccgccgcgagcctcaaacgcgactccgccgagctgtttatcaaggaaaacataccccggctgagccttcgcgaactgtgtagcgtcaccttgggctccgtcatcaccactgtgtgctgcattagcctcagcgaattactcttggccacccagtcctgcgaactgctgcgtctgcagtggaccgaactggagcacgcagagaacgacctagagttgccagccctatcttcaattaagctgcgcgacattcccttctacgtccagcagcagcctcagcagtccgcgcgcaatgtgccgcccttgaacagggactcgtacgtagcttctctggaatactcgccgttcatcggtggctgtgcagccgtcttcagtgaccgacgagccgccttcctgattgccaaccatctaagatttgagaccgatcacatgcacggcttctgggtgccggatgttgaggatgcgagtgtctgcagtgtcaatcacaaatttcgactgttggcatatggtcaagagagctcggcggtgaaggtgtacgcaattgatgatgccaccgggggactagagttttctcatcgacttatcctcacggaaaacatactcccagacagcctgggttcagtaaacgagctaaagtggagccctgacggctgcgtccttgctgtgagttggacaaatggaggcttgtccctatggagcacattcggagcattgttaatgtctactctgagctgggatttcggccttaacgtagatttggtttgtcaaaatccactcaagatccgtcggctcgaatggtcaaccgagggttatcagctttttatgctaaaactgcatccggaaaaagacaaaagtaatgtgcttcagctgcagtttgtgaagagcgctctgagtatgaatccctgcatgacgactagtccgcacatcctgctgcagggtgacgactgcctgtaccttaaccagggcaataatctggagctaacgtatgccggaagccatggaacgtttccatcaagcggcctgggctctgacgaagacatttccggtgatggcgactgtctggagttaaaacaaagcccgcacacaggcagcattcttacggagagtaagtattggacagtgttgcagctgccgctcaactacgcggccacaaactggccaatccgatatgctgctatcgatcccgatggactccacttggcggtggctggtcgcactggactggcgcactactccctagtgacccggcgctggaagctttttggcaatgagtcgcaggagaaggacttcgttgtctctggcggcctactgtggtggcatggctttgtagtcatgggctgctattcgcttctagaccgcacggatgagttgcgttgctatccggcagattgcaaactcgacaaccaatacgggcacaagctgcaggtccgagcaccagttattagcctgaactcattccgacaccagttgattgtactcactgccgatggaatagtgagcctgttcaatatgtcgaaaaactcagcgtacgccctggatattgaatgcgcctatgaattggacgtgaagagcatttgcatccatcctgcctgcattgttagtctgactgtgactaacctcaagaatgagctaaagccccagggacagctgggtggagatcaggcagagactatcatcgtgaatgtatgcggccgcatattgatgatacagcgcgatgccggcgaacaggtcccaaacaccttgctggccacctgcctggctagctgcgttgaggtcttctggctgtcacactccctggaacgctgtgcgatgcgtgactgcctttggctttactccggtgcccacggaatgcgcgtatggcttccaatactgccgccgggaagggagcgtcgcgaaggcgagcagggcggcgcccaacgtctgcacagttttatgtcaaagcgaatcatgctgagctttccgctgaaactttatccgctcgtcgtgctctttgacaatgtgatcgttctgggggtggagaacgaaagcacgctttacgccaatgagcaggtctcccacttctctctgccgttcgccgttatggaacgcaagtcgcagatctatctgcacaaggtacttcgccaactgatcaagcggaatttgggctactctgcctgggaaatggcacagtcgtgttgctcgctaccatattttccgcacgctctggaactgcttctacacgaggttctcgaggaagaggctactagcaaacagcccatcccggatgcacagctgcccagtattctggactttataagagagtttcccgtctacttggaaacaattgttcaatgtgcccgcaaaacagagatcgccctgtggccgtacctattttcgatggctggtaaaccgaaggatttattccagatgtgtctgcagtcggagcagctggacacggctgcgagctacttgataatcctgcagaatctagaaccctctgttgttagcaagcaatatgccaccatgctgctggacattgctctacagcagcgaaagtgggagctggctaaggacttgatccggtttttaaaggctatagatccaaatgagatcgactcaccgcggtcgtcgatggtggtgaatgtgaaaattgctcctcctccccaggtgaatacacagcagcaagtgaaccagaatgcggatgcctttaacatggttctgggtcccattgccagagagagaagcttctccaccacggtgactagcaatctgcccaaagataagcaggcatctgggactcctggggttgcacctgtgaccgaaagcagcagtgcaggagcaccctcggtggtgcgccggcggtcgactaagcagcgagagacgttctgcatcgatctgatactgcagcgccatgctcgacaactacttcagaaccacaaactaatggatttaggctacatgtgtgcttatctggactttcaccttgtcagctggctttcgcaggaatcagagcgggcagccaagttggatgatttcgccggcgctctgcaggcgctacacgaagaactagatctccccattccatttccgactgcggcaaaggacgactttgctcagatacgcggcagtcttcgacagacaggaggcggtggatcttcgcaaacgtcagagtctggctattttagcttggccacgcccaatggagccgcaacacagtcgccacagctgcagccaagcattagggaagaggaggaagaactgcagcagcctagctccctaccaatacttaagacgcggtctggatcgcaactgtcgttcgataactttcgctaccgccggctgtactcgctaccgacatcagaggacgacctagccgtggatattctgcctcagaagctgtccattaagctgcgttacttgttacagctgtttatcgaggcgaactgcacggactacgcgctggttctttccattttgctccaggacgcggcttccatctcgcggattgtaaacggaataatccgaagcgaatcggttcacacctgtcgacgtacggaatctgcactcaaacagttaagtcagagcacctttgaacacagcggatctttgtaccgggggttcgtcctcaccttgcaaccgcatgtttacctgctagaacagtacatacagtctctgggggatgctccctgttcgcagctccaagatgccggcccgggtaccgagcagggcgtggacgtcagcacgggactccagggactgcagaacgaagtgggcgaatttgttccaaattcccagcaggctaacggaaaccaatggactgtggcggaccttaacccgaatcaccagcggctcacgcggcacgccagtctagagtctaacgggaacgcagtggtggccagcggttcctctgcccattcaacgcccacccagcgccaactgtcacggcagaacagccgcgagcgggagggctgtcgcctcatgtaagccgttagccgtaatccgtaatgcgagaggcgtaatccgtactccacatactcagcgcaaagacgcagatacgtactttttttgtaggtccgtggggtgaagcgttttgttgctgtagctcgttgttaaaattttttgttaattgtaagccggcgtacacactcacacagggttagagaaacaaccggatggaaactcacacgcagacaacgaagcgtcgccggctaaacaaaacaaaccgtaaaaccgtatgaagcatacgcaacgtaatccataatttagtagatgaaatttgctgcaatatttgttaattaaaattatacaaacaatatacttaaatatacaaatcaaatacaattatatttttactaataaatgaaaccatttaac

SEQ ID NO: 41946 - protein, 1429 aa, DROSOPHILA
MYYPVGWPKRVGLALPGESASIRHICCDAVKILVAAVGDDFLGIWYANPLIPIAYFRRTEDSLRQYGANQLIVWKPDSRQLALLTASGSLLLYQLDFEANGMGILQQIDPPAASLKRDSAELFIKENIPRLSLRELCSVTLGSVITTVCCISLSELLLATQSCELLRLQWTELEHAENDLELPALSSIKLRDIPFYVQQQPQQSARNVPPLNRDSYVASLEYSPFIGGCAAVFSDRRAAFLIANHLRFETDHMHGFWVPDVEDASVCSVNHKFRLLAYGQESSAVKVYAIDDATGGLEFSHRLILTENILPDSLGSVNELKWSPDGCVLAVSWTNGGLSLWSTFGALLMSTLSWDFGLNVDLVCQNPLKIRRLEWSTEGYQLFMLKLHPEKDKSNVLQLQFVKSALSMNPCMTTSPHILLQGDDCLYLNQGNNLELTYAGSHGTFPSSGLGSDEDISGDGDCLELKQSPHTGSILTESKYWTVLQLPLNYAATNWPIRYAAIDPDGLHLAVAGRTGLAHYSLVTRRWKLFGNESQEKDFVVSGGLLWWHGFVVMGCYSLLDRTDELRCYPADCKLDNQYGHKLQVRAPVISLNSFRHQLIVLTADGIVSLFNMSKNSAYALDIECAYELDVKSICIHPACIVSLTVTNLKNELKPQGQLGGDQAETIIVNVCGRILMIQRDAGEQVPNTLLATCLASCVEVFWLSHSLERCAMRDCLWLYSGAHGMRVWLPILPPGRERREGEQGGAQRLHSFMSKRIMLSFPLKLYPLVVLFDNVIVLGVENESTLYANEQVSHFSLPFAVMERKSQIYLHKVLRQLIKRNLGYSAWEMAQSCCSLPYFPHALELLLHEVLEEEATSKQPIPDAQLPSILDFIREFPVYLETIVQCARKTEIALWPYLFSMAGKPKDLFQMCLQSEQLDTAASYLIILQNLEPSVVSKQYATMLLDIALQQRKWELAKDLIRFLKAIDPNEIDSPRSSMVVNVKIAPPPQVNTQQQVNQNADAFNMVLGPIARERSFSTTVTSNLPKDKQASGTPGVAPVTESSSAGAPSVVRRRSTKQRETFCIDLILQRHARQLLQNHKLMDLGYMCAYLDFHLVSWLSQESERAAKLDDFAGALQALHEELDLPIPFPTAAKDDFAQIRGSLRQTGGGGSSQTSESGYFSLATPNGAATQSPQLQPSIREEEEELQQPSSLPILKTRSGSQLSFDNFRYRRLYSLPTSEDDLAVDILPQKLSIKLRYLLQLFIEANCTDYALVLSILLQDAASISRIVNGIIRSESVHTCRRTESALKQLSQSTFEHSGSLYRGFVLTLQPHVYLLEQYIQSLGDAPCSQLQDAGPGTEQGVDVSTGLQGLQNEVGEFVPNSQQANGNQWTVADLNPNHQRLTRHASLESNGNAVVASGSSAHSTPTQRQLSRQNSREREGCRLM

SEQ ID NO: 41947 - DNA, 7734 bp, DROSOPHILA
catggaggaccgcatgaaagagttccttgctctggccagttcttccctactgcgcttgggccaggagtccgacaaagaggcgacacggaaccgagagtccatctatttgctgctggacgaaatcgtcaaacaatcgcccttcctcacaatggatctgcttgagtcctgctttccctacgtgcttatacgcaacgcgtaccatggcgtatacaagcaggaacagatcttagggctggcactctaaatggagccgatctgtgtattccacataatgcttatgtagtttatccgccgatcgactatcgatcactatgctaatctaacatactttaaaactgttaaacatacccaaatgtattctagactctgcatttttatactcgtacgacttcgaataaagtgcttatacaacccaaataagtatcccacattaataagctgtctctagatcggatcggtatgtatattctttatttcggcttattgaaatatgtgtccactcccgcgaacgtgcagctcctccgcttcaatttctgttaaatttcatttggacacatgcgcacacgtgtgtgtatattaaatatgagtttgggggaaaaatcttccgcaatattaaattatttggtcacgttcaatgttactttgtaggcttgtgtacaaatacttgtaggcaagtagtaaaatatgttttcgttattttgtaatatgatttctcagtagttatcattggtagtatttaaatttcgattttgagttttcaattccgatacaaagacttttatgcaatgatttattattgtttttaattctttttgaattacatgatctgggataggttctttttcacggatggttaaatgataagttttgcaaaccgaaatcgggtaagtagggcatcttttcaaatctgctcgtaatcaacataggcctaaacatctacaaatgggttcggttaaatgtaccaaaatcactacactctgctaaaaagctgtcaatatttgagtttacatctgtatttgtgaacattctcgatatctacaatggggtttcgttaattatacacatacttgcttattaatattatagaaggtattgttatttatgtgatgctgaatattttgctagttcgtacaatctatttagcatttctcactgatttggttttacttggtttcgcatgaaaatgtattccttttcagtcagtcagtttaggcatctgttgactaaaaattgtcgtcattgtcttttgtttttgtttctcagttaataaaaaatatatgtgtatatgtatgtatatacttatatgcacgtcgtcgaaataaaacttgaaaaacatttgcgctacttctctcgtttgcttttgtcgttaaaagtaaaatcgcttctttagtaattacattttaaagctctcaagtacaaaaattaaaaagcttaaaaaattcgacgcggaacgcccccacatcgtccgcatttcgtaagtgtaaaatgtgtgtgcttcgatcgagtcctttaatgctagctcctcatcccattttcctgctacctcctctttatggcaaattgtttgcatataaaagttaagcctagaaatacaatacgagtacgaaatacgtatgttatgtatgcaatattttactgtgcctatgcctgtgtctctctggctgtctagtcactccatgagcctcttagacgaactcctcctgctccaaccacggatgctgcaggcactccgctgccgacgcccgtataaccggattgtactcaagcatgggcagcagaaagtcggagaacttcttggcctccaccgggtcccagtcgtacttctccaccagcacgttcattagactccagggcttcagcttggtgatgttcctcaggctacctgcaaatgggaatcaacaggggtcacacatcacacaccattccttgagctaaattcgatttgatacctaccatagctggtgaagtacttcagcccgtgcttaccgcggaagatcaccgactgcggtatggagcccagcagctccacaatatgcgccaagtggtcctcgtcccgactgtaagactctccggcgtgagggtcgaacaggtagtcgccggtggccagctcgaaggccaaacaggctgtgctccagatgtcggcggtataattgtacggcgctcccaaaagaacctcgattgatcgatactggcgagtctgaatgtcctcagtaaagtgatggtactgagaattcatagaaagccgaaaacggacttattacttttgaaaaccatgtgcggggtcgtgtttccgaccttaaaaggtatatattctcggtcaggattactagaagagtttatctggccatgtccttctgccttgcaatttctattgatatgccaaaacattttgcccactctaatgcctacaaaccacaaaaaactgtcacgccctcaattcggaaaattatccctcccacgtccactatttaggtagacctgatttcttgaaattttctgatttgcattttctatagacaattggtcccattctaataaaataaaaaccgtaatagaataatggcaaaaaattggtttataccgaatcggaagaatctaaagtacaaataactccataccccctttaaagtaaagtaaaagggttcactagaatcattgaaaagtatgtaacaggtagagtgaagtgttattttggatgccatatagccatgttcgtttgttcttctgtccgtatgaactactcgatctcaggacctataaaagctcgaatgttgagattaggctgattccagatgttgccaataatcaaaactgccacgcgcaaataaaacaattttggatattgaaattttctagtttgcattcctgattatgaatatacatacatatatactttattgagtcatactgagtcataatctacgagtgaaatcatgatgatgtgtttatctgacgcgaaaatatatatatttgaagctttaagcatctaaaaggatactcacgtcgtagcaggcgttccccaagtcggcgatctttacccgaacgttgctgttgtcaatgagcgactggatcgtgtaggtgttgttctggctactctgactctggttctgcgaaggaatggcattagcatggacatttagtttagcgattgctgttgtcgttgtcgcggttgttgttgttgcggaggatatcgcattggatgttgttgttgttgatgtgcttgttgttttatgatcgccatcatagaactcggctgatgttgtacaggttgtactggtagccggagctgttgcagaaggagctatttgcgtgaacgagggcgtgcacgtgctggggggcgtggcagaggctaaggcaggggcggaggaaggagtggcacttggaggggcacttggtgtggaggctgttgtggtgttcgtgttggtgaaacagtattcgttggtcgatgtcaaggacgtgcacgtgctcagaatattcgagttgatcttggacttagctatcgtggctgtgttgtgggaggggcaggagctattggtggagttcggggtgggctgctgcatcgtgtttgtatagcagtgtgttgcatacatgtaaattggttcacacaaagaaaggaagaaaaagaatacacaatgttggtttgcttctttgaaggtttatctagttggtgcaattaacgaaacacaaacgacgtggcagtcaacgctcggattgcgtgtcgaaaccctagcggtgattgccacggattactctcccagtgatatgctgagttggacatgccactggaggtttaatatagaaatgcctctacaataataagttacaataaaaacattttagcctaaacacatttcaatcatatatgtaggtgtggccaaagaagttcaatggaattcatttctattgtgagtagctaataacaaatagggtaaaatgttaatttaaatttaaagtatgatgcattgcgaatctattaacatatacatttataatttatgcataattcactgtacattactcaatggcgttttatcttatctcgaaaattacaaatagctatcattatttttagaaccatttgaactttttcacttctgtagccacagatccatgagaacaccaataagatgtgtatgcaattagcaggtagcaatgcaaacgttaagcacatgacaagaacccgttacagacacataaaaagatggccatgcccacaatcaatcaagcatttggcgtttcgatccaggaaataattgccttgaaaaagcatgtgggttaagtgtgtgtgaggctgagagacaacaaattcaaacgaaaagcgataatccaaaacgttaagtaaacagcagagaggcggatttgcccccaaataacaacacatataatccaaagtggaacagattatccagcggttctttctaatgaccgggctatcactaacaactatcccgcatccaacccactttacctctgggatcggtccttcacttggctcgggtacggtgttgggcttggaatcgagttcgggttcgggatcgagatcggtgggcgaatccatggtgctcgccaaggtgctctgctcgcccagcgtgtcggactcggcatcttcgtcgcaatccccagaagactgatacgagtgtcaaaccaaaggcaaagataacgcgaaaataaaatgaaacaaaagtaaaacgtaagaatttcgtgttcctttggtgtgcagtgtgtgtttgcaggtgggctcacaatgtggagagtgcaaatgctttccatgcacaccacaacgtatatgtaatcctggccagtgctttcgagtgtggggcaggggcgacctgtttgaaagcaatcttaccttggcagtgattttcttctccgttcggtagcggttgtttatgttcgctgatccgccgaggcctccgttgcactcgctgtcccccaacagactggagtacttggaggccagcgatgatgtggtgttggaattgagcgtggacgaggtggttgtcgtggtgtcctccttgtccagcgtggacatgatcacggcggccagcggagtcgacgaattggaattggtcgccgtgctattgctagtgttagtgttggtgttggtcgatccatttggctcgatcagtggccacttggcccgcgacttggtctgcttctcgatggagctgactaagggtggaacgcattagccattggcaactcaacttggatactgatactcactgtacgagtcggggaagtcgacacccttcacgcgcagactgttgatctcatcgtcgatctgctggttcatcgcggcggcattatcgatcaccagcaggatgttctccggcttaatgtccgtgtgtatgatgctacacttgctgtgcaggtagtccagtccctccaaaacctggcggattatgttacgcacctgagcgatggccagaccctggtagttgttcttcactatcagcttatacaagctgcagcccagggcctcgaaaaccaggcaggtgtgcattccattcacaccgcgcacagtgaagtggttcatcagccgcacgatcctctcccgcttaacgtccatggggtctgcgtcacggatagcttccaggagccggatctcgtccgctgccgtctctatgtaatgcggagcactcttaacaaccttgagggccacgtacttctcatctctggggaaagcatgaagtttgaaagagcttgttttatggtaagttcgacatttcatcacatacttgagatcccggcatagccagacagtggaaaaatggccccagcccagttttctgaccactcgaaaccggttgtcaaatatgtctccgatgactactggatggtatccaccgcggcaatactgagaggcgtcttcctgctcctcgtctgaaacgtaaagactgctgtcggacgaatccgggtaaatttcgtcggtcgtactgagggtcccccggggctccgatctgtaaagaaaaaaaggtttggccattagttgacaaggaacaatacatgttttaaaatgtaaactctgtgagaattcccgttgcaacccacttaagctcgatatattcgacttcctcttccttgaccggctccgccaactgaggcagtcttatcgtgagcggcagttcccgcggcggcaagtaggtatccaggattatttccccgggggtaacgggctcaaagggtagagcagcgtgacgatggtgctttggtcgcttagactgatggcgcaaggcaataaggatcggcccggcggacacgcagttgcgcttctttgtaaaccgcttgcggcgcttcttctcctcaacctctagcagagcctccgtcgcggcttcttgggcagctcgcttctcttgctcggagacgaagttgaagtcgcagctcagctcttttgccacgtccggagtggggttcagcggccgctcaactgcgtatccacagctccacagccgcagcaggtgcatcaggaagaggaagagcattaacaggctgccctgcagcacacccataaaaatcggatcctggccgagagtacccaggatgtgccggcttagaagatgcagcctgccggctagtgatagcagcatgtgtaggcggttcatgtagccaagatagagatccaaccagtggtccagcagggtcactcgccaatcgatgctgaacgtggcattggcctgcatggggcaggtggcctcttccaagtcggatgcggtcgagccaaagtcatccatttctgattcgattcactgctcgattcgacaattggatttccgattagaccttcgcgaattcatggcaactgggcgcagtaacaggggatggctgtgggcgtgcgtgtagggggtggcgaccttgactttcgtagacccccacttgcatcacggacaccgccgaacgagtttggtcgaacacaaacaccacgctgcacacactctccttacataacagtggcccgagcggggtaaataaataaaatatatcgcacggcggaaaatctgaaatatgaaaagtatctgtatctgtatctgcgcgagtatctttcctcgctcgtccgattcgttcagttgcgtccgcgagaatgtcggaatggcttttcgcttttgtttttgccgcctcttcctgagcggccaaggcgcagccgtttccaactcgcgagtatttctgttctgcttttttgtttctttttttttttttgtcacaactaagtttagtcttcgcccgctcacagtccggcagggggtgaggtgtgtggatcacctagaacccatgcccgccgatagttttccttagagtgatacactgcgagaacacttccttacaaagcagttaggtcgcagtctttggccaacagataccttctactttacaggatcgtaatttagtggcttcgtaaataactaaataaaaactgaaagacaggtgtattcgtatataaatatttttttactgagtatgaaatggttgctttgtgggcaattctgatgagaaatacttattcaaaaaagttggatattttgtaaatgaataattttatgcgccgtgtattttgctggcgtcattatccaatgtacttcatcaagtcgatgtcgtggcgctgctcgttgttcgctgcctttgccggtcatggactgcactacaccaggaaagagtccaccaaatgagcacacactcatgcggggccatgcccgtcaacatcatcgtcatcatcgagtgcttcgagatttcttaggc

SEQ ID NO: 41948 - DNA, 3419 bp, DROSOPHILA
atggatgactttggctcgaccgcatccgacttggaagaggccacctgccccatgcaggccaatgccacgttcagcatcgattggcgagtgaccctgctggaccactggttggatctctatcttggctacatgaaccgcctacacatgctgctatcactagccggcaggctgcatcttctaagccggcacatcctgggtactctcggccaggatccgatttttatgggtgtgctgcagggcagcctgttaatgctcttcctcttcctgatgcacctgctgcggctgtggagctgtggatacgcagttgagcggccgctgaaccccactccggacgtggcaaaagagctgagctgcgacttcaacttcgtctccgagcaagagaagcgagctgcccaagaagccgcgacggaggctctgctagaggttgaggagaagaagcgccgcaagcggtttacaaagaagcgcaactgcgtgtccgccgggccgatccttattgccttgcgccatcagtctaagcgaccaaagcaccatcgtcacgctgctctaccctttgagcccgttacccccggggaaataatcctggatacctacttgccgccgcgggaactgccgctcacgataagactgcctcagttggcggagccggtcaaggaagaggaagtcgaatatatcgagcttaaatcggagccccgggggaccctcagtacgaccgacgaaatttacccggattcgtccgacagcagtctttacgtttcagacgaggagcaggaagacgcctctcagtattgccgcggtggataccatccagtagtcatcggagacatatttgacaaccggtttcgagtggtcagaaaactgggctggggccatttttccactgtctggctatgccgggatctcaaagatgagaagtacgtggccctcaaggttgttaagagtgctccgcattacatagagacggcagcggacgagatccggctcctggaagctatccgtgacgcagaccccatggacgttaagcgggagaggatcgtgcggctgatgaaccacttcactgtgcgcggtgtgaatggaatgcacacctgcctggttttcgaggccctgggctgcagcttgtataagctgatagtgaagaacaactaccagggtctggccatcgctcaggtgcgtaacataatccgccaggttttggagggactggactacctgcacagcaagtgtagcatcatacacacggacattaagccggagaacatcctgctggtgatcgataatgccgccgcgatgaaccagcagatcgacgatgagatcaacagtctgcgcgtgaagggtgtcgacttccccgactcgtacatcagctccatcgagaagcagaccaagtcgcgggccaagtggccactgatcgagccaaatggatcgaccaacaccaacactaacactagcaatagcacggcgaccaattccaattcgtcgactccgctggccgccgtgatcatgtccacgctggacaaggaggacaccacgacaaccacctcgtccacgctcaattccaacaccacatcatcgctggcctccaagtactccagtctgttgggggacagcgagtgcaacggaggcctcggcggatcagcgaacataaacaaccgctaccgaacggagaagaaaatcactgccaagtcttctggggattgcgacgaagatgccgagtccgacacgctgggcgagcagagcaccttggcgagcaccatggattcgcccaccgatctcgatcccgaacccgaactcgattccaagcccaacaccgtacccgagccaaccacgatagctaagtccaagatcaactcgaatattctgagcacgtgcacgtccttgacatcgaccaacgaatactgtttcaccaacacgaacaccacaacagcctccacaccaagtgcccctccaagtgccactccttcctccgcccctgccttagcctctgccacgccccccagcacgtgcacgccctcgttcacgcaaatagctccttctgcaacagctccggctaccagtacaacctgtacaacatcagccgagttctatgatggcgatcataaaacaacaagcacatcaacaacaacaacatccaatgcgatatcctccgcaacaacaacaaccgcgacaacgacaacagcaatcgctaaactaaatgtccatgctaatgccattccttcgcagaaccagagtcagagtagccagaacaacacctacacgatccagtcgctcattgacaacagcaacgttcgggtaaagatcgccgacttggggaacgcctgctacgactaccatcactttactgaggacattcagactcgccagtatcgatcaatcgaggttcttttgggagcgccgtacaattataccgccgacatctggagcacagcctgtttggccttcgagctggccaccggcgactacctgttcgaccctcacgccggagagtcttacagtcgggacgaggaccacttggcgcatattgtggagctgctgggctccataccgcagtcggtgatcttccgcggtaagcacgggctgaagtacttcaccagctatggtagcctgaggaacatcaccaagctgaagccctggagtctaatgaacgtgctggtggagaagtacgactgggacccggtggaggccaagaagttctccgactttctgctgcccatgcttgagtacaatccggttatacgggcgtcggcagcggagtgcctgcagcatccgtggttggagcaggaggagttcgtctaagaggctcatggagtgactagacagccagagagacacaggcataggcacagcttaacttttatatgcaaacaatttgccataaagaggaggtagcaggaaaatgggatgaggagctagcattaaaggactcgatcgaagcacacacattttacacttacgaaatgcggacgatgtgggggcgttccgcgtcgaattttttaagctttttaatttttgtacttgagagctttaaaatgtaattactaaagaagcgattttacttttaacgacaaaagcaaacgagagaagtagcgcaaatgtttttcaagttttatttcgacgacgtgcatataagtatatacatacatatacacatatattttttattaactgagaaacaaaaacaaaagacaatgacgacaatttttagtcaacagatgcctaaactgactgactgaaaaggaatacattttcatgcgaaaccaagtaaaaccaaatcagtgagaaatgctaaatagattgtacgaactagcaaaatattcagcatcacataaataacaataccttctataatattaataagcaagtatgtgtataattaacgaaaccccattgtagatatcgagaatgttcacaaatacagatgtaaactc

SEQ ID NO: 41949 - protein, 880 aa, DROSOPHILA
MLLSLAGRLHLLSRHILGTLGQDPIFMGVLQGSLLMLFLFLMHLLRLWSCGYAVERPLNPTPDVAKELSCDFNFVSEQEKRAAQEAATEALLEVEEKKRRKRFTKKRNCVSAGPILIALRHQSKRPKHHRHAALPFEPVTPGEIILDTYLPPRELPLTIRLPQLAEPVKEEEVEYIELKSEPRGTLSTTDEIYPDSSDSSLYVSDEEQEDASQYCRGGYHPVVIGDIFDNRFRVVRKLGWGHFSTVWLCRDLKDEKYVALKVVKSAPHYIETAADEIRLLEAIRDADPMDVKRERIVRLMNHFTVRGVNGMHTCLVFEALGCSLYKLIVKNNYQGLAIAQVRNIIRQVLEGLDYLHSKCSIIHTDIKPENILLVIDNAAAMNQQIDDEINSLRVKGVDFPDSYISSIEKQTKSRAKWPLIEPNGSTNTNTNTSNSTATNSNSSTPLAAVIMSTLDKEDTTTTTSSTLNSNTTSSLASKYSSLLGDSECNGGLGGSANINNRYRTEKKITAKSSGDCDEDAESDTLGEQSTLASTMDSPTDLDPEPELDSKPNTVPEPTTIAKSKINSNILSTCTSLTSTNEYCFTNTNTTTASTPSAPPSATPSSAPALASATPPSTCTPSFTQIAPSATAPATSTTCTTSAEFYDGDHKTTSTSTTTTSNAISSATTTTATTTTAIAKLNVHANAIPSQNQSQSSQNNTYTIQSLIDNSNVRVKIADLGNACYDYHHFTEDIQTRQYRSIEVLLGAPYNYTADIWSTACLAFELATGDYLFDPHAGESYSRDEDHLAHIVELLGSIPQSVIFRGKHGLKYFTSYGSLRNITKLKPWSLMNVLVEKYDWDPVEAKKFSDFLLPMLEYNPVIRASAAECLQHPWLEQEEFV

SEQ ID NO: 41950 - DNA, 7246 bp, DROSOPHILA
gaaccggtcgtagaagttgctccagcactggaagacctggtatggccccgacacccaactcaggctgcattaacttgcggcgcctctgatcagaacgttgcttctgctcgtcctcattggcgaactcatcacgcgtgcgaatgccttgcggtgcgatgccaaactcgcccagatcctcctggtccataaagtcttccggtttcagctgagcctttgacgacgcccgctcgccccgcgaacttttaaaggtctgcggcgtccagccctccagtgagccaaccgtgttccagaagcccgcactgaagccgccggtgaaggctccatggaatctccgctttccattttcgtccttcacaatttgatcctcgatggccactggctttttagccggcacaacatctgtaaaagaggttttaatggtattgggaaagctgataaatatttattacagtactcacccttttgcaaggctggcagcggagttccaaatcggtgtaaatgctcctcctcgtccattctatgctacaaattccatatattagcgaaacaatttgtttggtctgggcgccagtgagtgcacaccacattacagatgacagctgactggagtgttcgcctatcggtcacgttttgctgaaaactgtgaccggaactttaatacgaaattattaaaaaaaattaaaacaagaaataagctaatttattgaaatactaaaatactaaagttttaaaattaaaaataaaaaactacagtaatactttaaaaaatgttacaaattatgttaatgttaatttttaaagccggcggcttacttgtctgaactaaattattaaaataccgtttacttaattatttatcaatctggtattaaaaaaaaacttgtgaagaaataataagcaatatttcaattactattgatgtttaactgaccattgcaatcacggctttgagtagcgatattatttgcaatccgacaggtgagttctgccatctctagttcaaccgcacggtcacatttaagacattgcaaatattttagaggaactatttcgttgcaattttcagctgcctgcaacggaaatacagtgcaaatggtaagcgcaacggcggtgacaaagaaaggcacacctatccgattggaaaaccaggtaaataccgagaataagaccagaacgggagtcgcgacagactggagctacctgtgctgcctgtatgggtgactaatgatgtcaacattttctgttttctctcctcaagccgacggccatttttggctagctaagacgtgattattggcccgaaagcacaagaagtgcagcgcagtaagtaggctggcattccgtgtccagggaacccgataaccacagctccattcccaacgaacagcaatcataagtacatcagttatacccacatcctggtctcatacacgcacacaaacacagcgagagcgagatgtccgagaaaaacctgaaagtgggcgcccgggtcgagctgaccggcaaggatctgcttggcacggttgcctacgtggggatgaccagcttcgccgtcggcaagtgggtgggcgtcgtgctggacgagccgaagggcaaaaacagcggctccatcaagggccagcagtacttccagtgcgatgagaactgtggcatgtttgtgcgacccacgcagctgcgtctgctggaggctgctcctggcagcaggcgcagcatcgaggatgtcagcggggctacgcccacggctgcccaacccacaaaggcgcggctgagcagctctcgcacctcgctctcctccagtcgccaatcgctgctgggttcccgcacccagttgaccacttctctgagtgaacgcactgcctccagcagcagtattggcccgaggaaatctttggcgccgcaaaacagcaaggataaggagtcccccagcacttcattggcagaaggagccccagcagcaagcggtggcaacggtgccgcttcgcatgcctcctccaaacgggcttccttcgtggagacgggcttccttgaaattcttaagccgcagttcacgccttcccagccactgcgatcgccctctttcaccatgccctccaactccggtgctgaagacaaggtcgccctgctggaggcacagaaaacgagcgccgagctgcaggctcagctggctgatctcaccgagaagctggaaactttaaagcagcgcaggaacgaggataaagaaaggttgcgggagttcgacaagatgaagattcagtttgagcagcttcaagagtttcgaacgaaaatcatgggtgctcaggcttcgcttcagaaggagttactgcgcgccaaacaggaggccaaggatgcaatcgaggccaaggagcagcatgctcaggaaatggcagatctggcagacaatgtggagatgatcacgctggacaaggaaatggccgaggagaaggccgacacgctgcagctggagctagagtcctccaaggagcgtattgaagagttggaggtagatctggagctcttacgctcggagatgcaaaacaaggccgaatctgccatcggaaatatttctggcggcggcgattcgccgggcctctctacttatgaattcaaacagctggagcaacagaacattcgtttgaaggaaacactagtgcgtctgagggatctatctgctcacgacaagcacgacatccaaaagttgagcaaggaactggagatgaagcgctctgaagtcaccgaactggagcgcaccaaggagaagcttagtgccaagattgatgaactggaggccatagtcgccgacttgcaggtaagcaattaaggattagttttcaattcaagtgctcactgcccaccctcaattggcttacccacattccgatgaaaaatttcacggcttttccagcaccttattggcttgcattagtttggctttcgttatactctgcttttctatatcagattaaactgcctattaataagaagatatcggctaaaagctttatcaactaggcaattttaacttatgaactgtaggttttccttgcaacgctttctttaattgcctaattaagtgcacacttattaagctgtgttaacatctctaggcatttttaaccgatatctttagtttacatgtgtaatatgttttgcataaggtcaatctaaagataaactttttcattgcatttctttttgccggcctgcctttaaacctaataattatcgcggttcaaggaggtaaattgtgtaatttcaacttttcccctgccaaaatttcaatcatattcctgtatagtttcgtttttaaattaaatttaaaaacgaagaaactaaatatatttattttgtcccaggaacaagtcgatgctgcacttggtgccgaggaaatggtggagcagctggctgaaaagaaaatggaattggaagacaaagtaaaactgctcgaggaggaaattgcccaattggaggccttggaggaagtgcacgaacagctggtggagagtaaccacgaactggagcttgatctgcgcgaggaattggatctcgccaatggggccaaaaaggaggtgctgcgagagcgggatgctgccattgaaaccatctatgatcgcgaccaaactatcgttaagtttagggaactggtacagaagctaaacgaccaactaactgagttaagggatcgcaattctagcaacgaaaaggagtcgttgcaggatcccagtttgaaaatggtcaccgaaaccatcgactacaaacaaatgttcgccgaatccaaggcttacactcgcgccatcgacgttcaactgcgccagattgagctgagccaggccaatgagcatgtccagatgcttaccgccttcatgcctgagtcattcatgagtcgcggtggcgatcacgactcaatccttgtgattctgctaatttcacgaattgtctttaagtgcgacattgttgtttcgcaaacgagagagcgtttcccaccagtggatgcgattaccagggaggcggtgacccaaggccatgccgtccagcagtatgccttcaagtgtcgcctgttgcactacgtccacagcctgcagtgtgcccttcaccagatcctctacggactcaacagttgtcaaccggacacactcctgagagccggaagttccctgcccgaaatggtggctcaagaaaagatagtggacggtattatcgaactgctgaaatccaaccagctggacgagaacagtaccacggataatattgagaaatgtgtggccttcttcaatgccatgaactccgtacttctagccggtgaacagctcctcaacgagattcagatgatccgggactgcgtggcctccttgggagcagcttgtgagagcattctcagcgacacggccattgcaaaggtgatcattcaagaggcgggcgccaccagcgattcagtgctgctgatccagttccttaacgagaacatggaaagcgtgcggcagcaagttaagttgatcaagcgtcgcctgccaagcgatcagcacgtgattaagagcggtctatcgcagcacaaggtggaggcgatgcgtggtctagcccagaacatcagtcgcatcatgtcggcgatgcaccaggccaccaagcagtcgctcgccgccattgtttccaccatcgagagcgacaatgcagcggagcacactctgccccaggagaagtactgggccctgttgaccgcctcctgcgagcgtatttacgaacaggatgatcgcggaccgacacagaactttaagaccttgctggcgcaagcaaactccgatcttcagctcattgcccaacatcttctggacaaggagtacgacatcatttctgcagccaataatgccagtaatcagcagaaatcgggtgcccacagcacgcccattactcagagggcgcagctaatcaagaaacaactggagcagaagaacgtgctggccgccacgctagagaatcgcgaggcggacgtcaaacagctgaaggttgcagccaagatgaagcagaacgaattgagcgagatgcagatccgaaaggatctagcggagaagaagctaagcgtactgcaaaacgagtacgagcacgcggtcgacaagtggaagcagaagtacgaggaaacctccttgcagctgcagcttaaggagaaggagtttgaggagacgatggaccacctgcaaagcgatatcgatgcgctggagagcgagaagagcgatctacgcgacaagctgaagctgaactcgactacaggcaaggttcagcccggctcggaatcccactccccgcacaatatatcgctatcaggcaacacgtccactgctccgggcatcagcaatgtatcctactctgctcctgccggcactgctccagtggtggccgaggaagtggagttgctgaagaacgccttcaaccaggagcgcaaccaacgactgcgtctgcaggcacaggatatgcgtgccaagttgtcccagtttgagcccctgcatgtgcctcagccacaggatcagcgcataaccgctttggaatccgagctgaccaggatgaagcacgcctgggtattgtcgctgctgcaggtgcgctcgcaggattcagtgaattccggtacacgtatcgacgccgtggcactccaaaggcgcaaccagccagttccactcaagggcgagatcagctcgaaggcttcccagctggcctccgacatcctgacggagtatctgcaaaggaaaccccatcgtgcaactcacggacagttcgcctcctttcccaccgtcgatgtgaagcgcgtgctgcagatctaaaaaggatcgtgtatcgtggcaatggaatcggggtcaggggcaatctgaataggatagaattttatttgtactgctagcacaatttcggatccctcgcacaagcagcttagtccaaaatccaataacacagctcctcaagactccctgctcctgtgatgtgacctaaacaagttagctaaacgaagagcaactgagaaattataattctacacttaatttatgttttttgtataaagattataaacctattgtaaaactaactttgtgtttaactccaacaaagcctgtttctgatactaaactcaagcgaactaataccggtattatctatgaagtctatagcaggggagaactatgtgaaagacataactaaaccagagaaacaaatctaatttgcatacgtgagaataaatagtatattatatattaaaggtaaatatattttgctgatgttgtataactcaaactgaagtggcattttaattgggattagggtaatttataataaaagtaaaattgttactctattgggctaaaaaaaaacagttaattaatgttcttaaaatataggtgaggtttagtggaataaatataattaaagaagtaacaaactacctatacctacaatttctaaagtattgctaatcacttcaagatttacaaatttccttgctaagcagaatgacattctcatttcacatcgttttagataatttccctaatttaatttaatcacaattggccaagctcagtttaattttctagattcaagtggaagacgtttaagccaagcaaagaaccataaacaagcatgcgatccacttaaaatccaccagcgaaaagagagtttcgtgctcttaacatttaattttaagagaatttgtattttttgtaagtttcatttccgttcgcttgcttgcccaacaacaagtacaaacgcaatatgcttcaatgccgctcggttgcagcaacaacaacggtgctagcagcaatgacaacaacagctgcaatagcaagaaactattacattagaccaggccataaaccatgatggccaaaatagccacctccccccctccaccaacctgccactgggcaatcagcaaacccttctgcttgaaatgtaaattgaaaataattttcattttctggctttttccttgccatcgccactgcccctttgactgaccgaccgggccagaaatcggtgcttcttttgaccccattctgtggcttgacctctcgagcttaggttttctcatggggcagcaagaaatgaataggaaaacatttgcaattacaaataaccacattctccattttaattattaaaataattttttatataaatagttaccgcaagcccttttttacatttatgttttagtttaaccagcgtaacctatagctaaatggaatataagaatctaaaatgaaattatacg

SEQ ID NO: 41951 - DNA, 4524 bp, DROSOPHILA
caaccgcacggtcacatttaagacattgcaaatattttagaggaactatttcgttgcaattttcagctgcctgcaacggaaatacagtgcaaatggtaagcgcaacggcggtgacaaagaaaggcacacctatccgattggaaaaccagctaagacgtgattattggcccgaaagcacaagaagtgcagcgcactccattcccaacgaacagcaatcataagtacatcagttatacccacatcctggtctcatacacgcacacaaacacagcgagagcgagatgtccgagaaaaacctgaaagtgggcgcccgggtcgagctgaccggcaaggatctgcttggcacggttgcctacgtggggatgaccagcttcgccgtcggcaagtgggtgggcgtcgtgctggacgagccgaagggcaaaaacagcggctccatcaagggccagcagtacttccagtgcgatgagaactgtggcatgtttgtgcgacccacgcagctgcgtctgctggaggctgctcctggcagcaggcgcagcatcgaggatgtcagcggggctacgcccacggctgcccaacccacaaaggcgcggctgagcagctctcgcacctcgctctcctccagtcgccaatcgctgctgggttcccgcacccagttgaccacttctctgagtgaacgcactgcctccagcagcagtattggcccgaggaaatctttggcgccgcaaaacagcaaggataaggagtcccccagcacttcattggcagaaggagccccagcagcaagcggtggcaacggtgccgcttcgcatgcctcctccaaacgggcttccttcgtggagacgggcttccttgaaattcttaagccgcagttcacgccttcccagccactgcgatcgccctctttcaccatgccctccaactccggtgctgaagacaaggtcgccctgctggaggcacagaaaacgagcgccgagctgcaggctcagctggctgatctcaccgagaagctggaaactttaaagcagcgcaggaacgaggataaagaaaggttgcgggagttcgacaagatgaagattcagtttgagcagcttcaagagtttcgaacgaaaatcatgggtgctcaggcttcgcttcagaaggagttactgcgcgccaaacaggaggccaaggatgcaatcgaggccaaggagcagcatgctcaggaaatggcagatctggcagacaatgtggagatgatcacgctggacaaggaaatggccgaggagaaggccgacacgctgcagctggagctagagtcctccaaggagcgtattgaagagttggaggtagatctggagctcttacgctcggagatgcaaaacaaggccgaatctgccatcggaaatatttctggcggcggcgattcgccgggcctctctacttatgaattcaaacagctggagcaacagaacattcgtttgaaggaaacactagtgcgtctgagggatctatctgctcacgacaagcacgacatccaaaagttgagcaaggaactggagatgaagcgctctgaagtcaccgaactggagcgcaccaaggagaagcttagtgccaagattgatgaactggaggccatagtcgccgacttgcaggaacaagtcgatgctgcacttggtgccgaggaaatggtggagcagctggctgaaaagaaaatggaattggaagacaaagtaaaactgctcgaggaggaaattgcccaattggaggccttggaggaagtgcacgaacagctggtggagagtaaccacgaactggagcttgatctgcgcgaggaattggatctcgccaatggggccaaaaaggaggtgctgcgagagcgggatgctgccattgaaaccatctatgatcgcgaccaaactatcgttaagtttagggaactggtacagaagctaaacgaccaactaactgagttaagggatcgcaattctagcaacgaaaaggagtcgttgcaggatcccagtttgaaaatggtcaccgaaaccatcgactacaaacaaatgttcgccgaatccaaggcttacactcgcgccatcgacgttcaactgcgccagattgagctgagccaggccaatgagcatgtccagatgcttaccgccttcatgcctgagtcattcatgagtcgcggtggcgatcacgactcaatccttgtgattctgctaatttcacgaattgtctttaagtgcgacattgttgtttcgcaaacgagagagcgtttcccaccagtggatgcgattaccagggaggcggtgacccaaggccatgccgtccagcagtatgccttcaagtgtcgcctgttgcactacgtccacagcctgcagtgtgcccttcaccagatcctctacggactcaacagttgtcaaccggacacactcctgagagccggaagttccctgcccgaaatggtggctcaagaaaagatagtggacggtattatcgaactgctgaaatccaaccagctggacgagaacagtaccacggataatattgagaaatgtgtggccttcttcaatgccatgaactccgtacttctagccggtgaacagctcctcaacgagattcagatgatccgggactgcgtggcctccttgggagcagcttgtgagagcattctcagcgacacggccattgcaaaggtgatcattcaagaggcgggcgccaccagcgattcagtgctgctgatccagttccttaacgagaacatggaaagcgtgcggcagcaagttaagttgatcaagcgtcgcctgccaagcgatcagcacgtgattaagagcggtctatcgcagcacaaggtggaggcgatgcgtggtctagcccagaacatcagtcgcatcatgtcggcgatgcaccaggccaccaagcagtcgctcgccgccattgtttccaccatcgagagcgacaatgcagcggagcacactctgccccaggagaagtactgggccctgttgaccgcctcctgcgagcgtatttacgaacaggatgatcgcggaccgacacagaactttaagaccttgctggcgcaagcaaactccgatcttcagctcattgcccaacatcttctggacaaggagtacgacatcatttctgcagccaataatgccagtaatcagcagaaatcgggtgcccacagcacgcccattactcagagggcgcagctaatcaagaaacaactggagcagaagaacgtgctggccgccacgctagagaatcgcgaggcggacgtcaaacagctgaaggttgcagccaagatgaagcagaacgaattgagcgagatgcagatccgaaaggatctagcggagaagaagctaagcgtactgcaaaacgagtacgagcacgcggtcgacaagtggaagcagaagtacgaggaaacctccttgcagctgcagcttaaggagaaggagtttgaggagacgatggaccacctgcaaagcgatatcgatgcgctggagagcgagaagagcgatctacgcgacaagctgaagctgaactcgactacaggcaaggttcagcccggctcggaatcccactccccgcacaatatatcgctatcaggcaacacgtccactgctccgggcatcagcaatgtatcctactctgctcctgccggcactgctccagtggtggccgaggaagtggagttgctgaagaacgccttcaaccaggagcgcaaccaacgactgcgtctgcaggcacaggatatgcgtgccaagttgtcccagtttgagcccctgcatgtgcctcagccacaggatcagcgcataaccgctttggaatccgagctgaccaggatgaagcacgcctgggtattgtcgctgctgcaggtgcgctcgcaggattcagtgaattccggtacacgtatcgacgccgtggcactccaaaggcgcaaccagccagttccactcaagggcgagatcagctcgaaggcttcccagctggcctccgacatcctgacggagtatctgcaaaggaaaccccatcgtgcaactcacggacagttcgcctcctttcccaccgtcgatgtgaagcgcgtgctgcagatctaaaaaggatcgtgtatcgtggcaatggaatcggggtcaggggcaatctgaataggatagaattttatttgtactgctagcacaatttcggatccctcgcacaagcagcttagtccaaaatccaataacacagctcctcaagactccctgctcctgtgatgtgacctaaacaagttagctaaacgaagagcaactgagaaattataattctacacttaatttatgttttttgtataaagattataaacctattgtaaaactaactttgtgtttaactccaacaaagcctgtttctgatactaaactcaagcgaactaataccggtattatctatgaagtctatagcaggggagaactatgtgaaagacataactaaaccagagaaacaaatctaatttgcatacgtgagaataaatagtatattatatattaaaggtaaatatatttt

SEQ ID NO: 41952 - protein, 1265 aa, DROSOPHILA
MSEKNLKVGARVELTGKDLLGTVAYVGMTSFAVGKWVGVVLDEPKGKNSGSIKGQQYFQCDENCGMFVRPTQLRLLEAAPGSRRSIEDVSGATPTAAQPTKARLSSSRTSLSSSRQSLLGSRTQLTTSLSERTASSSSIGPRKSLAPQNSKDKESPSTSLAEGAPAASGGNGAASHASSKRASFVETGFLEILKPQFTPSQPLRSPSFTMPSNSGAEDKVALLEAQKTSAELQAQLADLTEKLETLKQRRNEDKERLREFDKMKIQFEQLQEFRTKIMGAQASLQKELLRAKQEAKDAIEAKEQHAQEMADLADNVEMITLDKEMAEEKADTLQLELESSKERIEELEVDLELLRSEMQNKAESAIGNISGGGDSPGLSTYEFKQLEQQNIRLKETLVRLRDLSAHDKHDIQKLSKELEMKRSEVTELERTKEKLSAKIDELEAIVADLQEQVDAALGAEEMVEQLAEKKMELEDKVKLLEEEIAQLEALEEVHEQLVESNHELELDLREELDLANGAKKEVLRERDAAIETIYDRDQTIVKFRELVQKLNDQLTELRDRNSSNEKESLQDPSLKMVTETIDYKQMFAESKAYTRAIDVQLRQIELSQANEHVQMLTAFMPESFMSRGGDHDSILVILLISRIVFKCDIVVSQTRERFPPVDAITREAVTQGHAVQQYAFKCRLLHYVHSLQCALHQILYGLNSCQPDTLLRAGSSLPEMVAQEKIVDGIIELLKSNQLDENSTTDNIEKCVAFFNAMNSVLLAGEQLLNEIQMIRDCVASLGAACESILSDTAIAKVIIQEAGATSDSVLLIQFLNENMESVRQQVKLIKRRLPSDQHVIKSGLSQHKVEAMRGLAQNISRIMSAMHQATKQSLAAIVSTIESDNAAEHTLPQEKYWALLTASCERIYEQDDRGPTQNFKTLLAQANSDLQLIAQHLLDKEYDIISAANNASNQQKSGAHSTPITQRAQLIKKQLEQKNVLAATLENREADVKQLKVAAKMKQNELSEMQIRKDLAEKKLSVLQNEYEHAVDKWKQKYEETSLQLQLKEKEFEETMDHLQSDIDALESEKSDLRDKLKLNSTTGKVQPGSESHSPHNISLSGNTSTAPGISNVSYSAPAGTAPVVAEEVELLKNAFNQERNQRLRLQAQDMRAKLSQFEPLHVPQPQDQRITALESELTRMKHAWVLSLLQVRSQDSVNSGTRIDAVALQRRNQPVPLKGEISSKASQLASDILTEYLQRKPHRATHGQFASFPTVDVKRVLQI

SEQ ID NO: 41953 - DNA, 2878 bp, DROSOPHILA
gtttgttcacctcctgccgtttctcctgcttctgctgcagcttggcctccgcctttcctagtttcttggagtccactttctgttaaaataagaatagtttagttgttatttaatgaaagtcgtattgatggcgccgttcattcagtttattggagtggttcgtcaaggggaacacttacattggcgccatctttgttggccacccagatgctttgcatatccttgtccagccgctccatgttcttggccatctcctcgatgttgaccggcgcgttgagaacctttcgctccacgttgacctcgttgttcttcatgatgttgaggaactgctcgcaaagcgtacgtacactctcctccgacctatcacagtcgacgctctgcaggatgtcgcccaccgcttcgaagatgtcatcgccgctttcgaagtcctcctcgcctggcaattggaatttgtgtgcggggtaaagaataaaagatcacaggctagtgcaaggcacttacttccggtgagcacgccaacgacataggtgagcagctcgtggtcgattttgggaaactcgcgctgcagaatgcttgtgtactcgctcatcttgaccttgatcgcaaattcgctttctggacgtgtggcagtcggcttttaattgacttttccgacttttattccaccgcaaacgaaaactaaaggggatagcagagtgaccgttgctgggtcgactaagcatatttcagagatggtcacactgctttacttctaatatttttccctactatatatttttaaatatcagatttattttttccagcagttttagcaccatcaaaatttcacctgattaacaaagaatttccagtttagtttagtttgttgttcattttttcaatcacttcattgtacagtgtgaacgtctctcagggtgaccaaagaaatcccagctgttttcacagttatcgaccgtgtgacagctctgttatgttagcaaccactgttaatcgaattgcataaaattccaattctcttttgcaagattacttgtgaaacgattaaaaaaggcaatatgctaagcaaaacggggttaattggcgccttggtgcgtagatccttcggcaccagtcagatgttgcgagagacgatcaagaaccacgagccaaacaatctggagcgccgtatgttggtttggaccggcaaatacaagtcgcagtccgagattcccaatttcgttaggtaagtgccgattcttagagagcaaatgcaacaggtgtctaagttttggtgtcaaaacttgcagtcaggatgtcatggagcgctgccgcaacaaaatgcgcatccgcctggccaacataatgatcgcactcaccgccgtgggatgcgccattatggtgtacagtggcaagcaggccgccaagaaaggagaatccgtcacaaagatgaatctcgagtggcacaaacagtttaatgactctcagcagagcgaaggatctgctccggccgccaaatagaaaatcactccgaaatccctcactcgcctagtaatattagaactggccaggcttccattttcacttccaaagaagattggctaaaactggccttaaaagattttgctaataatcagttggtctgaagattgttgaaaatttttctttttaaatttagatttttatttttgatttgaatgtgtgcgttcaactaaaaaaattcataattatcccaattggcccataaactatggaatggaaaatgtttgcagggccaaatctttagtgaattttttggcttggaaagcactttgccataagcatgtgtacaagccgtgtccttgatagatattcagtgatatttgtaatgttgtattatcaaaaataaaacatatttattgcaaatcatgtttgggtgcgctgggtgaaccaaattaatattaagatttggtcatgtttttataaataaattataaattaactataattaattaaactatacattttggagatacaattcggtttcaagtaactttctttttcgattatattcgattcaaaacagtataaaggtttgctaagtgtgggtaacaggtaaggggctaataaactatagatcctgtgaaaaatgcatggctatcgactgcgactgaattgtgatatccttgatatgaatccattgatatgtggtattagccataaatatttgatcatagttcattcggaaggcaacatgaacatctgtttcgattctgcatcgtcttcagaggccagtggccaccacttgctcgtcgaagtgcgccgacgccgtgagcatctcgctgctgtcccggattctggttcggatttgggttcggactcgcatgctccgagtgaaactaccgactgtcggaggcgctggcgcttttgcatttacttttcactttcagtttgtcgaaaactgtttgtctgaacgcccccaagaaaacgccgagcggagcaaaaagcgggacgcagtttgggccaagttttttgtggcccccgtgcgtgcagaaaaggctgaaaaagtgtcagaaaaattgtttttccaaaaacagacaggggccagcatcgaatttcccggatcgaaagcgtggaaaatgtacacgcagtagtgcggaaaatgtgcggctaacgaaaggaggaacggatgaggtgggaaaagtgtaagaggcgagaagtgtaaaatgcaataaaacgaaaggcgtgcgtatgtatgtgtaaacagttttccccaatttcccagcgaaatgcgggcagatgatggacgatagtcaacaggagtataaaaagcaattgtttaatcaaacatcagcgaaagcagattgccttcccagaaaatccataaaaaatgagagattttccctgtctgtctctcttgttc

SEQ ID NO: 41954 - DNA, 814 bp, DROSOPHILA
taaaattccaattctcttttgcaagattacttgtgaaacgattaaaaaaggcaatatgctaagcaaaacggggttaattggcgccttggtgcgtagatccttcggcaccagtcagatgttgcgagagacgatcaagaaccacgagccaaacaatctggagcgccgtatgttggtttggaccggcaaatacaagtcgcagtccgagattcccaatttcgttagtcaggatgtcatggagcgctgccgcaacaaaatgcgcatccgcctggccaacataatgatcgcactcaccgccgtgggatgcgccattatggtgtacagtggcaagcaggccgccaagaaaggagaatccgtcacaaagatgaatctcgagtggcacaaacagtttaatgactctcagcagagcgaaggatctgctccggccgccaaatagaaaatcactccgaaatccctcactcgcctagtaatattagaactggccaggcttccattttcacttccaaagaagattggctaaaactggccttaaaagattttgctaataatcagttggtctgaagattgttgaaaatttttctttttaaatttagatttttatttttgatttgaatgtgtgcgttcaactaaaaaaattcataattatcccaattggcccataaactatggaatggaaaatgtttgcagggccaaatctttagtgaattttttggcttggaaagcactttgccataagcatgtgtacaagccgtgtccttgatagatattcagtgatatttgtaatgttgtattatcaaaaataaaacatatttattgc

SEQ ID NO: 41955 - protein, 125 aa, DROSOPHILA
MLSKTGLIGALVRRSFGTSQMLRETIKNHEPNNLERRMLVWTGKYKSQSEIPNFVSQDVMERCRNKMRIRLANIMIALTAVGCAIMVYSGKQAAKKGESVTKMNLEWHKQFNDSQQSEGSAPAAK

SEQ ID NO: 41956 - DNA, 8075 bp, DROSOPHILA
ccagatttatgataatatttatgctttgagaaaatcggagaatccagcagacaatactacgagtatttgggattccccataaactttagaattcgattgaagtgaatttcaaacaattggatgcatttaatttaaatgtgggcggttttaattcgattcagcgaaccctaaccgattgctttactatacacttggtctctgggaatttgtgggggatttaagggtaatcttgggtctttgtttacaacaaattggaaaatttctgcacaagcattagtcattaaataaatattttcaaatatgtgcttaaaaatagattatacgagtttttgcatttctgttctgtctttctgggaatttttatttacaacaacaattattaaatggtacttgcttcgaaatagggcacaaacattttcactaacaaccattaaagatctcaagatattagtcggtcttaagtttggcaaataaagtgctcaacttgcagcaaaatattcgcttctcagtattttgtgtgtgagctgtgagcgtgttttaaaaacttttcgtagaattaaaactctcatacattgcgaccccttttccttcgcaaacttgtgctaaagtgcggcgaactttttcactttcttgcagtgctgcacatcaacataactggagaacacgagaaacttttcatatccccgcagtgaacgataaaagcaaaagtagcagcagccacagcaaaatgacagcaataagttcaagcaataaaacacagctagccagaagttgcaaacatgcactcgcagcacaataaggacgggtggcggtcgaaagctttaaaataggagttaatcaccggactctccatcccgcagagcgcccggtacacccgggacaccccaataaactgccaaataatataggatattagccagccggtggacggaacccagcgaggagcgcaagaaagaagccctactgtcagccgggacactgaaacattccaccccatagcatggcctcggtcgccgcttggctgcccttcgcccgggcggcggccatcgggtgggtgccgatagccacccacccactgccaccgcccccgatgcccaaggatcgccgcaaaacggacgacgagaagctcctgatcaacgtctccgggcggcgtttcgagacgtggcggaatactttggagaagtatccggacacccttttaggtacgcatacgtaatatagtactcaaggtactaaaagcggtttaaccccttataaatacaagcttcaatataaaaacaggaaaactattaagactttgttaattaaacttaagtttactaaaacctttgattactaatcccatactctttgggcagcagggcaatatttatagcattaacaattctactttgtacgcagagctaaaaacgaataaaatgctttgttcatcttgatgccagcatcattttgtttaatagtttatacagtttacagacgattggctgtataataaattattcattctgcataataaaaaacctttcagtaaattcaggaaaatcgaataaaaaatgttcttgaaaatgcttctctctacatatgtatatatatatcaaatttattgtataacattttcatatatgtatcttttccttaaaagaaaagcataattgctcccaagaacatgttcagatatttacaagtgccaatattcctatattaccaactgtaaacaagctttattaactttttaaaccactagtaccactgaatttatttccattaatattgattatattcaggttccaatgaaagggagttcttctacgacgaggactgcaaagaatacttcttcgatcgggacccggacatcttccggcacatactgaactactaccggacgggcaagctgcactacccgaagcacgaatgcctcaccagctacgacgaggagctggccttctttggaataatgccggatgtcattggcgattgctgctacgaggactaccgggaccggaagcgggagaacgcggagcggctgatggacgacaagctgtcggagaacggggatcagaatctgcagcagctgaccaacatgcgccagaagatgtggcgggccttcgagaatccgcacacgtcgacgagcgccctggtgttctactatgttacgggtttcttcatcgccgtctccgtgatggccaacgtggtggagacggtgccgtgtggccaccggccgggcagagcgggaactctgccctgcggcgagcgctacaagatcgtcttcttctgcctggataccgcctgcgtgatgatctttacggcggagtacctacttcgactcttcgccgcccccgatcgctgcaagttcgtgcgctcggtgatgagcattattgatgtggtggccattatgccgtactacattggcctcgggatcaccgacaacgacgacgtgagcggtgctttcgtcacgctgcgcgtgttccgtgtcttccgcatattcaagttctcgcgccactcgcaaggacttcggatcctcggctacacgctcaagtcctgcgccagcgaactgggcttccttgtcttctcgctggccatggccattatcatctttgccaccgtcatgttctacgccgagaagaacgtcaatggcaccaacttcacatcgattccggcggccttctggtataccatcgtcacaatgacgacgctggggtgagtttattcagagtgataatacatgtgtgtgttcccattactttctcatgccaattgaaagggatagatttcccattgccttatctaatcttattctgaaatctttccatccgtcgcagatatggcgacatggtgccagagacaatagctggcaaaattgtgggcggcgtctgctcgcttagcggtgtgctggtcatcgccttacctgtacctgttatcgtatcgaactttagtagaatctatcaccagaaccagcgagcggacaagcgcaaggcgcagcgggtaagaaaaggctatctggggaatcccgaggaatccgttagtgtcacaagaactttagactggaattaccagtaattatagttacagatttggccagcaggttctgtgacactgatattaaatcggtgaaaattttatctgggagccagtgaaagtcatccatttttccgtgtgcatcccaactaaatgccacccaccacccgcaaatactcattatgtgttatgaccttgcagaaagctcgcctggcgcgcatccgcattgccaaggcctcgtccggagccgcctttgttagcaagaagaaggccgccgaggcccggtgggctgcccaggagtcgggcatcgagctggatgacaactatcgggacgaggacatcttcgagctgcagcaccatcatttgctgcgatgtctggagaagacaacggtgcgtatacgcaatgtgcgaggcagctttgtccttcgctgtgcagctatctctatctctctgtatacatactcgtacatgtgatatacgtattattgtcactcgattgcgcgctcagtgtttttgaacttatgatttgaacttatcatttcttactacctctcgaatcacactctgtctctatacatttttcgtttctactccgtgacagatgtagcaacatttgaacatctcagttgtagtcagaaattgtaaggtttgccacgagctcattaggaaagcaatgacaacggcatcaacgagagcgacacccacagccaaaaaaacatcaacggtggcgacagcaatatcagcaagtggcaggacgaaggatatgttgttgggcgttttagaactgacgcgtcttctcataaatcaaaataatagtcaaaaatcgcagaaagccaagagaaaaagaaactgaactgaaatgcgaatattcagcatcttttgtatgtgcattttgttaagcgttttagttttatcgatttatttgaatatgttttctgtacattattatggtatttatcgtttttgtgtgcgatctgttgtatttcgttctaagttatatattctaagttcaccatttgtgtcatgtttttcacacgatctgagcccgaaactggcttcgaaaataagcaaatataaaacatagaaataaaaagcaatgaatatcaatgtctatgctctgaaaaaaagcgaatataaataaattcgccaaagtaagtgctttcggtttgtatttaagttccgttctttcttcaatctttctctaacccctctccctccatctctctctctctctctttatacctttctcgttctatctaacctcgttcatgtttacgcgttgtacttaatttttatgatttccaattttcaattttaatttcttctttgttgattgtcgattgttttttgttgatttcaaataccctctggcattagagaacgattcgtgttgaatgctatgcgctgtattctgttttaagttcctcgaataggtcattaccgaacagaatcggttcgaacaatatgcgaatgctcccccacatgctatcaagaaatttccaaaacgcccatttagccatatgcaatcgattgctgtcaacaaacaggccagaaaccatatcaaaatctaaacattttaaatgcccaaaggggctcatcaagtgaggcgaagtatcggcacgaacaattcaaagtcactaagtggatatgaaaaccccattaaagcacacaatttgtaaggcctaatttatcgagagtaaattcccattttccattaaatggctcagcattaactatttttttatgagcacaattcatattccattcaaaatagttcttggccagctcactgtgctattttcgaagacaaaaatttgtttaaaagttaggaaaacaacactattgtttaagaataatgaaaacatggacagaaaataatatggatggtaatggagtttttttaaggaaaaacttgttatgcaattataaatactgcagtttttaaacaaatctaaataaattaataagtttcagaattgtcatatcagcttttactaatatgaattaaaatgtttaatgtactatacacttaatagaattgacaaaacttttcagtgattctcactctgctttcataatcgattattatgcaccattaccatctttattttgtatgtgtgctagtcataaccataagcaatttcacttgatgagctcttaaattctctactaaaagcagcaaatcaataaaacagcgttttgtcataaatcgagaatcggttagaagcggccataaatgtggtcgcgttttgagccaaagtcgcactcgaatgtcgctggctggcgcttgctttccattcgtaccgctctgccacgcccccgccaccgcccatgcccaccgaaccgccccgcatttaccgctctcgttctgctaagtgactgcccgcccgctgcctcgccccctggctgtttcgataaaaagtttgttctcatagtgttttcgtacaattgtcattgcttaggagccgcaaaataagaaaaacaaaaaaacaaaacaagaaaatcacccaatttcccattaacaaattgtagcgttcaaatgtttataacttgcccccccccttacataaaccagcttaatgttttaattgttgtttaaactcgaaggggctaaaaacgctcgctcttcccctttctcctcaccccctccacctttccaagtatttgtttatgcgtatgtacttgaacccaattcttaagtcctgtgttttgtgtgtgtaaaaccccgctccccctcccaagatttctatattgtaaaattgttgaaaaaaaagaaaagaaaagaaaaacattgtactctatgtattcttcgtttctctttgtaaaattcttctctggctgtacctctcaatgctcaaaaaccgcaggatcgagaatttgtcgagttagaaataccgtttaacggccagcccaagaggccgggctccccgtccccgatggccagtcccgcccactcgacaaacagtgccgccggcctgctgcagtcctgctgcggccgatgctgctcccagcgctaccaggtaagctatacgcccccacataccctgtacggagagagaagtgcggaagttaccgccgtccggcactcgaggggttgagtgcccccagcaggtgggtccaaaaccgctttccgtaacccctctctctttattagtactatataccgtttgtgtgtgttgactttgttgcctctgttggtcttgtactcttgtaaattttcacatctcaccttcggaagaactaaaacatcctcgaggatatcacttgggggcatcttagggaaattaacatgattttggtgcccctagtcattaaactttcattataaaattcatttctaaattcatttcaatgtactataaatactcaggtcggataaatgcagatggtaatcatgacaaaactaaatatatcggtgctcctctaggatatgcacttttcctatgtcaaatatatagtgttttacatcaaaaagtatgctatgagtcttgcacttacagatttagtaagggtgtagatgctatgtagaatgtatggtgtaaatatcagtcaaaaatgtaacttctttccgaaaatgttgataatatattaaacaaaatgttgtaaatataaattctttaagtgcagtcaaatatatggagctctttattgtattaaaatgtatatagtaacgtaatttgattcaaatgtaaaataaacaatgtcctttcctttatatatacatatattttatatttctttaaaatatttatatacgagacagcaaaatcgtagaatatatattcaaatttctcagtgcgcatccttaagaatgttttgagtctgataggaggctggaatcttgatccagcttctgttttagttttaggcacatcatgctattctggagctatcattaatcatgtaaactctgaccccgagcctttatattaccgctttctggtctgttctcgtttctatttaggcctgcggcaagtacatgccggctgccagcaatgctcagaatagccaaaacaatcagcccatggatggcacctacctggtggaggcctcgttctgagccggcggcagcaggttggcgtcgagatgcacatcctcggccagggaggcagtcacatcccaatccagatcgagatgatttacgtttacgtttagtctaacttaaaaagtttttaaactaaattgaattcgttttgtagacatgtcgtgtgtgtttagtcgccaaatataaaaattgatggacccgaggaatatctgaagccgaaatacaactgtaatctctaaaatctgattttcgagtttaacgagcaaaatatttaattaaatgcaagcacttgcagactcaaatgaaagcaacgccgaatgtgtaatgtattgtatgatgaagggcacattaaaataaaacaagtaacaaatgaagtatgtaaaagtgcccaacccagattctgcggcggcaaagtcggatttgattagcgaggacccgttaatgaaaaaaacccaaatattaattataaaaatatgcaacactatttactttatttaggtgacaagacaacaacagcaaacaacagaaaccgaagcattttagaggaatttactgtgtatgttttaataacgtgaacataaagtagcatagcaggcgaaatagtttgaagaaagtactaaagagatttagctaataataggatctataactgacgagaagggcagagtccaaaaaccaattgaacaaaatccgaacacaataaggaacattttaatagcaaacgatttgtgtgtagccaggaaacgaacaaggaacgaaagtttgctagaaaattatgaagatattaatacgaattcgtgtattttttaagtggtccgtagtttagtaggtatgatcttcatcccctactccccttttttttctcatcgacaatgatctcttagtcagcattaacgcatttgtgtgacaacctcattttcccctaaaaaactatgtatatgtgtgtacagcaaagaggtttcagttcgtcattcaacatttcccatcctttttccgaagtactccaaagtgaact

SEQ ID NO: 41957 - DNA, 1716 bp, DROSOPHILA
atggcctcggtcgccgcttggctgcccttcgcccgggcggcggccatcgggtgggtgccgatagccacccacccactgccaccgcccccgatgcccaaggatcgccgcaaaacggacgacgagaagctcctgatcaacgtctccgggcggcgtttcgagacgtggcggaatactttggagaagtatccggacacccttttaggttccaatgaaagggagttcttctacgacgaggactgcaaagaatacttcttcgatcgggacccggacatcttccggcacatactgaactactaccggacgggcaagctgcactacccgaagcacgaatgcctcaccagctacgacgaggagctggccttctttggaataatgccggatgtcattggcgattgctgctacgaggactaccgggaccggaagcgggagaacgcggagcggctgatggacgacaagctgtcggagaacggggatcagaatctgcagcagctgaccaacatgcgccagaagatgtggcgggccttcgagaatccgcacacgtcgacgagcgccctggtgttctactatgttacgggtttcttcatcgccgtctccgtgatggccaacgtggtggagacggtgccgtgtggccaccggccgggcagagcgggaactctgccctgcggcgagcgctacaagatcgtcttcttctgcctggataccgcctgcgtgatgatctttacggcggagtacctacttcgactcttcgccgcccccgatcgctgcaagttcgtgcgctcggtgatgagcattattgatgtggtggccattatgccgtactacattggcctcgggatcaccgacaacgacgacgtgagcggtgctttcgtcacgctgcgcgtgttccgtgtcttccgcatattcaagttctcgcgccactcgcaaggacttcggatcctcggctacacgctcaagtcctgcgccagcgaactgggcttccttgtcttctcgctggccatggccattatcatctttgccaccgtcatgttctacgccgagaagaacgtcaatggcaccaacttcacatcgattccggcggccttctggtataccatcgtcacaatgacgacgctgggatatggcgacatggtgccagagacaatagctggcaaaattgtgggcggcgtctgctcgcttagcggtgtgctggtcatcgccttacctgtacctgttatcgtatcgaactttagtagaatctatcaccagaaccagcgagcggacaagcgcaaggcgcagcggaaagctcgcctggcgcgcatccgcattgccaaggcctcgtccggagccgcctttgttagcaagaagaaggccgccgaggcccggtgggctgcccaggagtcgggcatcgagctggatgacaactatcgggacgaggacatcttcgagctgcagcaccatcatttgctgcgatgtctggagaagacaacggatcgagaatttgtcgagttagaaataccgtttaacggccagcccaagaggccgggctccccgtccccgatggccagtcccgcccactcgacaaacagtgccgccggcctgctgcagtcctgctgcggccgatgctgctcccagcgctaccaggcctgcggcaagtacatgccggctgccagcaatgctcagaatagccaaaacaatcagcccatggatggcacctacctggtggaggcctcgttctga

SEQ ID NO: 41958 - protein, 571 aa, DROSOPHILA
MASVAAWLPFARAAAIGWVPIATHPLPPPPMPKDRRKTDDEKLLINVSGRRFETWRNTLEKYPDTLLGSNEREFFYDEDCKEYFFDRDPDIFRHILNYYRTGKLHYPKHECLTSYDEELAFFGIMPDVIGDCCYEDYRDRKRENAERLMDDKLSENGDQNLQQLTNMRQKMWRAFENPHTSTSALVFYYVTGFFIAVSVMANVVETVPCGHRPGRAGTLPCGERYKIVFFCLDTACVMIFTAEYLLRLFAAPDRCKFVRSVMSIIDVVAIMPYYIGLGITDNDDVSGAFVTLRVFRVFRIFKFSRHSQGLRILGYTLKSCASELGFLVFSLAMAIIIFATVMFYAEKNVNGTNFTSIPAAFWYTIVTMTTLGYGDMVPETIAGKIVGGVCSLSGVLVIALPVPVIVSNFSRIYHQNQRADKRKAQRKARLARIRIAKASSGAAFVSKKKAAEARWAAQESGIELDDNYRDEDIFELQHHHLLRCLEKTTDREFVELEIPFNGQPKRPGSPSPMASPAHSTNSAAGLLQSCCGRCCSQRYQACGKYMPAASNAQNSQNNQPMDGTYLVEASF

SEQ ID NO: 41959 - DNA, 10837 bp, DROSOPHILA
ttttataagttcagcaatgaaaatagactaaaagtgtctcattcacgagaccctaatggaaggcctaattgatttacatatgtcaggggagcaccctcacataaaagaaatgcgtgggcagacacataaaaccaaaacccactcacaaatgagtcgagtggtgaataatgtcccatattcaattgagtgcggaagaggcccttataaatctgtgtgtgaaatatcttttataataaaaaacaatttaactaataataccaattctagttcgtaaggctataaatattgaactgaacagaccagaggctataacctatcgacttcgataagataaatatttaaaaagctgagacggaaaaagtgtttgccaaactccttgaaattcacttgagcgccacgaggctcagtgggaaatttgattttgggagatgggatgcttcccgtgcatgtgatcatgtctcgaggggctgacacccgttttgacttttgtcaccgccagtggcgccaaaactaatcaaagcaactaggaccgacgctaaatcgaaaccacaactacaatcactgcggaataccaaaatgcaatcaaaatatgcaagccacgtcgatcaggagagagagagagagtgagagagagaccggggctattctagaaacctaacgcgagttcagaacgctgaattatgtataccctttaaagtactaacagagcagaaaacttaactgttttatgtggtcgttcattagtagtaaaaatgggatgattttattttattctgctttactgttatttctgttttctgtttttatatactggcctcttgaatatataacattctgataacattacaaacgctccactaacatgtctatatgtcttggaagggaattcaaacaaccaatctctctctttttctttttctctctctctctttttctgtcgccccgatcaagtcttaacggcaagttgcagcaacaaacattttcattcgttttcgcatcgtcgaagcgtacggttcataggaggaacggaacgaagcggggaacgcgacggaaactagttgctgtttttttgtccgtgttaaataattgacacaagaaaatttagctacacttaagcaaagtccgcgaaaaatctattaaaaatcgttcgtcgttttgtgtgtgtgaccacgaaaaaagtgccccgatcggaggattttaataaattcaattaaggttccgtcccaacgatcgtttttcattgtctgacgctcacgcgtgatgtacaaatgaaaaagtaaaaatttaaataagatcaaagaaagaaagatcccagtaaaatttaaagtggattgactgcacaagaaaaagaaaagttccttacctcctagccagaagtcaaaagtgaagcggaaaacagagtggagataacaattaacggttagttgtaaagctaaaactacacaataaacatatcatgaaaaactttataaaacataagaaggggggcattttattattttgggtatcagcatttacatcaccttgtttcgaatcaaactgattttaacatgcatttggaccaaactaacaacgtttcgaatgttatctcttatggaaatggtattgctatattataccatcattaattccgattccacctgagattagcaattaatatgaaatttcataaacatatattatatattcggatcatgcattctatttacacattactttccaattaaacgttcatttattgccgcgcttcgattagcaacaaaaacaaatcgttaattttctatatttttccacaggggcttccataccaaagttccttgtttgtagagatcattgtaatcagcgcagatcgaagccatatataaaatgatttcgcacagtccgcccatattcagtcacagtccacccgttagttttctggcggacttcatgagcggacatccccgtcaatcgttgaagtaagtttacaaaagtatataactcataaataaatatagccagcaattggactaatttaacacagaattgctctaagtgaatccacgagtttcggcagccaatcaaaacaaattaaatagccaaacatcattgaaagagtaccaattctcaggttttttcatgtcgaaagaaaatatttttttaactttcttatcgattgataaggaactagaagcattttctgatgcatcatcttttatgaatttaacaagtggtgtacgtgttaataagagaaacgatataaatgtctgataacctgaaaaaccatgtgatagtaaatgaattaaactgagagataaaaaatacataacagataaaaatgattaatacccttttgcattaggcgttctctctggcgaatatttaaacaataattttaaacattcaaatttaaaacaaatttcaaaatacccaaacataacccacattaacaaaataaacagaccggaatgccgtaattccatttaatgaatataagaactcagttgtttacacaatccagaaaaggaatattatcgatctctcgagggctgcccatattgattcacatgaaacacctgtttcaagtgtcgtctatggaaattttaacacctgatcaaaggcaggaaacatgtcttacccaatacatagtattaaaacctgagaactattcgaaaacacaatgaatgcaggtactaaaaatattcgtgctaaggctcgtttttggttgacaacaacagattggcaaaatatgaaaagcaagcattcaagatcaaggcaagacagaatactgaaccaaaacaaacatttcgccgattctgaggtgatctttcgctggtggagccaactgagatttgaagattcgttcacgagtcgtgggggtgacgccaaaaatttgcttggcgacaatttgcgcgtggcgcttgacgcaactttttttctcaggggcacacgagcaagccgaaaatttgacaaattggtaaagggaagaagggtaatatctatatattatatttatacagaggcgagagcaattgattgaattaaagcaatttgccgtgcttcatttgctgcacgcgctgcattttcatcatatttgttgagagtattttatttttgggaatgataaatatacaataccgaaaattcgtataacttatattcgtatatatgaggacttcagctaaaaataaatctatatctagagtatggccaagcaaaacaaacgctacaagaaccggtaaaaaactaaataatcagttaagattaaagaggttcagtagataaaactgtgggaggtaatacatgcgaaagccctactgcgatccctacaactatgaacatttcttatcggggcacgtgagcggcatgccttcaaacaaaccgagtactccaaccaactcaagtaactcagctgctaatgcgtcaactcacttgaaatttcacagcgtgattttacaacagtttaccccacccaatacctagaactacccacgtaactgggcgggtcgtcatcgaaaatgattgaattcttttggttgccaactcaagcactaaatatgctgatattgtctccagacagcgccaattagccaaaaaaagttgatgataacagcagagcagacggaaatgttcccatagccaggcccacgccgaaaaagacgtatcagcatgccgtcaacatatgtttagcatgcaaaagtccacgcgaaccccattgaacgatccttatcaaccattgacttttagttttatgaatgtctagccgaaaaattatgataactacaaatgggatgtgaactgtgccaaatgagtaagaccagcgagtctctccgactatacaattttagaaatgactcactgaagaacccaaacaaatatgcttcatattcatactatacatttcccacccacggcaaacccgaattaagtgaggaggtcgcgcgcaactcctcttatcagcgatgtttctttatagacaatatacacgtatcagtaggactacacaagtacaagtacaaatacaagtagtacatgggcctccgaacaatgaaggcaggcattgaggcagtaaaaattaaagccaccactcttatcaggactgataaaaggcagcttaatgcgtagatgcttgaaataaaagactgatcttgggaatttcttttctgctttccaaacgaaaaaagaatcacaaaaaatggtcaaaacaattgaaagatggctaccatctgctgatgtttaaatatagaaattatattttcaattagtggtgttagagatatatattttaactgattgtgatatattcaaccttcgatattcaaccttttgattttttgaacgaattcaacactcatttaaaaggacagaatagtaacgaaattaagttatgaaataaatattaaataaatttattttaagaaacatttttatagttattaatttaagttttgaaatacaaaaataaaccaattaaacttgcataccttgtttcagctacaatgacgagcccaacagagcgtcgcgctactgccggccccaagtgataacgctggcctccaaagccatggtcaacaacgcctcggcggcggtccagggtcagggtcccagtcagcagaaggcgggtgccacgcccctgggcgtgggcagtcgttccggacggagttacctggagcgaatggcctcggcgccgctactcaccaatcagcccaaatcctgtctcagccgcaaatcctgcctgcacaaatcccagaacactacagccagttccgcagatctctcgccgacggacaccgatgtcgcggacagtgccagtcatagctgtatctgcagcaaggatagtgacagcaacggcgaagtgaggtgagtgtgcgggcgataagattacgtaatgtaggtaactcgatacagcggcgccgaaacgatcaagaaggctgtaaatgccggcggactcagtcactttgacgtcaggccttcaaagattatggcgccgcacttattaaaccaccaactgaactagatgggaacttagtggtgtgagagcctgggtaattgtggtcagaattgggtgtatcaacctataacagattcattaaatagtaagatgtcaattgaggggaaatcttaaggaaagtccgagaaagtaacacaagaagctgtagatggttttcatagcgcatcttaactatgtagactgtggtcaaaaagaaatcgaaagcttatgattcaaacttaaatctttgaattttaatatggggaggataggattttggttctaaaaattggaacgtgaaaagatcatttcttataaaactgcgaaaataccacttccgccataatattttataaacaaagattaatcgtttataagacatttgcaatagttctagtaaaaggaataagaaaatctgttggcagtcgaacaactttcccacagacgtcatagccgagcacatgtcatttattaaataagctgagaaagccaattgcagacggccgccaggctaaacaaatgcaaaaagatcatgaaatatacttgaaaatatattttatatatttttaagagcatgcaatttcacaaaaacaaaatataaattatctaaatgactgtagaaataagccaaaataaaaacacgccactgcatcgcgagtcgagaatctgtatctcgtatatctgagataaaaaatctcacattttaagactcaaatgggaatagactggtatttagtatagaccccaacagcgaggcgccattattttcgttttccatttccatttattcgctatatatagggaagatacattatcgattcatgtgcaggccatgaaaatatttgggttatcgatgtctcgcagatattttgtaaaattgtatacatatgtatatttcgctttcaacgagccctagaaataatttcctttttgcacttgaatctgacattttgagaaatgcctaaaaatacatatgccacgagatagagaaaataatttatacgttcatttgcgtcaaatgcgaacactatttctatttgggctgcgtctctagacaagagatcaggcttaaagctacgcagctactcaaacgaatgcaattaaccataatattatcaatgtaaaccagacgtgtgcttgttgctgttggagattttgtgtacactttgcggttgcgtattttgtatgcctcgttttatcagttacgaaatccactgggaaaaaattaatttaccaattcaaatcttcagagtaaattataattcatttaagttaacacaagaacgtaaagcaatgcaatagaaaaattattaagaattatatttattggaggcttgatttaagaattgaagaccttattcatcaccttccaaagcatatcgcatctgctcgtcacccatttggccccacattttacaatgagttttgacagccaatgaaagatctttcttttgtcttaattagcctccccaaaaatcatcaagatcaaccacaaaacgaggcagacggttcacgtcaaggccgaagaattattagcatagaagcgtgatcaagcgaaaggcgtcatctcataaaagacacaattttttcgggtgtaatgtaactaaaaatatttcaacattacaagcctcggaatacgaatgcacacaaacgtaaggttatatatagagatggggagatatgtctgatgttcatgcaaagatcacgtgaatcgatcggaaaagtgagtctggggcacatgggtctgctgtaaaaatgttggcgcacctttagctgaaaaatgtgaaagaatttcgtacatttacaacaattttatttcattcgtaattaaatttatatttattggtagcgatcgagataattaagaaaaaccaaatccacgacagaattttccgagttaaaactattttcagtctcttactattggactttgcttaaaatttcagaaaaatataaacgataggtatatttggcgaaactgaaattcttatgggggaaataaaatagaaaatacagaaaatttggcgacatacaatacggaactaccttgattcgtttacaaaaaagtagttcgattgtaaggtcaaccagaatgaccatcaaatcagtcagttgtaaaaatttcaacaggtcttgccagaatatttttatcggacaggttattgactttagaaaatgagggaactcgaacaaggtctgcaaattgaaaactgaggaaattaaaaagtatttttaaacacaattttcatttacattacaagcgtttcgattttaaaaagcccttttggtgcagccaaaacttgtttctcctgcacccatcaacgatcttaatgcggcttgcatattgaggagtttacaaatttatggactttaaaccggacccacgaaaataaatgcgttccgtaacgcatacggaattgtgactgcctttgggttttaagaaaaaacagttgatagtcgtatctcgtttcccttggagaaaatgtaagccaagtcggggaaaatcaatgaaaatgtaaatgattttttttttttaatttgatttttcgggtgatctctttcaagttgacaagttttaggaaagcggtcggtaaaaaatgagacccgtccgcggtctccggtttctggttggcggcctgctgggcgttgagacccaccccacacacaccagataagcgatcgctaagaaacctgttgaagaaaatgcagcaacagcaggcgcacaccgatcatgccctcgatgcgtgatgtcgtcgatgtcggtagtcggtagtcgttacgatccgattctggccgagtcgggtggtacgatctgccatctcagatacaccatcaccatcaccgatctctggcaatacggctggggtacaatcaacagagagccagtctgtcgatagccatttcaattgttggctatttgtacttcccatatatatttagcactcgatgcgttcccgccgactctcctccaatttgcagaccaaatagagtctgctctgtgtggggccattagtcgtaggtctgctccaactgacggaaacttttcgctttgggtttggcaacagcaaagaaccatacaaaaatcgagcccctaccgaagctgattagccaaaattagtcgctatatcttatcgaatttatggccaactttctaaatagaacttgtatgcgtatttttttcagtaatatgaaagtcaaaagggcggaacatttgttcgaagagtttggaaagtaattaactgcagcaaacatttgtattgaacacaatatattattatattgtattattcgtatctgcatttaaattaggtaaaattttaaaagtccaatgaatttcagattccaactaaatttcgttgaataacttatatattttgaatcacgagttatcctctatattttatatatcttagtgggtgtgtttttatttacatttaagcaaaagaaccgtgggaagagtcgcccaataacatgggtgcaaaaagaaaggaaaagcaaaagtaggcgtgatttacatatagattaaggcaaatctttggcaaagccgtacgtgacttctaaaaataaaaccaacaaaaaaatatacaatacacattactctttttatgacgcagggaatttttcgggaaacgcaaaggaataaaaatgatcagcagaatagaaaaaaaaaaacactaaaggaaaagtttcactcgaccgggattttatattaccaattgtcagacaatcgacaactttggcacatatagtaggagctttcaaaaatggttttaaaaactgcatttggcaaagacgcagtttgcttaactaaagtaaaaacaaaccaataaaatgaaactgttaaggatagaaatccgggcaaagaaagatgctgagtcaatgaccacaaagaaataaaataaataattctgaatggggggtcaagtcaaactgataaagccagggtcaaatctatatttgataatgtatattttaataattaataatttgcttataatagattgcgatgtactcaatggatggtatttctttttttactttttgcagccgtggccccaaaaagcatgtgatcttcgctgatgatgagggtctatcgctaaccgaggttcgtgtgatgtccgaaccctcgaatgtgccgccatattggagcatgaagtttctggagcaaattacacagggcctggtcagcccacatcctccggatcagtggacagtggacttcaagcagccagcctcagactatctatcatttaggttggtaccctatttacacaactgtaaaatatatacgagtattctaaatatttgtatttacacagacaaaagatagaacgcgactttgtttccttggagaatgtgatcgtcaaggatgaggaatcgattgtcgtgggcaccatcaaggtgaagaatatcgacttccagaaggagatcattgtccgtgtgacctgggatgattggaagagccagcaggatatcttctgtacatacgccagggcctatggaccggctacttgtgctcatgtagtcttcgatacattctccttcaaaatcaccttgccgccatcctccaagcgcctggaattctgcatctgctatcgcaccaacgaaacagaatattgggataataatgatgtgagtttggcatcaaaataacttaaaaaatattttacataatttgtatttgcttacagggtaaaaactacaccattagcaagcgatcgcccttttattacaacgccttgtcgccctatgataagggtcagaatcgcaactcgagccagcaaataaggtccaccctgaccgatgccttggccaaggtgcaagaccaaaatggctggcaccaggagccacatacgccatattggtgaaatcgcctgggaacgggattggattttcctgacccaagcgattgaataaagtttctcatttaggccacatgaacagaaagaaacagaattggaaaagatttaaagtgttataatcagtttcattgacagagggagagtccaaaagattttaccactaacgaaactttttgacctaagctaatacccggtacaaatatcccaattttaatgtgccattgacttgaggtttactcaatataaaatgagataggagggcttataactacttctactgagcgaagcccgaatttgtatgtcttgtctttagtcaacttgatggaatttcaaaatctatgtataactttttaaaatgttttatgtttgactgtaaagaatttttggaaaagatagatttatatgtttacctgtatgcctgtgtgatcgtctacatctatataactgatactagatttatgttaactaaaaacgaaaaaaaaaaccttataaaaatgaaaggagatgaattttgaggcgtgaagcattcaagcaaaccattgtttcgaaatttactgcaactgcaaaataaagaaaacaaaaaccaacaaaacacacattatgaaagaacacaagaaaagcaacaaaattgtagccctaagtttattcgttttattactttttatttctattctttttatttcattatacacttttatctttttggttacttgaaacgctaagactgaaatggcttgttatggagaagaaaacacgtcctgcaatacattatataataaaaagaacccagcaattttcgcatcaccacattacagacaacaaagtactttgtcctcatcgttctgtgtgatccagatccccgactatatatgatatatacacctagctagatttaagcgatttgtacatacagaagcaaaagcaaaacaatataccagaaaattgcctgttaaatacatttatatacacatatgaatttagttatatcacgatgactagtttttag

SEQ ID NO: 41960 - DNA, 1644 bp, DROSOPHILA
tcgaagcgtacggttcataggaggaacggaacgaagcggggaacgcgacggaaactagttgctgtttttttgtccgtgttaaataattgacacaagaaaatttagctacacttaagcaaagtccgcgaaaaatctattaaaaatcgttcgtcgttttgtgtgtgtgaccacgaaaaaagtgccccgatcggaggattttaataaattcaattaaggttccgtcccaacgatcgtttttcattgtctgacgctcacgcgtgatgtacaaatgaaaaagtaaaaatttaaataagatcaaagaaagaaagatcccagtaaaatttaaagtggattgactgcacaagaaaaagaaaagttccttacctcctagccagaagtcaaaagtgaagcggaaaacagagtggagataacaattaacggggcttccataccaaagttccttgtttgtagagatcattgtaatcagcgcagatcgaagccatatataaaatgatttcgcacagtccgcccatattcagtcacagtccacccgttagttttctggcggacttcatgagcggacatccccgtcaatcgttgaactacaatgacgagcccaacagagcgtcgcgctactgccggccccaagtgataacgctggcctccaaagccatggtcaacaacgcctcggcggcggtccagggtcagggtcccagtcagcagaaggcgggtgccacgcccctgggcgtgggcagtcgttccggacggagttacctggagcgaatggcctcggcgccgctactcaccaatcagcccaaatcctgtctcagccgcaaatcctgcctgcacaaatcccagaacactacagccagttccgcagatctctcgccgacggacaccgatgtcgcggacagtgccagtcatagctgtatctgcagcaaggatagtgacagcaacggcgaagtgagccgtggccccaaaaagcatgtgatcttcgctgatgatgagggtctatcgctaaccgaggttcgtgtgatgtccgaaccctcgaatgtgccgccatattggagcatgaagtttctggagcaaattacacagggcctggtcagcccacatcctccggatcagtggacagtggacttcaagcagccagcctcagactatctatcatttagacaaaagatagaacgcgactttgtttccttggagaatgtgatcgtcaaggatgaggaatcgattgtcgtgggcaccatcaaggtgaagaatatcgacttccagaaggagatcattgtccgtgtgacctgggatgattggaagagccagcaggatatcttctgtacatacgccagggcctatggaccggctacttgtgctcatgtagtcttcgatacattctccttcaaaatcaccttgccgccatcctccaagcgcctggaattctgcatctgctatcgcaccaacgaaacagaatattgggataataatgatggtaaaaactacaccattagcaagcgatcgcccttttattacaacgccttgtcgccctatgataagggtcagaatcgcaactcgagccagcaaataaggtccaccctgaccgatgccttggccaaggtgcaagaccaaaatggctggcaccaggagccacatacgccatattggtga

SEQ ID NO: 41961 - protein, 384 aa, DROSOPHILA
MISHSPPIFSHSPPVSFLADFMSGHPRQSLNYNDEPNRASRYCRPQVITLASKAMVNNASAAVQGQGPSQQKAGATPLGVGSRSGRSYLERMASAPLLTNQPKSCLSRKSCLHKSQNTTASSADLSPTDTDVADSASHSCICSKDSDSNGEVSRGPKKHVIFADDEGLSLTEVRVMSEPSNVPPYWSMKFLEQITQGLVSPHPPDQWTVDFKQPASDYLSFRQKIERDFVSLENVIVKDEESIVVGTIKVKNIDFQKEIIVRVTWDDWKSQQDIFCTYARAYGPATCAHVVFDTFSFKITLPPSSKRLEFCICYRTNETEYWDNNDGKNYTISKRSPFYYNALSPYDKGQNRNSSQQIRSTLTDALAKVQDQNGWHQEPHTPYW

SEQ ID NO: 41962 - DNA, 10837 bp, DROSOPHILA; identical to SEQ ID NO: 41959

SEQ ID NO: 41963 - DNA, 1482 bp, DROSOPHILA
tcgaagcgtacggttcataggaggaacggaacgaagcggggaacgcgacggaaactagttgctgtttttttgtccgtgttaaataattgacacaagaaaatttagctacacttaagcaaagtccgcgaaaaatctattaaaaatcgttcgtcgttttgtgtgtgtgaccacgaaaaaagtgccccgatcggaggattttaataaattcaattaaggttccgtcccaacgatcgtttttcattgtctgacgctcacgcgtgatgtacaaatgaaaaagtaaaaatttaaataagatcaaagaaagaaagatcccagtaaaatttaaagtggattgactgcacaagaaaaagaaaagttccttacctcctagccagaagtcaaaagtgaagcggaaaacagagtggagataacaattaacgctacaatgacgagcccaacagagcgtcgcgctactgccggccccaagtgataacgctggcctccaaagccatggtcaacaacgcctcggcggcggtccagggtcagggtcccagtcagcagaaggcgggtgccacgcccctgggcgtgggcagtcgttccggacggagttacctggagcgaatggcctcggcgccgctactcaccaatcagcccaaatcctgtctcagccgcaaatcctgcctgcacaaatcccagaacactacagccagttccgcagatctctcgccgacggacaccgatgtcgcggacagtgccagtcatagctgtatctgcagcaaggatagtgacagcaacggcgaagtgagccgtggccccaaaaagcatgtgatcttcgctgatgatgagggtctatcgctaaccgaggttcgtgtgatgtccgaaccctcgaatgtgccgccatattggagcatgaagtttctggagcaaattacacagggcctggtcagcccacatcctccggatcagtggacagtggacttcaagcagccagcctcagactatctatcatttagacaaaagatagaacgcgactttgtttccttggagaatgtgatcgtcaaggatgaggaatcgattgtcgtgggcaccatcaaggtgaagaatatcgacttccagaaggagatcattgtccgtgtgacctgggatgattggaagagccagcaggatatcttctgtacatacgccagggcctatggaccggctacttgtgctcatgtagtcttcgatacattctccttcaaaatcaccttgccgccatcctccaagcgcctggaattctgcatctgctatcgcaccaacgaaacagaatattgggataataatgatggtaaaaactacaccattagcaagcgatcgcccttttattacaacgccttgtcgccctatgataagggtcagaatcgcaactcgagccagcaaataaggtccaccctgaccgatgccttggccaaggtgcaagaccaaaatggctggcaccaggagccacatacgccatattggtga

SEQ ID NO: 41964 - protein, 330 aa, DROSOPHILA
MVNNASAAVQGQGPSQQKAGATPLGVGSRSGRSYLERMASAPLLTNQPKSCLSRKSCLHKSQNTTASSADLSPTDTDVADSASHSCICSKDSDSNGEVSRGPKKHVIFADDEGLSLTEVRVMSEPSNVPPYWSMKFLEQITQGLVSPHPPDQWTVDFKQPASDYLSFRQKIERDFVSLENVIVKDEESIVVGTIKVKNIDFQKEIIVRVTWDDWKSQQDIFCTYARAYGPATCAHVVFDTFSFKITLPPSSKRLEFCICYRTNETEYWDNNDGKNYTISKRSPFYYNALSPYDKGQNRNSSQQIRSTLTDALAKVQDQNGWHQEPHTPYW

SEQ ID NO: 41965 - DNA, 7089 bp, DROSOPHILA
ctgatataactaaagttacttacaaatggtcagcaactgaggatctgcatcgccctcgacgacagcatatcccgtgaggcgaacctcttcccgcttaatgaggtacttccgccggtcagccgtgtccagggagaggcggataagctgcatttcgccggtggcctttgtttcctcgaaatatgtgagcacctgctggccctgggccaatgcgtggactgtgggcttgctgatgaccttgctggcggctagggccagttgctcagccgtatcctccttctggtcctttctcgaagccaatgcctgggaaagggtttggcactcgccatcgctgtagaggattaatgcctcctgttcggttgccaccacgtgagcgatgcttttctgaaactgtaaggaaagcgtattatccacaattatatgctgaattttagctgcccataccttcagcttcttgcacttggacacatcactggtgtccacatcccaaagacgcagcgcgtgatttccaaagacgcccacatacttctggctgctgggatcgtatataaccttggaggaaagcttctccggcagggaccaactgagcaactgcttttgtgtgctgatctataaggaaatcgcgtttgttacatgggcattttgatattttggtgtccaaacgcacgttcaaaacaaccaccacgttgcgcgccaacgtagtcaccacattgccattttccctgtctgcagctaggcccagaaactccttggggtcggggatgggaaacaggttgtagtaggacaggaatttggacattatttaattgaattgaaaacaattgcagcacgtgcaaagcggcatccaaaactaaaccacagggcgattcgtgccattgaaatcagtgttttggtatttaaaataccgacagtaaggctgccagacctctgcgaaatacgaacacaaatggttgccggacctgccacgtgctatcgataagaggaagagacagaagaagaagagagaaatgggtggaaagacaaaacaagcgccgcgcaccaaaaataatgccaaggtaaggcgtagtaaggtattaatatgttatttaaccgtgccctcgaccccccatcatccagccctcgagcagcagccgaacagccgagctgctgggcagttccacgcccatattcgtgggattctcggcgcagacggacggcggtggcctggtgccatttgctccgggattcgccagcgccgaacaaatgccggacagctttgatgcggccatcagtccgcaaacgcagatcatccttcgaaagctgtccaaaaaggatccaatgacgaagaagaaggcgctgcaggagctacacgaactgatcgagcagtctgacgtggaggtcctcaagaacattctgcctctgtggcccaagtactacctcaatctggctagcgatccggagcacactgttcgcgaacagacacagactgtgctgcagttgctcatggccaagtgtaaaaaggcgatggctccatatctaaagttacttgtgcccgtttggctgggcagccgatttgatacctacgctccggcggccagtattgcgagccaatcctttcgagacacctttgctggcaacgccaaccgatctcgggaagtctgcatgcactgtcaggtggagattctcgagtacgccacacgtaacctgaccttccacacagccgctactctgtcgattgggaaaagtctcactccggaggatgcggaacagaagtaccagcgcgttatcatcagtagtctcaagctgttgtcctttttcatggggcaaactgcgcagacggaggagctcagccaggtcaaggagggcttcggcaccctggtggcacaccagaagttctggagcttcgccaagcataaagtgcctgccattaagtaagtaaacagacaagtcatttaccatgtatttaatttctgtttcacattttatagagccgcctggttcgagtgcatatatcacatcctgcaatcggttgcacttttggatgtgatcacgcctcagaagacgcagctgactaacctctgctttcagtttattgacgatgcagatcccgtggtggctccccacatttgggggtgcgttctgctcctacaaagtaactacgtagattggtaagacctaggatctactataagtgaattccaataataaagtttaatatttgtaggttcgttccactgaacattcgcaagacacttctccccaaactttcgtctttgctccaaaatggtttcaatcgcaacgcccaggccatctgtcccaatctgctgccatttttgtcgaaagttacacaagcatcccttcaagacctggatatctacgatttctatcagcgcttctttgacgacatgaagctggcagtcactaagaaattcgatcctccgctttccaaatccgattgtattgtgatacataatgcatattttgagtgcctacgcttcttgatgcagcagattaacaacaacaaacagcgagagcagaaggaggaggaattttcctttagcctactcgataacaacgtacttgaacccattgcctggctgctcaaaagcgatagcacgcatgtaaaaattttcttccagcacagttcagccctggtggccttctgggatcgtcagattaataatagattggataatggtgacctttatgccaaattgctgaacaagttctggatacgcatctttgagctggtcacacaagacctatcggccgaggaggtgaatgagcaactgctcggacatgtcttgcttttagtgcaggatctgcatatggctaatcctagcctggagtcgccgagtgtgaagtttgtcgaggggccaaacgaaaagatcgagaagagcgaacccacaacaccagttaaaaaggctcaagaagctgctgcttttatacaaaaggaattgaagcagttggttataaagttagtgcgcatatgcctggataaggccaacaaaggcagtgggagtggtacttcgagctcgcgttacatcgaacaaattcgaacgcttacaaaaatgtttaacgatgccgcgttctacaaaagtttaactgatgatggagaccttgcgtcggcgttaaataaatttgtgtcactgctaggtcaactaagttgtcaggcctgtgaatctgtggtggagatcgtgtttgaaatcctgccgctgctagagactggaaaacgctttgaatatattgaaaacactctcatgaaggtagttaccaattttaaagtgtataaaaaaaatattaaattattattattctttacagcttccacaacatggcgtgcaaaatcttttgctgcatcgtctactatcatatcccctatgcgccgaggccgccgtgaggcaaatgctaagtggtccggaaacttgtgaaatgattgcgcggatagctgaggaggttgttgtagacaatgatcgggagaagctgaacttgcttcacaagtgttttttccaaactgacacgggagacatactcattaatgctaaaactgtggataaaatactgctgtccatgtgcggacccttggagcaaccggttgtcgatgacgcggtggaagtgtgtggcagttttattgcccagataatgcctgtgatttgcagcaacaataactcttcgctgcacgtgcgccaacacatcttcctcaaactgttcaaatttagtttggagcaccgaccagaggattatctgtcggaggatactctgtgggaaattaccacttgctggcaggatggactttctagcaaagatatcgaaatcgatgatgacatgctaaagtgttgcgcagggattgttgaggaattggcaaattcagcagaacttaaagcggatactttggatggaatggcagaggcgatggccaagtttgttatttgctcaacggaaaatattgaagatgagtataagcgcttggagcgaatcgatgaaacattaactgctcttctggaaacgcccctaaaaacgactgacaaggttcaacagtttgagaaccattgtgtactcctagaagccttgcacggatctgtgactgcgggagttccgttcgaaaatgcttgcctctcaagaaatgaaatactaccattgcttcaacgttccacactcaacttttctacaatctacaagctcgtctatcaattcccaccacctcaagacaccaacgacccagaggatgagttgaccgaggactattgtgatccaaatgctgatgtgctcaaaaaatggaacgaacccttaattgcagagcttttacagtgcattcgagtggctggaacagcagaatgctggctggaaatgtcagtcttgcaatcgtcgacagaggagttagtgttgatcctttcggagaaagtgcaaagctttatgggcaacagcagcgatctggttgcaatagtaaaggagcgtcttcagcaagcggctgtgcagcagtccagcgtaattgactgtcgtcttttaagttaccttagattttgcccacagtatgcggctttcgaagagagtgcctccattttgctacatgaagatctgtcagaaaatctagtgacgcagggagcgctcaagacctatgtaatagctctacaggtaggaattctaaaagaaatccaggaacacttaataatgccttgtgtcttacagtttctcttaccgaagctttctcaaaaagcgatcactcttagttctgcgattatgggaacagaaccgcctgaaatttgggttaaggcagcagtgtttcatgctctactattaaacaattttgaaggcgatgtgaatgagcaaacggatcgcaatataattgtatcagccgtacagtttatgaccagcataggggaaaggcaagccagccagaaggatttactccattataatgtgtaagacaatataattttcataaaatgtatatgattcaaaacccaagtttgtatttttcagagaaattcaaaggcaaccctacgaatcagttataaatacagtggagttcataaagcttttaactgaagttttaaaacgttttccatacgaattgagtataaagaactgggacgctattcgcattggccttagttcttgggtgctttctgtttcaaaatctatagcacaataccaagacccaaaggtaggctttataaataaatttctttcataattaataataaattatctttaattgaagacttcgctttttattgtggctgtttacgaattgtttgccgcccttattgattttatacgctccgagaagcaaaagagttccacggaattactcaaaaacatgatcgacgaatgggactctttgtttgccaaggaagtcaatttagtgctctttaagtcatattacctattgacccacgaggttagtgtggatccaggatttcaggcatgctatgaggccttactagaacaaataacaccggtcatagagcgactggactacagctttgtgtactcggtaatcaagtgaaatattttgttgtttttctatggctaataacttcaaaaacctttttacacttcagttctgcaagtcaaatagtaacatcaccttggaccacctctgcaatttcctgttcaagcagctttatagtgtccagcactcagttcgattaagtgctgtacactcgcttcgccaattaacgccacactttgtggcggacgacatagagctgaatgagaaacaaagtgagagtctagacgccagcacaacgatttgcaagtggcacttcctcaatcgctttgaggactatctaacacgctacgatgcactgataactaaatacctggaagagttcacgttcaagctatcagagctggatgatctcgaacccatagacagacacaatgcactgagttaccttttcttatgggattgtattatcaatgcttgcgctaagtctccagttgcattgcgcgctgtttacaccaattggctgaatgataacaaatacgaagaggttggaaacgatacattaaatttactaataattttaaatttacactttcaatttctttgctccacagaatttccttcacttccttttccgcgcaatgcccgtggacatacttaagaaccacggtgccaaggtccacagcaacggcgtttacaaagagctgacctggtctcagcagaagggtaagctgaacattacttagattattgtttcctccgatatatccgtattgagaacgtcgggcaagtagtcctccccatatccatagtcgtcatattcagcggctccgtgctcgacatcgttcatcatttcctctgcatccgcctcatcggatacagaaatgaaatctgacaagggcacaaactgttcgggatcgttctctgccatcatctgtcgttttacaggtatttgctgaggtgtcaagtaaatgtttaagtttgatatgaacttgttgacccaaacggttaggttgttggccaatatcctctgatactcttgcaaattacttgtcgtatagaattcttgatcttttgatgatttcaattagttaatttttgaagtgtcccagttagattcaacttacctgtaaattctcgaagtctctcaagaattacgcaacatagaggggagttctcgtcaacaataaactgatcgttgagtagaaagtccttcatttcctcgaacagtacgcaaattatcttttgcatctgcttgcgctggcgcaaaatgattcgtttttttagacccttgcatcgtcgcttttggacacgcttcgctgccttgcgctgacgcatctcctcctccatgtattccagcgccttctccattgacatggcttctaccggaggtttgggtttcatctggttctctagagccgctatatgacgaggcgagaggtagtccttaaagaaattgtatgtgtcactcactcgcattgggtgaggatcggcaagtcgttcaacccgtgctgtacattggttaacgtagatctttttggtgtagtagcgcgcctgtttggccaactggggtgaggagaagtccttcttgggtgtagctagaaaacatatgtgttcctcgcgggacaacacgtcccggtcgatgattatttgtcccgtgt

SEQ ID NO: 41966 - DNA, 4030 bp, DROSOPHILA
agaaatgggtggaaagacaaaacaagcgccgcgcaccaaaaataatgccaagccctcgagcagcagccgaacagccgagctgctgggcagttccacgcccatattcgtgggattctcggcgcagacggacggcggtggcctggtgccatttgctccgggattcgccagcgccgaacaaatgccggacagctttgatgcggccatcagtccgcaaacgcagatcatccttcgaaagctgtccaaaaaggatccaatgacgaagaagaaggcgctgcaggagctacacgaactgatcgagcagtctgacgtggaggtcctcaagaacattctgcctctgtggcccaagtactacctcaatctggctagcgatccggagcacactgttcgcgaacagacacagactgtgctgcagttgctcatggccaagtgtaaaaaggcgatggctccatatctaaagttacttgtgcccgtttggctgggcagccgatttgatacctacgctccggcggccagtattgcgagccaatcctttcgagacacctttgctggcaacgccaaccgatctcgggaagtctgcatgcactgtcaggtggagattctcgagtacgccacacgtaacctgaccttccacacagccgctactctgtcgattgggaaaagtctcactccggaggatgcggaacagaagtaccagcgcgttatcatcagtagtctcaagctgttgtcctttttcatggggcaaactgcgcagacggaggagctcagccaggtcaaggagggcttcggcaccctggtggcacaccagaagttctggagcttcgccaagcataaagtgcctgccattaaagccgcctggttcgagtgcatatatcacatcctgcaatcggttgcacttttggatgtgatcacgcctcagaagacgcagctgactaacctctgctttcagtttattgacgatgcagatcccgtggtggctccccacatttgggggtgcgttctgctcctacaaagtaactacgtagattggttcgttccactgaacattcgcaagacacttctccccaaactttcgtctttgctccaaaatggtttcaatcgcaacgcccaggccatctgtcccaatctgctgccatttttgtcgaaagttacacaagcatcccttcaagacctggatatctacgatttctatcagcgcttctttgacgacatgaagctggcagtcactaagaaattcgatcctccgctttccaaatccgattgtattgtgatacataatgcatattttgagtgcctacgcttcttgatgcagcagattaacaacaacaaacagcgagagcagaaggaggaggaattttcctttagcctactcgataacaacgtacttgaacccattgcctggctgctcaaaagcgatagcacgcatgtaaaaattttcttccagcacagttcagccctggtggccttctgggatcgtcagattaataatagattggataatggtgacctttatgccaaattgctgaacaagttctggatacgcatctttgagctggtcacacaagacctatcggccgaggaggtgaatgagcaactgctcggacatgtcttgcttttagtgcaggatctgcatatggctaatcctagcctggagtcgccgagtgtgaagtttgtcgaggggccaaacgaaaagatcgagaagagcgaacccacaacaccagttaaaaaggctcaagaagctgctgcttttatacaaaaggaattgaagcagttggttataaagttagtgcgcatatgcctggataaggccaacaaaggcagtgggagtggtacttcgagctcgcgttacatcgaacaaattcgaacgcttacaaaaatgtttaacgatgccgcgttctacaaaagtttaactgatgatggagaccttgcgtcggcgttaaataaatttgtgtcactgctaggtcaactaagttgtcaggcctgtgaatctgtggtggagatcgtgtttgaaatcctgccgctgctagagactggaaaacgctttgaatatattgaaaacactctcatgaagcttccacaacatggcgtgcaaaatcttttgctgcatcgtctactatcatatcccctatgcgccgaggccgccgtgaggcaaatgctaagtggtccggaaacttgtgaaatgattgcgcggatagctgaggaggttgttgtagacaatgatcgggagaagctgaacttgcttcacaagtgttttttccaaactgacacgggagacatactcattaatgctaaaactgtggataaaatactgctgtccatgtgcggacccttggagcaaccggttgtcgatgacgcggtggaagtgtgtggcagttttattgcccagataatgcctgtgatttgcagcaacaataactcttcgctgcacgtgcgccaacacatcttcctcaaactgttcaaatttagtttggagcaccgaccagaggattatctgtcggaggatactctgtgggaaattaccacttgctggcaggatggactttctagcaaagatatcgaaatcgatgatgacatgctaaagtgttgcgcagggattgttgaggaattggcaaattcagcagaacttaaagcggatactttggatggaatggcagaggcgatggccaagtttgttatttgctcaacggaaaatattgaagatgagtataagcgcttggagcgaatcgatgaaacattaactgctcttctggaaacgcccctaaaaacgactgacaaggttcaacagtttgagaaccattgtgtactcctagaagccttgcacggatctgtgactgcgggagttccgttcgaaaatgcttgcctctcaagaaatgaaatactaccattgcttcaacgttccacactcaacttttctacaatctacaagctcgtctatcaattcccaccacctcaagacaccaacgacccagaggatgagttgaccgaggactattgtgatccaaatgctgatgtgctcaaaaaatggaacgaacccttaattgcagagcttttacagtgcattcgagtggctggaacagcagaatgctggctggaaatgtcagtcttgcaatcgtcgacagaggagttagtgttgatcctttcggagaaagtgcaaagctttatgggcaacagcagcgatctggttgcaatagtaaaggagcgtcttcagcaagcggctgtgcagcagtccagcgtaattgactgtcgtcttttaagttaccttagattttgcccacagtatgcggctttcgaagagagtgcctccattttgctacatgaagatctgtcagaaaatctagtgacgcagggagcgctcaagacctatgtaatagctctacagacttcgctttttattgtggctgtttacgaattgtttgccgcccttattgattttatacgctccgagaagcaaaagagttccacggaattactcaaaaacatgatcgacgaatgggactctttgtttgccaaggaagtcaatttagtgctctttaagtcatattacctattgacccacgaggttagtgtggatccaggatttcaggcatgctatgaggccttactagaacaaataacaccggtcatagagcgactggactacagctttgtgtactcgttctgcaagtcaaatagtaacatcaccttggaccacctctgcaatttcctgttcaagcagctttatagtgtccagcactcagttcgattaagtgctgtacactcgcttcgccaattaacgccacactttgtggcggacgacatagagctgaatgagaaacaaagtgagagtctagacgccagcacaacgatttgcaagtggcacttcctcaatcgctttgaggactatctaacacgctacgatgcactgataactaaatacctggaagagttcacgttcaagctatcagagctggatgatctcgaacccatagacagacacaatgcactgaaatttccttcacttccttttccgcgcaatgcccgtggacatacttaa

SEQ ID NO: 41967 - protein, 1341 aa, DROSOPHILA
MGGKTKQAPRTKNNAKPSSSSRTAELLGSSTPIFVGFSAQTDGGGLVPFAPGFASAEQMPDSFDAAISPQTQIILRKLSKKDPMTKKKALQELHELIEQSDVEVLKNILPLWPKYYLNLASDPEHTVREQTQTVLQLLMAKCKKAMAPYLKLLVPVWLGSRFDTYAPAASIASQSFRDTFAGNANRSREVCMHCQVEILEYATRNLTFHTAATLSIGKSLTPEDAEQKYQRVIISSLKLLSFFMGQTAQTEELSQVKEGFGTLVAHQKFWSFAKHKVPAIKAAWFECIYHILQSVALLDVITPQKTQLTNLCFQFIDDADPVVAPHIWGCVLLLQSNYVDWFVPLNIRKTLLPKLSSLLQNGFNRNAQAICPNLLPFLSKVTQASLQDLDIYDFYQRFFDDMKLAVTKKFDPPLSKSDCIVIHNAYFECLRFLMQQINNNKQREQKEEEFSFSLLDNNVLEPIAWLLKSDSTHVKIFFQHSSALVAFWDRQINNRLDNGDLYAKLLNKFWIRIFELVTQDLSAEEVNEQLLGHVLLLVQDLHMANPSLESPSVKFVEGPNEKIEKSEPTTPVKKAQEAAAFIQKELKQLVIKLVRICLDKANKGSGSGTSSSRYIEQIRTLTKMFNDAAFYKSLTDDGDLASALNKFVSLLGQLSCQACESVVEIVFEILPLLETGKRFEYIENTLMKLPQHGVQNLLLHRLLSYPLCAEAAVRQMLSGPETCEMIARIAEEVVVDNDREKLNLLHKCFFQTDTGDILINAKTVDKILLSMCGPLEQPVVDDAVEVCGSFIAQIMPVICSNNNSSLHVRQHIFLKLFKFSLEHRPEDYLSEDTLWEITTCWQDGLSSKDIEIDDDMLKCCAGIVEELANSAELKADTLDGMAEAMAKFVICSTENIEDEYKRLERIDETLTALLETPLKTTDKVQQFENHCVLLEALHGSVTAGVPFENACLSRNEILPLLQRSTLNFSTIYKLVYQFPPPQDTNDPEDELTEDYCDPNADVLKKWNEPLIAELLQCIRVAGTAECWLEMSVLQSSTEELVLILSEKVQSFMGNSSDLVAIVKERLQQAAVQQSSVIDCRLLSYLRFCPQYAAFEESASILLHEDLSENLVTQGALKTYVIALQTSLFIVAVYELFAALIDFIRSEKQKSSTELLKNMIDEWDSLFAKEVNLVLFKSYYLLTHEVSVDPGFQACYEALLEQITPVIERLDYSFVYSFCKSNSNITLDHLCNFLFKQLYSVQHSVRLSAVHSLRQLTPHFVADDIELNEKQSESLDASTTICKWHFLNRFEDYLTRYDALITKYLEEFTFKLSELDDLEPIDRHNALKFPSLPFPRNARGHT

SEQ ID NO: 41968 - DNA, 2441 bp, DROSOPHILA
ccgaaagtctgggaatgggaatgggaatggtgtggagtgggtatgggaatgggagtgggagtggaagtgggtctgggcctggtcaatagcataactaaccttcaaatgaaattagcacatttacacagcttacctgaccgcagaagcagtgcggccaacttggctattaagtcgctaaagtttcaagcctaattgtgtgcaaaagtatgcaacaaatttgtattagttccgaaatgtaatggataattgctgtaatgtgcatgcttggcatacttttgaacacctttaaacttaaacttctacttaaaagaataaaaataaaaatatcttacaaatatgccaaaaattagccacgaattttaggtgtttaaatggatgtgtgcgattttaaacagctttattgtaagtcccttgtagcttaaaataatattaaatctgattttaagcccttttaattaaaacttcagttattaccaacactcattacataaatgccaaatttgttatatatttttaattttatttacccacttactgtaatccgaaatggccaacactggtcagaagttggtgccgccgcaaagtgaaatgttttgctctttaaactggctgccattcgatttcatgagcgccacttagcgtgccaccaaaaaattcccggtcgcaagcatatgaattggctttttgttccatttgccgctgcggcaatggaggctggggcatcgtactcgcatattttaatagtttgttttatggcacttacattagcatctaatttctgctaacaagcggccgcaaaaagccaaacaaacaaacaaacaaacaaacgaacaaacagggcgaaacaaaagtttccattttatgcccaaagttctaggctataaagacaccggtcgcgacttggccaggtcacagtttgcaagcggagtgcgcggagcaatcataaagccactgataaagtcaagcgaccagtaaagcagttcaaggagccataaggataatgcgtagctggtttttatttggattatatgcgctgctaatcgccgcaacagttggccaaccgctgcagcaaaatgagtccggaaaaaacgaggatagcgaaaggagcgagcgagtgagtcgccaaattccctatttgggtggctacggaggatatggtagtggctacggcggatttggaggaggctatggaggctacggaggctatggcggctatggcggactcggcggttatgggggatacgggggctatggaagctacgccggcatacgctcctcactttatccctacggcaatctgtatggcggcagcggcttgggactggcgggcggatattatggtcgtccttatggttatggcggtggctataatattggatatccggccattggcggcttcggtgccaccggcggcggcatctttggtgttagtccattctaaccattcgcttaagtggatatatgaaataaaaaaccaaaacgaaaaactaaaatccttggcaaaactaaactcgaaaaaaaaagattatacaaatatggaggggaggtctagctgtggctcaataagctgggattacctaatgatccctcagctggccatttgacatggtaatgtgattgtggtcgattgggaaaaaatgcaaaaaatacaaaatttgctttacagattgacctatttaagagattggttccgaagttaaacggtaatatctacaaatttgtttaatattttgggtagaaacaatttcagggcactaacgaaaagggaaagatttaagatgatagcacatttcaaaggattagccagctcttctaataataaaagcccttactctcttaaacgatacgaaattcccagtagtcaactgtttcactttgatggccccaagatatggctgtttatttgctcgagtgtccagtcgcttctttgaagcaattcaaaacgattatcgccttcattcattaaaatctagcgtggcttaccatattatttacacagctttgcgttaaccagagctcaatcatttacatttagtggtgcggggggggatggaatggatggaggagcttaagcaaatagaaagattttgcagacaggaagagctcacttctttttagattttaattgccgatagtgtaagtaagcactatgctgacatgtcacaccgcaaaagcaacacactcctctacactcgcaggccagtcgagcggagtgtccgagtgccgtttaattagtgtgtgacttttaaacgacttgcattgcacatacgccccgttgcgcacgctttcgctcagtgtagacaaacacacacacacacacacacgtgtaagttggtcggagttggttgaaagagcgtacgcaaacagcaaaacaagcaacaggacatcgaagacacacacacacacacggagaaaggcgaagaaaatgggggggaaatgtc

SEQ ID NO: 41969 - DNA, 441 bp, DROSOPHILA
atgcgtagctggtttttatttggattatatgcgctgctaatcgccgcaacagttggccaaccgctgcagcaaaatgagtccggaaaaaacgaggatagcgaaaggagcgagcgagtgagtcgccaaattccctatttgggtggctacggaggatatggtagtggctacggcggatttggaggaggctatggaggctacggaggctatggcggctatggcggactcggcggttatgggggatacgggggctatggaagctacgccggcatacgctcctcactttatccctacggcaatctgtatggcggcagcggcttgggactggcgggcggatattatggtcgtccttatggttatggcggtggctataatattggatatccggccattggcggcttcggtgccaccggcggcggcatctttggtgttagtccattctaa

SEQ ID NO: 41970 - protein, 146 aa, DROSOPHILA
MRSWFLFGLYALLIAATVGQPLQQNESGKNEDSERSERVSRQIPYLGGYGGYGSGYGGFGGGYGGYGGYGGYGGLGGYGGYGGYGSYAGIRSSLYPYGNLYGGSGLGLAGGYYGRPYGYGGGYNIGYPAIGGFGATGGGIFGVSPF

SEQ ID NO: 41971 - DNA, 4506 bp, DROSOPHILA
gcaacatagaggggagttctcgtcaacaataaactgatcgttgagtagaaagtccttcatttcctcgaacagtacgcaaattatcttttgcatctgcttgcgctggcgcaaaatgattcgtttttttagacccttgcatcgtcgcttttggacacgcttcgctgccttgcgctgacgcatctcctcctccatgtattccagcgccttctccattgacatggcttctaccggaggtttgggtttcatctggttctctagagccgctatatgacgaggcgagaggtagtccttaaagaaattgtatgtgtcactcactcgcattgggtgaggatcggcaagtcgttcaacccgtgctgtacattggttaacgtagatctttttggtgtagtagcgcgcctgtttggccaactggggtgaggagaagtccttcttgggtgtagctagaaaacatatgtgttcctcgcgggacaacacgtcccggtcgatgattatttgtcccgtgtgttggcagggcacatagcaaggatggtagcggggacagacacagatgaaccttcaggccaatgtatatattgtattggttttaatcgaatcgtttattgtttatagtaaaaaaggaaagttaaaagtctgatttaatttatgaaaaaacattccaaaagccaaagcaattccgaaaatatgcatgtattggatatggaaaaacttgatacttacttacctgtacaatgcttgcgtctcattgggggaaaacttaactaagcggcgaatgcgtttggcacgagtctcgcgcacatgaaccatggccaggcgagcgtttaactcgtccgctacggttggtccatcctgctgaaactcctcaggcttgtgctccttgcgcgtatcgcattgcgtcttcaggaagtttatggcttcggccaccgaagtctcgccctcaagttgaatgcgctttggctgcggcatctcggagggtatatccttgaagtttattgggttttccatgctttcaaatagaacggaaatacaaaaaaaaaaaaataagaagcggatcaatacacagaacggtaggagactaatgatttaaagtgaactgttttctatataaacataatttgactactcgcagcctggcttgccttgttacatttcttgatccattttgcagatcgacatctacccctggagcgatatgcctgccacttgtacacggaggtgctccgcaagctgcctgccgtggtgcgcaggtggtggaacgccactcagtccaggcagaagaacttcatagacaacctgaccacaaactacgtgagttctttgatttgcagcgaggagctcaaagcgatcgccaatcgcaaggagaagcacgagaatatgcaggtaagcggatgtgtcctttcaagtctttattcttgctctggggtgcttagccgaagggaaaaaaccacggtgatgctaatcagcagtatgataatgacaataacgcgaaatatctcaagaggcaccatatctctgctagaagggatataagtgtgctttcgctatatatttaaatttccgttgaataaaaaaactttggatattttgtaaatcccaaacaatcatagtctactgaactatgtgactaaagttgacatttctctattctaggttaccgttcattcctccacccgcgaagtgctagcggtctacgccatcgatgaggcacgcatggaacttgtaataacgctggctcccaattatccactgggagctgttaaggtcgagtgcggcaagcagatcggcggacgtgcttcctcccgaaatgtcggcatgcagttgaccatcttcctgacacaccaggtatattgatattgatacatttcgtatgttactcgatgtccgctgaataataatattaaaattgtcttatgcagaatggcaccatatatgacggcctaactatgtggaaaaacaacttagacaaaaaattcgagggcgttgaagagtgctacgtgtgctatactgttatccaccaggagacttgccagctacccaaactaacgtgtaaaacgtgcaagaagaaattccacggaccttgtttggtaagactcctccaagctgctttttttttctccgatctaacgaaatgattacattttttttagtataaatggtttaccacaagcagcaagtccacctgtcccatttgccgcaacgtcttctagatgtgtgtatatatcattaacaattttagcaacacgtattgagcaaaaggcacaaccaaaccattcgatataggaaatagtttcaggtctcacaaattgtaaatcagcaatattaataaatcttacaatgttttaatgttcttgaatatatatatagtgcagggattgaaattatttaattgtaaaaactaaatagtgcattaaaattaaagaaaaattaaaagtttgaaacaaagtatgtcgtggaagggtaatccatagcaaataacaagtttgttttactaaaacagttctcaaacgatatcagtactcacaacaacactgtacaacacaatacaattttacaatatatttaatgctgtcagtggataatcaagaactttttatattatggctacaagaataaaagtaatgggtcagtgcccatattgtaatcgtcatgtggccaaagacttaagacctatcaacatgctgtccgcacaggatgccaaaaggatttctaaactggtaaacgaagtgcagccaccacttcatttggaatccgaggaggagacgcaagatcaggaggaaaaagtacaaggtaatataaccaaaaaagagcgagtttcgatgagaaagggaaggaacatttctgtaaggaagttaatagccaaaaaaactataaaagctccgctctcccagagtaaatcgaagatagatactaggaacagaaaatcaagttttacgaagaggaagaaagaaatacttgggatgtatgaacctaaaaaaatcgaattaaaaaaaccaacgcggatgtcaaacagaaggagccgaattcaagacgttttagatttcgaggagaaaatggaagaagattcttgccaacaggagcatttaaacaatgataaaagttcaccagaaaacttggaagaatgctcgtacaacccgaatgaattgaataaaagtcatagtttactggaggaattggttatagataaagatccctgcgcccaggaggagcttaaagatagttacaattcacaggataaattgggagaaaaggatgtcccgaagggatctgcgaaggaggataaatcaaaaaatgttgacgcgatcactggatgtgtattggggttggtagagaaggagtttgggcgtgatccggcctgcagtgaatcatccgagtctttgaagggaaatgccgaggtcattgtggccatgctgaccgaggagcaggatatgatgcggaagattaaaaagcggtcctcgcagtgttcttggtgggagaacgaagagccgcctgctaaaaagcgcaaatattagtgcgagaccaatatatttatattttgttgccttttcaaaattaacagtcataccgttcggctgcccacgtgctgacctttttacaccatcatccaccactcggcacaataaaccttcccttttgagcatgcgccctggtgaactgacttccttggggtggggcccgcagcacatgatgactcgctttcgcatcggttttgcacagtagtgcagttttgcaagctgctaactgggattacacacgccatcgactcatccaagtggactgtaaggtccacaaaatgacgtaagcaccaggcttatatgatgagcccacgggaactgaaacttggccagcgcgttgaggtaacgggtaaaaatctgcaaggtaaggtggcctatgtgggacgcactaacttcgctgccggactctggtacggcgtggttctggacgagccgctgggcaagaataatggaagcgtacacggcagcatttacttcaagtgtcccactaactgtggcctctttgtgcgcgcccagcagctggtgaggattgccgagttgccgaaggggggggacaatcgaaaagccgatgaaatgcagcgcgacggggccagagcgaagctttcaaggcggagtggcagtgggaagtctgtggaggagcaggtgagaaatttgtttgatgaggtttttaaagtggttgtacatacatactttaattactttcggtaggataaccagagggagcagcaggcaagcacatctgggaaagtaaaggccacttcgtcgactccatcaccgcagcataagaacagaaacactcattcctccatggaaacgtctttggctaaaacttctggaaaatttttggcgactcatcagcaaccattacagcttccaaaggtgagttgttgagcagtaggtcagatagaaaaattgagttattatgggaacacacttactactttagttctattattgaagatatgacctaccttaacgtattttcatattttgtaga

SEQ ID NO: 41972 - DNA, 1455 bp, DROSOPHILA
atgctttcaaatagaacggaaatacaaaaaaaaaaaaataagaagcggatcaatacacagaacgatcgacatctacccctggagcgatatgcctgccacttgtacacggaggtgctccgcaagctgcctgccgtggtgcgcaggtggtggaacgccactcagtccaggcagaagaacttcatagacaacctgaccacaaactacgtgagttctttgatttgcagcgaggagctcaaagcgatcgccaatcgcaaggagaagcacgagaatatgcaggttaccgttcattcctccacccgcgaagtgctagcggtctacgccatcgatgaggcacgcatggaacttgtaataacgctggctcccaattatccactgggagctgttaaggtcgagtgcggcaagcagatcggcggacgtgcttcctcccgaaatgtcggcatgcagttgaccatcttcctgacacaccagaatggcaccatatatgacggcctaactatgtggaaaaacaacttagacaaaaaattcgagggcgttgaagagtgctacgtgtgctatactgttatccaccaggagacttgccagctacccaaactaacgtgtaaaacgtgcaagaagaaattccacggaccttgtttggatgccaaaaggatttctaaactggtaaacgaagtgcagccaccacttcatttggaatccgaggaggagacgcaagatcaggaggaaaaagtacaaggtaatataaccaaaaaagagcgagtttcgatgagaaagggaaggaacatttctgtaaggaagttaatagccaaaaaaactataaaagctccgctctcccagagtaaatcgaagatagatactaggaacagaaaatcaagttttacgaagaggaagaaagaaatacttgggatgtatgaacctaaaaaaatcgaattaaaaaaaccaacgcggatgtcaaacagaaggagccgaattcaagacgttttagatttcgaggagaaaatggaagaagattcttgccaacaggagcatttaaacaatgataaaagttcaccagaaaacttggaagaatgctcgtacaacccgaatgaattgaataaaagtcatagtttactggaggaattggttatagataaagatccctgcgcccaggaggagcttaaagatagttacaattcacaggataaattgggagaaaaggatgtcccgaagggatctgcgaaggaggataaatcaaaaaatgttgacgcgatcactggatgtgtattggggttggtagagaaggagtttgggcgtgatccggcctgcagtgaatcatccgagtctttgaagggaaatgccgaggtcattgtggccatgctgaccgaggagcaggatatgatgcggaagattaaaaagcggtcctcgcagtgttcttggtgggagaacgaagagccgcctgctaaaaagcgcaaatattag

SEQ ID NO: 41973 - protein, 484 aa, DROSOPHILA
MLSNRTEIQKKKNKKRINTQNDRHLPLERYACHLYTEVLRKLPAVVRRWWNATQSRQKNFIDNLTTNYVSSLICSEELKAIANRKEKHENMQVTVHSSTREVLAVYAIDEARMELVITLAPNYPLGAVKVECGKQIGGRASSRNVGMQLTIFLTHQNGTIYDGLTMWKNNLDKKFEGVEECYVCYTVIHQETCQLPKLTCKTCKKKFHGPCLDAKRISKLVNEVQPPLHLESEEETQDQEEKVQGNITKKERVSMRKGRNISVRKLIAKKTIKAPLSQSKSKIDTRNRKSSFTKRKKEILGMYEPKKIELKKPTRMSNRRSRIQDVLDFEEKMEEDSCQQEHLNNDKSSPENLEECSYNPNELNKSHSLLEELVIDKDPCAQEELKDSYNSQDKLGEKDVPKGSAKEDKSKNVDAITGCVLGLVEKEFGRDPACSESSESLKGNAEVIVAMLTEEQDMMRKIKKRSSQCSWWENEEPPAKKRKY

SEQ ID NO: 41974 - DNA, 6342 bp, DROSOPHILA
acttcatttggaatccgaggaggagacgcaagatcaggaggaaaaagtacaaggtaatataaccaaaaaagagcgagtttcgatgagaaagggaaggaacatttctgtaaggaagttaatagccaaaaaaactataaaagctccgctctcccagagtaaatcgaagatagatactaggaacagaaaatcaagttttacgaagaggaagaaagaaatacttgggatgtatgaacctaaaaaaatcgaattaaaaaaaccaacgcggatgtcaaacagaaggagccgaattcaagacgttttagatttcgaggagaaaatggaagaagattcttgccaacaggagcatttaaacaatgataaaagttcaccagaaaacttggaagaatgctcgtacaacccgaatgaattgaataaaagtcatagtttactggaggaattggttatagataaagatccctgcgcccaggaggagcttaaagatagttacaattcacaggataaattgggagaaaaggatgtcccgaagggatctgcgaaggaggataaatcaaaaaatgttgacgcgatcactggatgtgtattggggttggtagagaaggagtttgggcgtgatccggcctgcagtgaatcatccgagtctttgaagggaaatgccgaggtcattgtggccatgctgaccgaggagcaggatatgatgcggaagattaaaaagcggtcctcgcagtgttcttggtgggagaacgaagagccgcctgctaaaaagcgcaaatattagtgcgagaccaatatatttatattttgttgccttttcaaaattaacagtcataccgttcggctgcccacgtgctgacctttttacaccatcatccaccactcggcacaataaaccttcccttttgagcatgcgccctggtgaactgacttccttggggtggggcccgcagcacatgatgactcgctttcgcatcggttttgcacagtagtgcagttttgcaagctgctaactgggattacacacgccatcgactcatccaagtggactgtaaggtccacaaaatgacgtaagcaccaggcttatatgatgagcccacgggaactgaaacttggccagcgcgttgaggtaacgggtaaaaatctgcaaggtaaggtggcctatgtgggacgcactaacttcgctgccggactctggtacggcgtggttctggacgagccgctgggcaagaataatggaagcgtacacggcagcatttacttcaagtgtcccactaactgtggcctctttgtgcgcgcccagcagctggtgaggattgccgagttgccgaaggggggggacaatcgaaaagccgatgaaatgcagcgcgacggggccagagcgaagctttcaaggcggagtggcagtgggaagtctgtggaggagcaggtgagaaatttgtttgatgaggtttttaaagtggttgtacatacatactttaattactttcggtaggataaccagagggagcagcaggcaagcacatctgggaaagtaaaggccacttcgtcgactccatcaccgcagcataagaacagaaacactcattcctccatggaaacgtctttggctaaaacttctggaaaatttttggcgactcatcagcaaccattacagcttccaaaggtgagttgttgagcagtaggtcagatagaaaaattgagttattatgggaacacacttactactttagttctattattgaagatatgacctaccttaacgtattttcatattttgtagaatccagtgacttgtgaaagcagtgtaaggaattcgcagtctaaagaaactggagaagtaaccttgtctcccaagaagtcatcagatattgagcaatcaaagaagcattcacagcaggaaacaaacgagactaaccagccagcaagcaaggaagttgagcctaagaatgaaaatgagctacagagcacggaagctgcaaattcaatgctggatacaccagtcaatcctctccagaccagcacaattgggcagttgcccccacagaaggccagtgctcaactgacgccgccacctttgacatgtaaccagagaagatccacatcctacacccagctgcgtccaacaaggattagtcagccgaagccaacaacggctcaggcccagagctccacggcgcagcttaccctggccatgccagtccccttggctctggcacccaagcgcagcaagaccagcatgagtcccacgagctccattaagcgggttgctccagctgccttcgtagagccgcgttttctagagatcctgagaccgcagtttacacctgggccagctctccgaactcccagttcagtggctccgcctctagataaccctgagcttcgtcaactgagagaggaacttcaattgctaaggggccaaaagagcgaggataagcttaagcttctggaactagagcggatgcgtatacacaacgagcagctgatggagtttaagtcgcagattatggcgcagcaggtactgctccagagggaactgcagagatcgcgacacgaactaagggaagcacaggatgtgtcgtcgaaattgaaaagggagctagacgagatagcagagagcatagaacttctaaccctggacaaggaaatggcggaggagcgcatggagaccctgcaaatggaactggaaatggctcaggaaagaaatgacgaactgagcttggatgttgagatcctaaaggcggagcaggaggagcagcagggtcaacgaatcgagaagagtgaaaaacaaatcggatcaggagtgaccaatcaatccgcaggcgagttccttcgcttggagcaatataatcagcgccttcgggagacggttgtccggttgcgagacactctcgccgaggagaagcagattgggcagcgaacgcacaaggaattggagaccaagcattcggagattaacgagctaaaaagcatcaaggagttgctcagcagaagggtggacaacatggaaatgcagctaatggatttaaaagagcaggttgatgcttccctcggagcagaggccatggttacccaactggcatctttaaaactggagttggaagatcgcgtcaagctcctagaagacgaagtcaacgaactggaggcacttgagcaaatccaggaacagcttattgagagcaaccaagagctggaaacagatcttcgcgaggagattgacaagctaagtggtcatgttaagatcctggagcaacagaaaaatgctgctatggaaagtctctacgaccgcgatgtgaccatcatgaaattccgagacttggtgagacagctgcaggagcagcttcagctccgagcagatggcaccctttccattgaggacttcagtagtgccaacgaatcccaacaggaggatggatccaaccagagtcagacggactaccagcacatttttagtgtgagcaaggcctacggcagggccctggagcagcagatcaagactgtggagctacggttacagcgccagcacctggagcacgtcctagccttcgtcccagaacagttccttttgcgtggaggggagcatgatgtggtgctggtcatgctcctactggagcggatgaacgagaaattgaccattgtgtgccaggccattaacgaaaagtttcccacggcttgtgagtttggtaagtgttatccccaatgttcagttcagaattatataaaaaagtaaactcattatgacaggtcgcgatgccatcttcgagggctactccgtgcagcggtacatcttcaggtcgcaatgcctctatctgctaaagagtcttcaactggtgcttcagcagttccgccacggactaacccattgcgactacgagttgtgcacccatgcagccatttaccgcagtgatcttgatgcccaggagcagcagctcgacgagttcgtacggctgctcaaaactggtcaactggatgaacatacgaactgtgagccaattcaacgggtgcttcactatgtgagtggtttgcaccagaatttgatgccacctcaaacgcttgtagagctgctggacgaacaacagctgtatgaagctctgatcgaggtctacgaggcgggcttggacgcggtgaatgcaaatgcaggtctgatgcacaccatcatacaactgggccacgagcagaccgcctccttcagctgcatgcagatgctgatggagcagagctgtgcccacaagcagaagctaaagaagctacagaggaagcttagcggcagcaagacggcgtcttggacgggaatgcagtgtgccagatatcagaggatcatggaagcgaacgaggcattaggtacccttatccgactgttgggctgcactgcccgagaagctagcaaggattcgaatggaggaatcgcccacgaaaagttgtggaggatgctggtcctcaactataacaagttcgcgccgagtcaggaggcagaggaacctagagaggtggatgcctacagccagcggtgcatgcagcttctcgaggaacagtttgacgagctattcgcgctgctagattccaccgatgtgaacacagagtatgtgcgtcatcccacttgtaatactttacaggagcgggccgcccaggtgaagcgacactacgaggacgtgaaaaacctcgagctgactgtggctgaacgggagaaggaaatcaaaagcctcaagtacacagccaagatgaaacagcaggactactcggagctgcaggtacgcaaggagatggccgagaaacagctgagcaagcagtgtcacgtgctagccggattcgccgaagctgtggagcagctggagcagtcgatcctggccaaagaggcggccctcggacaggcattgaacatgctagcggacaagctcacaagcctggagcagtcccaggagcactggaaggagcagcagcaggcggacagtgcatgtctgaccagcaccacgataagctccaaccgggagatgaacatgctccatcaggctcttcgccaggagcgatccctgcgtgttgagctccagggcagcgagatgagaaagactttcgccgctttagaaccattgcatgttcctcaagccgggagccaggagctgaccgacctggagaaggaccttcgctcgttgaagaaccagtggctcttggcccatctggaaatgggtgctgctggccgccaacgacgctcggagatcgagctgcagggcagccgcgtcctgcgacatatcttccacacatattgcacacagcatccgcatcgggccaagaacaccgattttggcctcttcatcactgaggatctgcgcagagcattcgggcaaaatttctagtaatttcggtattccggtcgtaacaaaggtatatgtgattcgcggcttatatgacccattaaatatactaataattatttgtacgaagttagttatatacaatacatgcatatatgaaaactgtacacttatatagttcatttcgagtttatctggcaataaacaaatatacattaattagacaattcaaacgaaaagtgtttctctaaattgttagaggatctctcgtattctagttgggaaaaaagtattgtttgggagtgaaagattagggtccttttaaacattccaattccgatagttaaacaagattttttttttttatataattaaacgccttcagcgtgtattcatatatatgcagttatagtatattttttaaggctggtaaaaagttgttcgtattattgttaaaaaatgaattaggggattatcaatctcaatgtcgagcaccccgactgtggcgatcttaaatatcgtttatttgaaatgaacattttacaaacatcaatatacaatcctttatgtacaaatagaggcgcgcagtttgagatgagagcagcgcaagcagttcaattaaacgaaacgcttatcacatgagcacaaaatcggggatccaaagtggcaggtgtgggtcggatatatggttggatatcgggtatatcgggacaagatggtggccttgggacatcgctgtcgttgtggggtttacataaatacgtttaatgtttaatgagaagaatattggagttgaggctatttacagttgctgaatgaacaaaacaatttgcggtctgcgaagagctgcgcggaaaaataaatgaagtgttaataataataattgattataatagtataataataacaaatagtgtcaattaagtttctttagagtggttcagaaaaccatttatgtagatataggtatttgctatcacttctaataaccactttatataaacttcaaggccagcacaatcagtggaaaggaaactaatta

SEQ ID NO: 41975 - DNA, 4098 bp, DROSOPHILA
ctaactgggattacacacgccatcgactcatccaagtggactgtaaggtccacaaaatgacgtaagcaccaggcttatatgatgagcccacgggaactgaaacttggccagcgcgttgaggtaacgggtaaaaatctgcaaggtaaggtggcctatgtgggacgcactaacttcgctgccggactctggtacggcgtggttctggacgagccgctgggcaagaataatggaagcgtacacggcagcatttacttcaagtgtcccactaactgtggcctctttgtgcgcgcccagcagctggtgaggattgccgagttgccgaaggggggggacaatcgaaaagccgatgaaatgcagcgcgacggggccagagcgaagctttcaaggcggagtggcagtgggaagtctgtggaggagcaggataaccagagggagcagcaggcaagcacatctgggaaagtaaaggccacttcgtcgactccatcaccgcagcataagaacagaaacactcattcctccatggaaacgtctttggctaaaacttctggaaaatttttggcgactcatcagcaaccattacagcttccaaagaatccagtgacttgtgaaagcagtgtaaggaattcgcagtctaaagaaactggagaagtaaccttgtctcccaagaagtcatcagatattgagcaatcaaagaagcattcacagcaggaaacaaacgagactaaccagccagcaagcaaggaagttgagcctaagaatgaaaatgagctacagagcacggaagctgcaaattcaatgctggatacaccagtcaatcctctccagaccagcacaattgggcagttgcccccacagaaggccagtgctcaactgacgccgccacctttgacatgtaaccagagaagatccacatcctacacccagctgcgtccaacaaggattagtcagccgaagccaacaacggctcaggcccagagctccacggcgcagcttaccctggccatgccagtccccttggctctggcacccaagcgcagcaagaccagcatgagtcccacgagctccattaagcgggttgctccagctgccttcgtagagccgcgttttctagagatcctgagaccgcagtttacacctgggccagctctccgaactcccagttcagtggctccgcctctagataaccctgagcttcgtcaactgagagaggaacttcaattgctaaggggccaaaagagcgaggataagcttaagcttctggaactagagcggatgcgtatacacaacgagcagctgatggagtttaagtcgcagattatggcgcagcaggtactgctccagagggaactgcagagatcgcgacacgaactaagggaagcacaggatgtgtcgtcgaaattgaaaagggagctagacgagatagcagagagcatagaacttctaaccctggacaaggaaatggcggaggagcgcatggagaccctgcaaatggaactggaaatggctcaggaaagaaatgacgaactgagcttggatgttgagatcctaaaggcggagcaggaggagcagcagggtcaacgaatcgagaagagtgaaaaacaaatcggatcaggagtgaccaatcaatccgcaggcgagttccttcgcttggagcaatataatcagcgccttcgggagacggttgtccggttgcgagacactctcgccgaggagaagcagattgggcagcgaacgcacaaggaattggagaccaagcattcggagattaacgagctaaaaagcatcaaggagttgctcagcagaagggtggacaacatggaaatgcagctaatggatttaaaagagcaggttgatgcttccctcggagcagaggccatggttacccaactggcatctttaaaactggagttggaagatcgcgtcaagctcctagaagacgaagtcaacgaactggaggcacttgagcaaatccaggaacagcttattgagagcaaccaagagctggaaacagatcttcgcgaggagattgacaagctaagtggtcatgttaagatcctggagcaacagaaaaatgctgctatggaaagtctctacgaccgcgatgtgaccatcatgaaattccgagacttggtgagacagctgcaggagcagcttcagctccgagcagatggcaccctttccattgaggacttcagtagtgccaacgaatcccaacaggaggatggatccaaccagagtcagacggactaccagcacatttttagtgtgagcaaggcctacggcagggccctggagcagcagatcaagactgtggagctacggttacagcgccagcacctggagcacgtcctagccttcgtcccagaacagttccttttgcgtggaggggagcatgatgtggtgctggtcatgctcctactggagcggatgaacgagaaattgaccattgtgtgccaggccattaacgaaaagtttcccacggcttgtgagtttggtcgcgatgccatcttcgagggctactccgtgcagcggtacatcttcaggtcgcaatgcctctatctgctaaagagtcttcaactggtgcttcagcagttccgccacggactaacccattgcgactacgagttgtgcacccatgcagccatttaccgcagtgatcttgatgcccaggagcagcagctcgacgagttcgtacggctgctcaaaactggtcaactggatgaacatacgaactgtgagccaattcaacgggtgcttcactatgtgagtggtttgcaccagaatttgatgccacctcaaacgcttgtagagctgctggacgaacaacagctgtatgaagctctgatcgaggtctacgaggcgggcttggacgcggtgaatgcaaatgcaggtctgatgcacaccatcatacaactgggccacgagcagaccgcctccttcagctgcatgcagatgctgatggagcagagctgtgcccacaagcagaagctaaagaagctacagaggaagcttagcggcagcaagacggcgtcttggacgggaatgcagtgtgccagatatcagaggatcatggaagcgaacgaggcattaggtacccttatccgactgttgggctgcactgcccgagaagctagcaaggattcgaatggaggaatcgcccacgaaaagttgtggaggatgctggtcctcaactataacaagttcgcgccgagtcaggaggcagaggaacctagagaggtggatgcctacagccagcggtgcatgcagcttctcgaggaacagtttgacgagctattcgcgctgctagattccaccgatgtgaacacagagtatgtgcgtcatcccacttgtaatactttacaggagcgggccgcccaggtgaagcgacactacgaggacgtgaaaaacctcgagctgactgtggctgaacgggagaaggaaatcaaaagcctcaagtacacagccaagatgaaacagcaggactactcggagctgcaggtacgcaaggagatggccgagaaacagctgagcaagcagtgtcacgtgctagccggattcgccgaagctgtggagcagctggagcagtcgatcctggccaaagaggcggccctcggacaggcattgaacatgctagcggacaagctcacaagcctggagcagtcccaggagcactggaaggagcagcagcaggcggacagtgcatgtctgaccagcaccacgataagctccaaccgggagatgaacatgctccatcaggctcttcgccaggagcgatccctgcgtgttgagctccagggcagcgagatgagaaagactttcgccgctttagaaccattgcatgttcctcaagccgggagccaggagctgaccgacctggagaaggaccttcgctcgttgaagaaccagtggctcttggcccatctggaaatgggtgctgctggccgccaacgacgctcggagatcgagctgcagggcagccgcgtcctgcgacatatcttccacacatattgcacacagcatccgcatcgggccaagaacaccgattttggcctcttcatcactgaggatctgcgcagagcattcgggcaaaatttctag

SEQ ID NO: 41976 - protein, 1339 aa, DROSOPHILA
MMSPRELKLGQRVEVTGKNLQGKVAYVGRTNFAAGLWYGVVLDEPLGKNNGSVHGSIYFKCPTNCGLFVRAQQLVRIAELPKGGDNRKADEMQRDGARAKLSRRSGSGKSVEEQDNQREQQASTSGKVKATSSTPSPQHKNRNTHSSMETSLAKTSGKFLATHQQPLQLPKNPVTCESSVRNSQSKETGEVTLSPKKSSDIEQSKKHSQQETNETNQPASKEVEPKNENELQSTEAANSMLDTPVNPLQTSTIGQLPPQKASAQLTPPPLTCNQRRSTSYTQLRPTRISQPKPTTAQAQSSTAQLTLAMPVPLALAPKRSKTSMSPTSSIKRVAPAAFVEPRFLEILRPQFTPGPALRTPSSVAPPLDNPELRQLREELQLLRGQKSEDKLKLLELERMRIHNEQLMEFKSQIMAQQVLLQRELQRSRHELREAQDVSSKLKRELDEIAESIELLTLDKEMAEERMETLQMELEMAQERNDELSLDVEILKAEQEEQQGQRIEKSEKQIGSGVTNQSAGEFLRLEQYNQRLRETVVRLRDTLAEEKQIGQRTHKELETKHSEINELKSIKELLSRRVDNMEMQLMDLKEQVDASLGAEAMVTQLASLKLELEDRVKLLEDEVNELEALEQIQEQLIESNQELETDLREEIDKLSGHVKILEQQKNAAMESLYDRDVTIMKFRDLVRQLQEQLQLRADGTLSIEDFSSANESQQEDGSNQSQTDYQHIFSVSKAYGRALEQQIKTVELRLQRQHLEHVLAFVPEQFLLRGGEHDVVLVMLLLERMNEKLTIVCQAINEKFPTACEFGRDAIFEGYSVQRYIFRSQCLYLLKSLQLVLQQFRHGLTHCDYELCTHAAIYRSDLDAQEQQLDEFVRLLKTGQLDEHTNCEPIQRVLHYVSGLHQNLMPPQTLVELLDEQQLYEALIEVYEAGLDAVNANAGLMHTIIQLGHEQTASFSCMQMLMEQSCAHKQKLKKLQRKLSGSKTASWTGMQCARYQRIMEANEALGTLIRLLGCTAREASKDSNGGIAHEKLWRMLVLNYNKFAPSQEAEEPREVDAYSQRCMQLLEEQFDELFALLDSTDVNTEYVRHPTCNTLQERAAQVKRHYEDVKNLELTVAEREKEIKSLKYTAKMKQQDYSELQVRKEMAEKQLSKQCHVLAGFAEAVEQLEQSILAKEAALGQALNMLADKLTSLEQSQEHWKEQQQADSACLTSTTISSNREMNMLHQALRQERSLRVELQGSEMRKTFAALEPLHVPQAGSQELTDLEKDLRSLKNQWLLAHLEMGAAGRQRRSEIELQGSRVLRHIFHTYCTQHPHRAKNTDFGLFITEDLRRAFGQNF

SEQ ID NO: 41977 - DNA, 2615 bp, DROSOPHILA
aaggcggcagcttttgcttgaagaaataaggaaatgctgttaaactaaccaataaataaactttgtagtgttgtactttgaaatccttatgtaaatatccaaagcgaacctattttgctataaataattatgtgtttttcctagaaatctgttggcttcaacattatatttattatatagttattagtagttttaaaacttgaactacaggatttctttttatttaatatgcatgttattcctatagatagcgaaacaatttatgcaaataaacgtcttaaaaataattaacatcagataacgtaggctaaataccaatatgcttatattttcacgcatttcaaatttccgagcttaaagtctattagccttgtaaattatatgcattaaaaaacactatcggtaagttaacaccaattcggaagctctgggtgccccacagcagaccccctggtcagaaacaccaaccgattggacggtccgcccaacgctgccctccccttctcagccccttaccgcaccgtccgtctcaaggtcatttggagtgaagtaggcgaaaaagagggtccaaccgtggaaacgcagcgaggcgaggcgaggcggctattgctgagcaatttgaaagcgggccacacttgttgattgatttctaagcaacaaaatcgaaaagctttgcgtttttcaagcatttgagcgatgttcacgccccgcttaatgatgatgttgttgtttctggcaagttttaatttgccaatcgaccgaccgcccaagactatgaatacgaatggggaaaaatgaaaatttgcacaaaaattcgaagcattttttatacccatttttggggctcttacttttttctagcctatttagcccgcagtctaaaatgtaattaatcgatccatagaatggccagaagtataaaagcattgggcattgtctggtgattataacagttccaatcgtgatttaggccaggcaagtcaatcagaaaccaacgaaaatggcccaccaattgagcatcctctgctgcgcacttctgggagtggctgctgctagctacatccctcatggtggatatagtcacgaacacggcgtggggtacagcatccagacgcatcacgaggcgcccaagcagtggcaggatcaccaccaggctcaccaccaatgggtggatgtcccaaaggcccattcatggggcacagttcaggatcatcaccaccagcagtgggctccagtcgctgcgcacgatagccaccaccagtggagccaccacgaggaacccaaacaccatcccaaatacgaattcaattacggggtgaaggacaccaagaccggcgacatcaagcagcagtgggagacccgcgatggcgacaaggtcaagggaggctacaccatgaaggaggccgacggacgcaccaggatcgttgagtacaccgccgactcccacaacggattccaggcaaccgtgaagcatgtgggacacgccagtcacttggagcacagccactcatatggccagcaatacggacatgggcatggtcatgccaccagctacgtggatgtcaaacaggacaccagcagcaaatgggaggacaagagcaacaagtggtggtagaggagctgacctaactgactgactgcaagcgattcggaccgacttaattattgtaaatagaactacaaaattgttaacttaaatagtaggtaaatatatcaaagtgcagaaaaaagctacaaatcaaactactttactatttaaagtttttacaatagttctgagatttaagaccacaacgaacaccgtttattaaatgagagaaacaacttaccgatccaataattctaagatacattcgatacggaggatgttgaggccttagtgtcttgcagcctttttgtattctagctcacataaggaggttcggaagatcttacgcacatcttttctaaggactttgaaggcttcggcttgttcagaaaagtccttccaaaagttatcatcagagtccggtaaagatatggtaaagatggtaaagatattcctgattttcacaattttttaattcatctacatcgccgtcgctgtcgttacttaagttcccctgcttattcgactcgatctcgatgcccagagtcattgacttcgaaacgaatgccattgaaagttttttcggacctcccatttttgatattattaatctgctgagacagagaaacaacgcctgagaaatcctatttattgcctattttccaattgagttgataagtagtagaaagctataggtgaccacataagatcttaaaaagtgcctagcctggtcagcttaaatttaccatttgtgtacgttgaactaaattaaaataatgagtacagcaaaacacatgttattttcaaaaaatttccacacttccctaataattgtatctattgtataacaaaaagtgtagaactttgtagcacagtgtaaaatacatacaacatctactttacaaacattgcttcgtacacagtgtcaaaaatgtcgaaaactgagacccctgtcggaaatttacagaacttcgggttgcactgcttacatccggcaaagcggtttgttacatgcaaggcagttcat

SEQ ID NO: 41978 - DNA, 615 bp, DROSOPHILA
atggcccaccaattgagcatcctctgctgcgcacttctgggagtggctgctgctagctacatccctcatggtggatatagtcacgaacacggcgtggggtacagcatccagacgcatcacgaggcgcccaagcagtggcaggatcaccaccaggctcaccaccaatgggtggatgtcccaaaggcccattcatggggcacagttcaggatcatcaccaccagcagtgggctccagtcgctgcgcacgatagccaccaccagtggagccaccacgaggaacccaaacaccatcccaaatacgaattcaattacggggtgaaggacaccaagaccggcgacatcaagcagcagtgggagacccgcgatggcgacaaggtcaagggaggctacaccatgaaggaggccgacggacgcaccaggatcgttgagtacaccgccgactcccacaacggattccaggcaaccgtgaagcatgtgggacacgccagtcacttggagcacagccactcatatggccagcaatacggacatgggcatggtcatgccaccagctacgtggatgtcaaacaggacaccagcagcaaatgggaggacaagagcaacaagtggtggtag

SEQ ID NO: 41979 - protein, 204 aa, DROSOPHILA
MAHQLSILCCALLGVAAASYIPHGGYSHEHGVGYSIQTHHEAPKQWQDHHQAHHQWVDVPKAHSWGTVQDHHHQQWAPVAAHDSHHQWSHHEEPKHHPKYEFNYGVKDTKTGDIKQQWETRDGDKVKGGYTMKEADGRTRIVEYTADSHNGFQATVKHVGHASHLEHSHSYGQQYGHGHGHATSYVDVKQDTSSKWEDKSNKWW

SEQ ID NO: 41980 - DNA, 5348 bp, DROSOPHILA
cgactattccttcgtgcccacatcaactgcaaccaaatggcggatttgatcataggtgagcactccaaggtactatcttgatctatctatcagcacaactttttttgtttccagcccaaaattttataggcagtgtgatctgccagtgcgacgacgagggcaccgaaagcgaaacggaggacgacaacatggtcgaggatggcaccatctttggaatcacctctgtgctgaacctgaccgccaaaaaggatcagcccagcatcgcccagttaaggacctacatactggatcgcgccaagacgcacgcttctccggaggttcagcagcagttgaaggagattctagacagcgagcagcgccatgtgggattcttgatcaacgagcgctttatcaatatccctgcccagatctccgtgccactgctgcagagtttgcagcaagaaatcgaagccgccaaggccaagaaaatgaaatacgactttggcactctgctgctgctggttaagttctacaggaaagagtcgaagaagggcaaaccgggcgaggacgtgtacaccaacgctgaggatgagttgctttcggatcgggctaagttctccttcgagtattccatggcctctgaaaccgattcgggcatgtctggcgattggctggaaggcgatgccgtgatgacgccctacaggaaactcctggtcctggaggccaaaaaacttccgcagcttattgacgatatacaacgctttattaatggcgaataaatattttttacatttaaaactgctgtgttatttggccttaatataacaccccgacaaatatctaattaagaagtaataatgtccggtctctaacgaccgataagcttctatttctttgtagtcccatacaaagagtatcaaaaattcgaaccgaaagctttccacatcctttatgacaattggcaacgcgggcaaaccacaaacagctgtcacttggccggcatttgaaagcttcgcacatgccggctggtctactgtgaaaaaaaaacctggttgccattcctttgttttttgccactggttagttttggcccagaaactgcatccaccgtggacgtgactggcaagaggaacccacaataacaattccgaagaccgagcgacgtgagtagactttgcctttattgtttacaagttatatccgagttctagaattacgtacatagcgagcatactggcgattattcatcgctcgtgcgatttgttttcattcgaaaacgcaagtagcaattaaaaaaaaaaaacctaaagcccggctcgctagtaaaatgtataaaaagcttggccacccagccagaacattgcaaatcgtcgcggagagctatcacaatcgctccttatcgccagctttccgttccagatcccgctcccaagtttccagtttccagctgcagcgctttgttcccatcagggaggttcagtgacgccccacttgccgatcaaccaagtcgcgtgagctgcctgcgaaaaagtactcatcatgggtatcgaaaagtgagtatttattaccaacagttattagagggtgtgttttaagttagcgcggatcagttatctagccaccgcttagcgaccgattggaaaagctctcaaagattcgccatcttttacagtgagggttagtcgcttagcatccatcaattgctatcttatttacctttcccataattccaaaacgaaattagaatgtttttagtactgcatatctcagcgtttatcagttttaattagttgccggcaaggaatagatgtcatgaaaattccaaactttatcttttcccaaaataaaaacaatgtttggcgaaatactgtataaaagttaaaggggggaggtcacttaattttatcattattacttagataacgagttcttgctacttctggaaacagatatatatagatcaacttttattgtttgatatggggcacttcaaaagataacacaattaaatggtcagcgacataggattattctccaaaatattatagacccagttacctaaggattggtatttagtagaaacacttgaataagattacaaatattctaaataagtactttaacaccatttgtgctaatacttggtacacttgtttctaaattggaaatcggtttgtgattatggtcatttcgaaagcttatcgcgattctttatagcacttcgagttaagataagcccagcgccaggaatgagggtaaacgaaaggggaacacactgaaacatggccatggttgctcctaatacagtggggacattttcttttgaaataataaattgaaatacaaaggcaacaggctgttatgcaatatgaacgactgcatcagttaataaagcaaatgtgacgtgataaaattcaattcaattaaacgctattgcacatttagttgacacccagaaatgtttcttaatgaataccaataacgattccgttgcgcactttaactctactctacgtgtgcccctccagaattctaccatgcaccctccggctgaacaagctgatgagtctggccggcaacgactgcctgtgcatcatcgatcgcaatgcggttcccaatgaactgaaggccaccttcgaggagcaccgcaaattcgacaagtccttcgacagcagcatatcctgctttaaggtgcccaacgtggatcaacctgtggtctatgcccccgtctccgagctcaccgactacgacgatgtgaggagctaccaggaggcggccaagcggtccatggagaaggttctcaaggtgggttttttttttctatacatattgtgtgaattatgaaagaaaatgtatatgtattctttgccaggctggattccacacgccgttgctgtttgtgcccaaggttaagcgcttccccgaggtcgaactctgcaccgttctgggagctctggagcagctttatgtggtaatatggattatgtttacttttatttcaatcaatgtgctaaaacacgttttttagcccattcaattgcgcgaggcaggaactttgaaggacccccgtgtgaccacgctcagtgtccagatcgatgatccaagggccgaagctattttccaggaagctctcattctggaggccggtcgctttgtggcccgcgacatcggagttggggacccggagcgcatgacgcccatccaggtggagaagtacatcaagccgttgttcgacaagctcaacgtgaatgtgatcagtgacacccaggtgttgcagaaggagtatcccctgtttgccgccgtaaaccgggctgctgatgcagtggagcgtcatcgtggtcgcatcattttcctggagtacaagcctccaaagccggcgagaaaaactctgatgctggtcggcaagggtgttacctatgacaccggtggtgctgacatcaaggccggtggtgtgatggccggtatgtcgcgcgacaagtgtggagcggctgctgtcgctggattcatgcaggtggtcagtcaactgcaaccggatgatatccatgttgtggctgccctgtgcatggtgcgcaattccgtgggcgaggagtgctacgtggccgatgaggttatcacctcgcgagctggtcttcatgtgaggattggaaatactgatgccgagggtcgcatgtgcatgaccgatgccctgtgccgcatgaaggagttggtcgtggagcagaatctcccggatccgcatcttttcaccattgccaccttgactggtcacgccttcatctcggcaggtgagggtcagtcgattgccatcgataacagcgtggcccatcgggaggatcacgccagaagactgcaggctgctggacaggccttcggagagcccttcgaagtgtccattctccgtcccagtgacttctcttttaacgctggaaaggtgattggcgaggatttggtgcaggccaataatgccccgtcggtgaggactcctcgcggtcaccaggtgcccgccgcctttatgattaaggcttctggactggacaaacacgggttggattcaatgctgcccattaagtacacccatattgatatcgccggcagtgccggtgagcacccagcgatgcccacagctgcccctcttgtttccctggtgaagacccatctgcagaagtaaatcatgtccacctaatattcaggaggatgtgtacacgatcaccacaaacagtacttatacacccacgtgcttagctaaccaacaatattatcctactaactgcatcactgttttttaataaaggcaaaaccgagttcagattgtattcataaatgtatgtcactaatttggtaatcgtttacaaataaatgtgaaaatgatttgtttttttccttaagcttacaaagcaaatatctcattatattcatcaacatggaaatataaacattatatcatcccattatagagaataaccaccctacatatatttgttaagtatacaagaaagccgcgtgggtattcggtcttttttatttcttttttattattactgcatttcccagctgcattgtttgcataattggcgggtgccctgcatttcgagctcttgttggccatctacggtatggctcgtactcctgctcttcccctttcgcagccttttctcttcagctttgcagcgccttctttttttgtagcttggcccacagcctagaacccgttagtcgcttcttggccatgctcttcgctttgggccccgttcccgggagcttggcccagcaacttggcgtggattggcttggttgggggatggggatgtggatggggcccgcttgtcagctgtcgcatgtgtcttggtaccgttattgcctggctttggaaactcggtcaagagtgtctcattcatgctgtgattgcataatataccgttggctcccgttggccttcttctggcttctgactgcggcctcttcccgttcttggccgttctcccgtaccaataccaacttggttccaacctctttctccatctgcgatgggtgcgcttctgggtaatttattgacagtcacactggccacttttggtcatctggccaagtcggaacacttggactctgaccgggctaacggtacttattattgatgaacgcaaaagtctttttcgttgacttgtctcccatttacaatccgttagtgtgaatttattgccaaggcggcacgaaccaagaagaaggcctcagcagcaacagaagtgggagaaaagagggaagatctctggtcttgggaggctttctggcttcttgaccacttaacggaccatcagttgacctgattatggcaggactggttcctggacgcttcctggccactatccgccaaatct

SEQ ID NO: 41981 - DNA, 1959 bp, DROSOPHILA
ccggctggtctactgtgaaaaaaaaacctggttgccattcctttgttttttgccactggttagttttggcccagaaactgcatccaccgtggacgtgactggcaagaggaacccacaataacaattccgaagaccgagcgacatcccgctcccaagtttccagtttccagctgcagcgctttgttcccatcagggaggttcagtgacgccccacttgccgatcaaccaagtcgcgtgagctgcctgcgaaaaagtactcatcatgggtatcgaaaaatgagtctggccggcaacgactgcctgtgcatcatcgatcgcaatgcggttcccaatgaactgaaggccaccttcgaggagcaccgcaaattcgacaagtccttcgacagcagcatatcctgctttaaggtgcccaacgtggatcaacctgtggtctatgcccccgtctccgagctcaccgactacgacgatgtgaggagctaccaggaggcggccaagcggtccatggagaaggttctcaaggctggattccacacgccgttgctgtttgtgcccaaggttaagcgcttccccgaggtcgaactctgcaccgttctgggagctctggagcagctttatgtgcccattcaattgcgcgaggcaggaactttgaaggacccccgtgtgaccacgctcagtgtccagatcgatgatccaagggccgaagctattttccaggaagctctcattctggaggccggtcgctttgtggcccgcgacatcggagttggggacccggagcgcatgacgcccatccaggtggagaagtacatcaagccgttgttcgacaagctcaacgtgaatgtgatcagtgacacccaggtgttgcagaaggagtatcccctgtttgccgccgtaaaccgggctgctgatgcagtggagcgtcatcgtggtcgcatcattttcctggagtacaagcctccaaagccggcgagaaaaactctgatgctggtcggcaagggtgttacctatgacaccggtggtgctgacatcaaggccggtggtgtgatggccggtatgtcgcgcgacaagtgtggagcggctgctgtcgctggattcatgcaggtggtcagtcaactgcaaccggatgatatccatgttgtggctgccctgtgcatggtgcgcaattccgtgggcgaggagtgctacgtggccgatgaggttatcacctcgcgagctggtcttcatgtgaggattggaaatactgatgccgagggtcgcatgtgcatgaccgatgccctgtgccgcatgaaggagttggtcgtggagcagaatctcccggatccgcatcttttcaccattgccaccttgactggtcacgccttcatctcggcaggtgagggtcagtcgattgccatcgataacagcgtggcccatcgggaggatcacgccagaagactgcaggctgctggacaggccttcggagagcccttcgaagtgtccattctccgtcccagtgacttctcttttaacgctggaaaggtgattggcgaggatttggtgcaggccaataatgccccgtcggtgaggactcctcgcggtcaccaggtgcccgccgcctttatgattaaggcttctggactggacaaacacgggttggattcaatgctgcccattaagtacacccatattgatatcgccggcagtgccggtgagcacccagcgatgcccacagctgcccctcttgtttccctggtgaagacccatctgcagaagtaaatcatgtccacctaatattcaggaggatgtgtacacgatcaccacaaacagtacttatacacccacgtgcttagctaaccaacaatattatcctactaactgcatcactgttttttaataaaggcaaaaccgagttcagattgtattcataaatgtatgtcactaatttggtaatcgtttacaaataaatgtgaaaatgatttg

SEQ ID NO: 41982 - protein, 492 aa, DROSOPHILA
MSLAGNDCLCIIDRNAVPNELKATFEEHRKFDKSFDSSISCFKVPNVDQPVVYAPVSELTDYDDVRSYQEAAKRSMEKVLKAGFHTPLLFVPKVKRFPEVELCTVLGALEQLYVPIQLREAGTLKDPRVTTLSVQIDDPRAEAIFQEALILEAGRFVARDIGVGDPERMTPIQVEKYIKPLFDKLNVNVISDTQVLQKEYPLFAAVNRAADAVERHRGRIIFLEYKPPKPARKTLMLVGKGVTYDTGGADIKAGGVMAGMSRDKCGAAAVAGFMQVVSQLQPDDIHVVAALCMVRNSVGEECYVADEVITSRAGLHVRIGNTDAEGRMCMTDALCRMKELVVEQNLPDPHLFTIATLTGHAFISAGEGQSIAIDNSVAHREDHARRLQAAGQAFGEPFEVSILRPSDFSFNAGKVIGEDLVQANNAPSVRTPRGHQVPAAFMIKASGLDKHGLDSMLPIKYTHIDIAGSAGEHPAMPTAAPLVSLVKTHLQK

SEQ ID NO: 41983 - DNA, 3063 bp, DROSOPHILA
caggatgtcagtacaagcagatgatccactggagccattctacttcgagcacgaggagcaggagatctgcgggaagctcgtagctcccattacagatagcttccaggaggattaccccagtgttgtagatcgttttttcaccagatattactacttcaagggagatgttccctaccaagtgctctaccactccaatcgcatttgtctgatttgcctggctcccgagcaccctgctctagctcaaggcatctcatcggtcaactttgatatagggaacgtagatcgcagccagaatgtggtcaagggaaagggtaaaaagggcggaatgatcctacaggcggagtccaccttggcactgctcaccacagcaaatggagggacttacaaggtgcccagctgcattcggggcaagctggtagaggtgaacaccgccattgtggaggagccaaagcttctggagcaactccccgagggagccggctacttcgccattcttctgcccaaaatcgaaaactgcgatgcaatcaaggcgagtcttttaacccaggagcagtatgaggagcgcctaaaatcgaaaaacgaaggtctacctcaaattgagtccaccggggaccacgctcaaaacaaaaataaggagattcaggcgtgattttgacccttgttttgttgtgcttcttctataaggcctttgtattttaaattaatgattcatacatatattatattgctcaaagtcaatgaggacttaaataataataattttgacagtaaaccacaaataatattttctgaaacttgtgaattttgttaatacttatggtcaaatgtaatgtcgggtctactatttaatttccagtaaattttatttcttaacagcctgttaactccggtgcatttacagaactctgcccacttaacagcacgctccgtaatagttggcaactcaatgcaacacgtgtggacgataaacagctgttcgggcggcaatttagtggaagcgaaacaaaaccaaattcgttaactaaatcttaaaaatgtcagctaataagcaaaagaaattgagtaccatggaggtggaccccaacgaggatgtctccagttccagcgaggatgatgacgacgacgaaccgcatccagatgcctataagggaaacgaggtaatctaagtgcctccaaaatatgaaaagcaaatgtgtttcaaaattaatatccggctaggaggtgcaaatcgactttgagggacgagctccagtagatcccgatgcccagggaatctctcaactcctgcagcgactattccttcgtgcccacatcaactgcaaccaaatggcggatttgatcataggtgagcactccaaggtactatcttgatctatctatcagcacaactttttttgtttccagcccaaaattttataggcagtgtgatctgccagtgcgacgacgagggcaccgaaagcgaaacggaggacgacaacatggtcgaggatggcaccatctttggaatcacctctgtgctgaacctgaccgccaaaaaggatcagcccagcatcgcccagttaaggacctacatactggatcgcgccaagacgcacgcttctccggaggttcagcagcagttgaaggagattctagacagcgagcagcgccatgtgggattcttgatcaacgagcgctttatcaatatccctgcccagatctccgtgccactgctgcagagtttgcagcaagaaatcgaagccgccaaggccaagaaaatgaaatacgactttggcactctgctgctgctggttaagttctacaggaaagagtcgaagaagggcaaaccgggcgaggacgtgtacaccaacgctgaggatgagttgctttcggatcgggctaagttctccttcgagtattccatggcctctgaaaccgattcgggcatgtctggcgattggctggaaggcgatgccgtgatgacgccctacaggaaactcctggtcctggaggccaaaaaacttccgcagcttattgacgatatacaacgctttattaatggcgaataaatattttttacatttaaaactgctgtgttatttggccttaatataacaccccgacaaatatctaattaagaagtaataatgtccggtctctaacgaccgataagcttctatttctttgtagtcccatacaaagagtatcaaaaattcgaaccgaaagctttccacatcctttatgacaattggcaacgcgggcaaaccacaaacagctgtcacttggccggcatttgaaagcttcgcacatgccggctggtctactgtgaaaaaaaaacctggttgccattcctttgttttttgccactggttagttttggcccagaaactgcatccaccgtggacgtgactggcaagaggaacccacaataacaattccgaagaccgagcgacgtgagtagactttgcctttattgtttacaagttatatccgagttctagaattacgtacatagcgagcatactggcgattattcatcgctcgtgcgatttgttttcattcgaaaacgcaagtagcaattaaaaaaaaaaaacctaaagcccggctcgctagtaaaatgtataaaaagcttggccacccagccagaacattgcaaatcgtcgcggagagctatcacaatcgctccttatcgccagctttccgttccagatcccgctcccaagtttccagtttccagctgcagcgctttgttcccatcagggaggttcagtgacgccccacttgccgatcaaccaagtcgcgtgagctgcctgcgaaaaagtactcatcatgggtatcgaaaagtgagtatttattaccaacagttattagagggtgtgttttaagttagcgcggatcagttatctagccaccgcttagcgaccgattggaaaagctctcaaagattcgccatcttttacagtgagggttagtcgcttagcatccatcaattgctatcttatttacctttcccataattccaaaacgaaattagaatgtttttagtactgcatatctcagcgtttatcagttttaattagttgc

SEQ ID NO: 41984 - DNA, 943 bp, DROSOPHILA
aaacaaaaccaaattcgttaactaaatcttaaaaatgtcagctaataagcaaaagaaattgagtaccatggaggtggaccccaacgaggatgtctccagttccagcgaggatgatgacgacgacgaaccgcatccagatgcctataagggaaacgaggaggtgcaaatcgactttgagggacgagctccagtagatcccgatgcccagggaatctctcaactcctgcagcgactattccttcgtgcccacatcaactgcaaccaaatggcggatttgatcatagcccaaaattttataggcagtgtgatctgccagtgcgacgacgagggcaccgaaagcgaaacggaggacgacaacatggtcgaggatggcaccatctttggaatcacctctgtgctgaacctgaccgccaaaaaggatcagcccagcatcgcccagttaaggacctacatactggatcgcgccaagacgcacgcttctccggaggttcagcagcagttgaaggagattctagacagcgagcagcgccatgtgggattcttgatcaacgagcgctttatcaatatccctgcccagatctccgtgccactgctgcagagtttgcagcaagaaatcgaagccgccaaggccaagaaaatgaaatacgactttggcactctgctgctgctggttaagttctacaggaaagagtcgaagaagggcaaaccgggcgaggacgtgtacaccaacgctgaggatgagttgctttcggatcgggctaagttctccttcgagtattccatggcctctgaaaccgattcgggcatgtctggcgattggctggaaggcgatgccgtgatgacgccctacaggaaactcctggtcctggaggccaaaaaacttccgcagcttattgacgatatacaacgctttattaatggcgaataaatattttttacattt

SEQ ID NO: 41985 - protein, 286 aa, DROSOPHILA
MEVDPNEDVSSSSEDDDDDEPHPDAYKGNEEVQIDFEGRAPVDPDAQGISQLLQRLFLRAHINCNQMADLIIAQNFIGSVICQCDDEGTESETEDDNMVEDGTIFGITSVLNLTAKKDQPSIAQLRTYILDRAKTHASPEVQQQLKEILDSEQRHVGFLINERFINIPAQISVPLLQSLQQEIEAAKAKKMKYDFGTLLLLVKFYRKESKKGKPGEDVYTNAEDELLSDRAKFSFEYSMASETDSGMSGDWLEGDAVMTPYRKLLVLEAKKLPQLIDDIQRFINGE

SEQ ID NO: 41986 - DNA, 3088 bp, DROSOPHILA
aaatgaaagagagggaggcaagagcgttttgaaaaaacaagcaacttttgctttggagaactttcaatttcaaccgccttgcaggaaatatttattttcatttaatttactacaacttaaccgaactgagagctttatgagagggaaactaatacaatatcgagagcaaaacacacacacaataaataatttcatatttatccaagtagagagggaacatagagtcttttctaggcgagtagatcagcacttatcccaaatctgagagcaataactaatagacgaactatcgacgacctctaacccacaaagcataaccctaaaatccgacccctcattggctaatagcagcgtataattcccatgttcccggttttttttcatcttttctttcctcaaatagtaaaggacaacagcgcagagttttgattttgagatctgagatttgagttttgagcaaatggaatttcgtaaagttataatttctttggtttcttgtttctgtccctggcgaattttcgtagcttataagactttttgataaaagcaaacagtgaagacgataataatgaatttaacctatttaaatagaacaaataatcttgttgacgagcgagatcagctcctatacataaaatacaaataatcaatttgacacactgaaagcctatgtaaaaaatgaactgtgagagcgggtgaaatacacaaataaataaaaacaacagaaaaccccaagcaatcgattgttttattattcaaaatcagttgatttttaaacgatttgtattattgtttcggaaaacaaattacaaatgagtaaagggcaatttagtttgttttataatagtttttatgtaacaatcatccgttatcatttagtaatcatcttcagagcaagagagttaatcaataaaatttttcaaagtgtatttttacattcattacattttacattcggtatttttgatagtatttttggctcaaatctggcatctgttatgctggcagggtgaccatgatgataccactctgttaaaacatatgttcaaattacctaacaaaatttgacaacacacgcgaatcaggaaagtggaaaggcaataaacccggccggaatcaggagaaaatgcatacggatctttcctcacatctgcacacgcccgcttgcaacaagttgatcgaggaactccaggcctgccacgaaaatgtaagtaaccgggattttattttataaccgggatttatgcgaattctgcttgcagaacgccttcgcaaaatttgtgggcgtgtgcaactccattgacgacaaggtggtcaagtgcctaaaaggcgagagaatcgcccgatccgccgctaatcgcgccaaagcccgtgaacgtcaggcgaagtacaaggaaaagttgctccagcaggaaagtaactaaaggaaagaaatcaaccaggatgtcagtacaagcagatgatccactggagccattctacttcgagcacgaggagcaggagatctgcgggaagctcgtagctcccattacagatagcttccaggaggattaccccagtgttgtagatcgttttttcaccagatattactacttcaagggagatgttccctaccaagtgctctaccactccaatcgcatttgtctgatttgcctggctcccgagcaccctgctctagctcaaggcatctcatcggtcaactttgatatagggaacgtagatcgcagccagaatgtggtcaagggaaagggtaaaaagggcggaatgatcctacaggcggagtccaccttggcactgctcaccacagcaaatggagggacttacaaggtgcccagctgcattcggggcaagctggtagaggtgaacaccgccattgtggaggagccaaagcttctggagcaactccccgagggagccggctacttcgccattcttctgcccaaaatcgaaaactgcgatgcaatcaaggcgagtcttttaacccaggagcagtatgaggagcgcctaaaatcgaaaaacgaaggtctacctcaaattgagtccaccggggaccacgctcaaaacaaaaataaggagattcaggcgtgattttgacccttgttttgttgtgcttcttctataaggcctttgtattttaaattaatgattcatacatatattatattgctcaaagtcaatgaggacttaaataataataattttgacagtaaaccacaaataatattttctgaaacttgtgaattttgttaatacttatggtcaaatgtaatgtcgggtctactatttaatttccagtaaattttatttcttaacagcctgttaactccggtgcatttacagaactctgcccacttaacagcacgctccgtaatagttggcaactcaatgcaacacgtgtggacgataaacagctgttcgggcggcaatttagtggaagcgaaacaaaaccaaattcgttaactaaatcttaaaaatgtcagctaataagcaaaagaaattgagtaccatggaggtggaccccaacgaggatgtctccagttccagcgaggatgatgacgacgacgaaccgcatccagatgcctataagggaaacgaggtaatctaagtgcctccaaaatatgaaaagcaaatgtgtttcaaaattaatatccggctaggaggtgcaaatcgactttgagggacgagctccagtagatcccgatgcccagggaatctctcaactcctgcagcgactattccttcgtgcccacatcaactgcaaccaaatggcggatttgatcataggtgagcactccaaggtactatcttgatctatctatcagcacaactttttttgtttccagcccaaaattttataggcagtgtgatctgccagtgcgacgacgagggcaccgaaagcgaaacggaggacgacaacatggtcgaggatggcaccatctttggaatcacctctgtgctgaacctgaccgccaaaaaggatcagcccagcatcgcccagttaaggacctacatactggatcgcgccaagacgcacgcttctccggaggttcagcagcagttgaaggagattctagacagcgagcagcgc

SEQ ID NO: 41987 - DNA, 852 bp, DROSOPHILA
gctggcagggtgaccatgatgataccactctgttaaaacatatgttcaaattacctaacaaaatttgacaacacacgcgaatcaggaaagtggaaaggcaataaacccggccggaatcaggagaaaatgcatacggatctttcctcacatctgcacacgcccgcttgcaacaagttgatcgaggaactccaggcctgccacgaaaatatgtcagtacaagcagatgatccactggagccattctacttcgagcacgaggagcaggagatctgcgggaagctcgtagctcccattacagatagcttccaggaggattaccccagtgttgtagatcgttttttcaccagatattactacttcaagggagatgttccctaccaagtgctctaccactccaatcgcatttgtctgatttgcctggctcccgagcaccctgctctagctcaaggcatctcatcggtcaactttgatatagggaacgtagatcgcagccagaatgtggtcaagggaaagggtaaaaagggcggaatgatcctacaggcggagtccaccttggcactgctcaccacagcaaatggagggacttacaaggtgcccagctgcattcggggcaagctggtagaggtgaacaccgccattgtggaggagccaaagcttctggagcaactccccgagggagccggctacttcgccattcttctgcccaaaatcgaaaactgcgatgcaatcaaggcgagtcttttaacccaggagcagtatgaggagcgcctaaaatcgaaaaacgaaggtctacctcaaattgagtccaccggggaccacgctcaaaacaaaaataaggagattcaggcgtga

SEQ ID NO: 41988 - protein, 214 aa, DROSOPHILA
MSVQADDPLEPFYFEHEEQEICGKLVAPITDSFQEDYPSVVDRFFTRYYYFKGDVPYQVLYHSNRICLICLAPEHPALAQGISSVNFDIGNVDRSQNVVKGKGKKGGMILQAESTLALLTTANGGTYKVPSCIRGKLVEVNTAIVEEPKLLEQLPEGAGYFAILLPKIENCDAIKASLLTQEQYEERLKSKNEGLPQIESTGDHAQNKNKEIQA

SEQ ID NO: 41989 - DNA, 2597 bp, DROSOPHILA
cgatccgctgccgtggtctcaatgtcaaggacaaaaacgtaattaaagcgttggcgcggcattgccaaagtatttatagatgaagacgaggaccggcacaacagcaaggcacaacgcttcggtttcgattcgcttcgttttcccggcgacaagattttccggcttcaccggttccacttccaacgtccaatgcccaatatccaacgtctaacatccaacttccaagtcgccagacgcaaccaactgcgatgagcagattgcagctgctttgtttgtcgcttcctaagctcggtctaattgacaattatttgccgtccgggagctcctcgttccgaaacccgtttgagccgcgataccgccaagctatctatatccatatatgctgcacgaacttatatatacatatgttgtatatatcccatgctcccccgatttgggcgccccaacttttggtttcaggcgccgccgagcggcaagtaaaagtcgtcgtcgacgcttcgctgcagctgtctaatggcattataaaatttatacctgccagcattacgtttcgactttacataaattaatggcgatttgctctgcgagtttgtcgtgtctccacttggccagttaatcctgctaatccgtatcaaaatcaagtgcttgtgacttgggaaaacttcccagagactcattcgcaaggcggacaccactttttaatgcatttccatatatttttcataccttaataagatatttctgtctcataaggtatttactaaccttttctatctagtagataaaggtataaataatttataataatttataattgtataaatagtaaatgtcgtcccttcttgattataaacagctacgcttatttatttcaatacaaatataaatatcgtcaatactacacttgtaaaaagttggctttagttaggtaagttcgttgcattgttaactaatgatgattccagatcgttttcgccgggtgagtccgcattttggttgcttagtgcagctgcttcacgcttacgtagctactggcgtggcctccgtgtccgtatccgtatccgccatattgcgccacatcgtgaccgtagccgtagtcggcgtcgtagatatcgccgtgtccgtagcccttgtggtagacctgggggtggtgggcgtggccgagcttctttaccactgcgttgaagccattgtggtcatcggcggtgtactccaccactcgggtggtgccatccgattccttgagggagtagctgcccttgaccttgtcgccatcccgcgtctcccactggctcttctggtctccggtgtgggcatccttgacgccgtagtcgaattggtacttgggatagtgatggggctcgtgcttgtcgtatccgtatccgtagcccgaatggccgacactcggatagccgtgtccgtagatgccaccgtaagcgctgaccacatcgtgatcgtatccgtagcccaggctcttgtggacgggtccttcgtgcttggtcaccgaactgtagctggtggcgtgtccaccatggggagctgcccaactggctcccaccagaagggcaaagaacagacctccgctaaaggatttcatatcggtcacttattcgctgttttccaatcggaactttgatgatgtctgctggttcttggggagctcacctagactatatatagctatcgaagactctggggcaatcaaccatcgggtggtcattctcttggccacaccattcaccaatcgagctagctgatttgataattacctcactaactcgtacttattattattgtttcggccattgagctctatagaaaatcggcacattttatttaaagtccaatccgttacaattaaattctgctagtaataattaataatatcagatccaaaaagtttttgttagatcgttcgatgtgtttggtattcagtcaaagagaagggaaaaactaaggcaagaacttattgcttaatttacaaaaattaattatgactgagaatgtgaactgatgaaggcggcagcttttgcttgaagaaataaggaaatgctgttaaactaaccaataaataaactttgtagtgttgtactttgaaatccttatgtaaatatccaaagcgaacctattttgctataaataattatgtgtttttcctagaaatctgttggcttcaacattatatttattatatagttattagtagttttaaaacttgaactacaggatttctttttatttaatatgcatgttattcctatagatagcgaaacaatttatgcaaataaacgtcttaaaaataattaacatcagataacgtaggctaaataccaatatgcttatattttcacgcatttcaaatttccgagcttaaagtctattagccttgtaaattatatgcattaaaaaacactatcggtaagttaacaccaattcggaagctctgggtgccccacagcagaccccctggtcagaaacaccaaccgattggacggtccgcccaacgctgccctccccttctcagccccttaccgcaccgtccgtctcaaggtcatttggagtgaagtaggcgaaaaagagggtccaaccgtggaaac

SEQ ID NO: 41990 - DNA, 597 bp, DROSOPHILA
atgaaatcctttagcggaggtctgttctttgcccttctggtgggagccagttgggcagctccccatggtggacacgccaccagctacagttcggtgaccaagcacgaaggacccgtccacaagagcctgggctacggatacgatcacgatgtggtcagcgcttacggtggcatctacggacacggctatccgagtgtcggccattcgggctacggatacggatacgacaagcacgagccccatcactatcccaagtaccaattcgactacggcgtcaaggatgcccacaccggagaccagaagagccagtgggagacgcgggatggcgacaaggtcaagggcagctactccctcaaggaatcggatggcaccacccgagtggtggagtacaccgccgatgaccacaatggcttcaacgcagtggtaaagaagctcggccacgcccaccacccccaggtctaccacaagggctacggacacggcgatatctacgacgccgactacggctacggtcacgatgtggcgcaatatggcggatacggatacggacacggaggccacgccagtagctacgtaagcgtgaagcagctgcactaa

SEQ ID NO: 41991 - protein, 198 aa, DROSOPHILA
MKSFSGGLFFALLVGASWAAPHGGHATSYSSVTKHEGPVHKSLGYGYDHDVVSAYGGIYGHGYPSVGHSGYGYGYDKHEPHHYPKYQFDYGVKDAHTGDQKSQWETRDGDKVKGSYSLKESDGTTRVVEYTADDHNGFNAVVKKLGHAHHPQVYHKGYGHGDIYDADYGYGHDVAQYGGYGYGHGGHASSYVSVKQLH

SEQ ID NO: 41992 - DNA, 8691 bp, DROSOPHILA
agcatctaagggtcataaagtagaccagacgagacgaaaaccataaaaataaatatgattttaaaatccaataaaccaagaactaaatgagccgttcaatagatgtatgagccatcatttcgagaataaaacaatgcccgatgaggcagatcgtgtcttacataaccattacgcatacgtaatgcaccccggcctgccgcaattttagatggggacttgccatttctaattaggctaataaacgcaatgacttgggacagatttgcacttgtccgcggcgaagtgaggtgggctgcaccagaacttttagccttggaacacaaccaacgaacagctgttggtgcaatcaaccatataagcgagcaatgataaatgctacagcggaatgtataagttcaatccctaacatttggttttcataatctcaactcatgtgcggagagcttgagggaaatggaacctaagcacttgtgacacgaaacaaatcgcaaaggggccaacgctttgatttcgaaatattctttttggctcaaaagatgctctgagtaatttgcggaatgagcaccgcattgtctataattaaacattcctccaaaacgaaagtgccgagagagaaagtgatctagagctacgaaaatatctaatcatcaatatctaattaaagtttactaactggtaataatatatttcagaaatgttgaaaataatttccatttcccataaacccattaatctcctcaaaggttttttgtcacgtatccgccgggttgtacccaaaatcccggcagagagcgccgccacccggcgagaggaaaccgaaataaaaatgaaaattcaaatcaggcgaatgtgaaaagccactcactcactcaactgtgtgtgcttttgacaaaaattcgtgctacgaaaatatcaaaatcgaataattttcgcggtcacaaggtaaattcatggtatatgcatgttgagttacgaattggttttggaccgggagagatcgtctcgtatactcgtgtacggcaaaccgaaatttccttccttcagacattcagactagatagaaaatagatgtgataggtgttgggaaaattcgagctgccctgttcaaaaaacgacacgcacacgacgtgcacagacgacccaaacgaaaagaaaagacgaccacgacggccagaaataagcaaattatttggctaacaatcgtcgaaagggacactaaggattacccagccgacgattgttggttaaattttgccaacggcagcgcgaaaactttctaaatccataatctaagatatttaattctaaatcaaaatccatcgatctgcaaagtgaatgaaataacgaacaagtgcaaaattggaaactgaaactgtgacaaaatttgtgcgaacccaattcaatacctactcagatacttatatatatccatcggacttccaaaaaaacacacatatatatccaattcattcatccattggctctctggccttaaataatcgttggttttcccaattcttcatccttttcatttagtgcatttaaacgagcgcatatatagcggatgcatatatatgcagaatacgagcaaaagtgttaattctaattttccctaattattcataattacggaaaacttgtaaggaggatttatgacgtggctaaagtgctaaccacgctggaaactcgaggataatttgttgtgttgattattatggggcggctaaccatttggttcctactgggactaacgttaatcgccgtttccaataatggtaagtacacttcgaatgttttttgcagtgtattacccccagttcctccccgcgttatataaggcaaaagggcgagttggcacttttcgaatatcttgacagtttttcacacagcctgggcaggcattatgcaattttaaaacaaaaagccaagaaaaacagaagaaacgagtctgaaaaaaatatgtattaatatatacgtttaaaaatatttgcctgagtttgtgcgttctctatacattctctatttcttttttttcgggtcggtattggtgtctgcaaacgtcagtggacgacactttgagcattggtatattagtatagccccgtacacttgacttggccaaccaactagtggcagcacagatacagatacagatgtataacttttgccgatttttcctattttttttttcttaagagaactgagaatttttgcgcttggccgctcatcgttgtcatcgtttgtaatattttaaatttagatatttttaagttattttatttgcgctcagcgagtgctttccatttatctattttcccgcctgtgtgtgcgaaatgtctctctatatattttgtttggtttgctcaagtttgcaaaacagtaaagaaaaagaaaaaattgaatgataaatgagcaacggcacaaatgccgtgtactatatattatgggttaagatgggctcgattgcagcaacataaacacaatatgcaggctggcaatcggttggcaggcgaaatttgtataaataattctatcaatgcggttagcaatgaaaaatacgaaattgctcaaatagcttccgcccacatacgcccagaaataaatcaaaagaattatccgccgacaagcaaactgcacactgaaaactgataggcaaactcatttaaatcgcaattaattgagctcaggttgttggcagatatatgtacgaatatccctctaatctctcgacgacatttgtcccaagtgcctgaaaattccaaagtaattagccaagcgaccttaccatactttcagtccaccaatcactcaaaacgcgaccttccattaccaaaaagcaaatgctgtggaaagagaatagaatgttccattgcaaatggttcgcccccgcatccggatttttcggagcagtaaggtggccaaaagaaacaaaaactgaagaagtaaggccaaagtgggcgagcagccaactgaatggtatagaaatttactcatccacaaactggcaaaatgtgtttgagttttcatcttttaaaaataaaattcataaatccgccacatacatatatatatatattccgaagtgtgtatgtttgctttcgacgagtaccataaataatgtcaagtttgagcagatagaatgacctcgttgatggcggtgacatcaaaccgagaaagtgcgaccattgttctaggatggggcggttggaaataacttggactttccgatatctgggctgtatgtttggatatactcgtattacaaattgacctgtcatgttctctttaacgattttcagttgggtttgtcaatgccgatgtcggaccaagcgaatcagaatgtcgaccctacattgaaaaggctattcatgaattgaaaacaggtaagggctatcttgagtatctgaagaatttcaattgcgttaaaaccatcttatgaattaataatatagttattaaatctgctccttaattgaatgattcatcctaaaatttccatgttttaaaaaactcaaccatcaacattcatacacgtgtacgtgttaataaattgtattaatagaccaattaacatatagctacaaatcaacgtcatatctttttaaaatataatgaaaatccttttagccatttaatttttttttattaatctatcggagtactcatacgatttcagatggtgtcagggatggatctggagaactgcaatccgatcagccacgtggggacgacgacgatgacgacgatgatggtgggcattctgcggttgatgagaaagatacgattgaaattgaaactgtcgaattggattccacagaggacgcgaaaagtgccaacgatttggatggagatggaatacccgatgacgaggacgatgatatcgatggggacggcattccgaacgaaaaggacgatgatatcgatggagatggcataccgaacgacgaggatgatgacatcgatggcgatggcatcccgaatgaagatgacgacgatattgatggggatggtgtgcccaactccaaggacgaggacatcgatggggatggtgtgcccaactccaaggacgaagacatcgatggcgatggcaaggcaaatcacggtaagaatcatggtactcctgatccacctacaatgctctcatctaagattttatctcacagaggatgatgatctagatggtgatggcactccaaatcatggtaggaccataaattatatttaatatttgctgttgtatatttatatagcttcatttatacgctttgtatatttggtttttaggtttatttttatctgatattacttgcagtttaatttctaaactattcgcatttattatttcagattgaagctattttgcgctataattcgttgtttatttcaacattttagcttacttatgaacgaatttttatgtttcttcagtctctcactagttttttaaatatttcagaggacgaagatctcgacggggacggtgtgcccaacgaggaagatgatgacctcgatggtgatggcaaaataaatcacggtgggttaacagacatatttttaaaggctaaatattaattaaaaatttaaatgtacagaggatgaagacctcgatggtgatggagtgaaaaatgacgaagacgaggatctggatggagatggcaaagtaaatcacggtaagaataattatagcataaaaagtcttgaattattataaaacattttttatttgaacttgttttttattttcagaggacgaagatcttgatggagatggcgtgaagaatgaaaaggacgacgatttggatggcgatggtaccaacaattctcgtatgtatatattgacttagaatagctaaaaactgttttagtaatcttaatgtaaacctaaccatttcagaggatgaagacctagatggtgatggtgtgccaaatgaaaaggatgacgatctggatggagatggcatcctgaacgagcacgacggtgatgtggatggcgatggagttcccaatgaacacgatcacaaggatagcggtgagaatgccgatgatgatgatgacgacgatgatgaggatgacaaggaggcggtcaagaagcgaagcaaacgtgaagtggatgctgctcctgttctggacattgaggctccaccaagtcccgccgaagaatttcccgtagaggaagaaatcgtcaaggaggcatctgccgaagaggaagccgaagttgaggctgtgaaagaagaggagcccgagcaggaagctgttcaggaacccgaaccggaaccggtagtggaaccagaagcggaagtgcaacccgaaccagtccagcaggaagaagagaaggccgaatctgcggaagcgaaggaggaggaaaagccagcaccagttgaggaggctgaggctgaggaggaatctgtgcagcctgaagccgctcccaaagaacccgaagctgtccaggaggaagcacaggaagatgaaccacaaaccgatggcgcacaagatgccgctgatgatgatgatgacaccaagccagaggatgagcttctttgggtaaatctctacaaagatgtatatagtattttaataataattaatttataatttttaggaaggacacattcccgagaaccgacgcagtcgccagcacatcaccgaactgctccagttggatgaggagttcaatgcccgtgagaaggctaccgacaacgttgctgagatcatcctgcgggacattaagcgcatctacgagaatgctgtcaagcccctggagaccctgtacaaatatcgcgatctgagcaaccgccacttcagcgatcccgagatcttctcaaagccactgattctattcatgggtccttggtccggcggcaagtcgtccattcttaactatctgaccgacaatgagtacacgccgaactctttgagaactggtaagtacaaaaatgaatggtaaatttatgtaattaaatttatttatgtatatattacatctaatttccttataatatacatatattgccgctgaatttgtattttacattcttttttttaaatattctaaacaaatccgtatagaaattccattttccatttggacggttgcaaatgatttgtatacaatttcctattaaacatttgtttatacatttctttgacccgcaacaggtgctgaaccctctccggcctacttcaacattctgatgtggggcaatgagacggaggttctggacggcactcaactggcggcggactacacctttgccggcctccagaagttcggtcagggattggaggagcgcctgcgtggtctgaagatgaagagcaagatcctcgaaaaggtaggccaaatgcaaacatatctcgctgggcagatcagggagagatgcttatgggcgccgctaagcattaacttgtcgcccagggcagcagcccgtcgattgggaaactgcaaacagctggccacctgccaaacggaatttatagcttttagcacacaagctgtgggcattaattttgttattaataaattaaatgcggaacagggcagagagtacacagtacacagatagcaaagctaaaatggctgagaattactatatttaagcgcttgacgatgcgtttttcaggtcaacatcgtcgagatacccggcattctagaggtgcgcaagcaagtgtcccgcgtcttccccttcaacgacgcctgccagtggttcatcgatcgggcggacatcatcttcttggtctacgacccggccaagttggatgtgggccccgagacggaggccattctcgaccagctgaaggggcgcgagtaccagacgcgcatcatcctcaacaaggcagacaccgtcaagcccgaggagttgttgcgcgtccagggcgccctcatctggaacatctcgccattgatgtcctccgcccagccgccgctgatgtacaccacctcgctgtggacccatccctaccaggatggtgctcccgcccgcctgctgctcgcccaggagcgcgccttcttgcgcgacctgcgcacagccatcgacaagcgcatcgagcacaagatcgccagcgcacgtcgttttgcggtgagtactcgggcgtatgcgtgatacgattacgattactttgttgagagaaggtgtaaatgggcaatgttataagaaccttcagtgaatatttgaatatgtgatagaaatgagcatacataatcaattcaaaaaccatttcctattatagttattgtaatgaattgataataaattaaatccatccatttgcattcacaggtgcgtgtgcgcaaccacgccaagatggtggactgctacctgaacacgttcaacaaccacaagacgctgtttggcaacaagaagcgcatcgccgatgacatcatcgatcatccgcagaactaccacatctacgagggactctccacactgacgaacatctcgcgctacgatcttccggatccggaagtctaccgcgacttcttccgcctgaatccgctgtacgagttcaagaagctgagggacacctgcacctacttccgcggctgtccgatcaccaaactggacctggccattgcctacgaactgcccgaattggccggcaagtacaagaagatgtccgaggctgcgttggccgccattgaggcccaacagcaggatggaaccataggccaggccgagcctaagaggacgagttgaggtgttggctcctcccagaggagaaaacctgccatttagtttgttttagtgagagatagagagagaatgtgacatcggcaccggaaaccgtctatagggaattaatatcgagaagggagaaatgttatagaacccccagaaatcggtagagaacaacagcgcaagacaaaaaacaaggacattgtttgaggagagagaggtatagcttagctaaagagagagaaagccggataaagtgtgtgagagagagggcgaaatgaaagagagggaggcaagagcgttttgaaaaaacaagcaacttttgctttggagaactttcaatttcaaccgccttgcaggaaatatttattttcatttaatttactacaacttaaccgaactgagagctttatgagagggaaactaatacaatatcgagagcaaaacacacacacaataaataatttcatatttatccaagtagagagggaacatagagtcttttctaggcgagtagatcagcacttatcccaaatctgagagcaataactaatagacgaactatcgacgacctctaacccacaaagcataaccctaaaatccgacccctcattggctaatagcagcgtataattcccatgttcccggttttttttcatcttttctttcctcaaatagtaaaggacaacagcgcagagttttgattttgagatctgagatttgagttttgagcaaatggaatttcgtaaagttataatttctttggtttcttgtttctgtccctggcgaattttcgtagcttataagactttttgataaaagcaaacagtgaagacgataataatgaatttaacctatttaaatagaacaaataatcttgttgacgagcgagatcagctcctatacataaaatacaaataatcaatttgacacactgaaagcctatgtaaaaaatgaactgtgagagcgggtgaaatacacaaataaataaaaacaacagaaaaccccaagcaatcgattg

SEQ ID NO: 41993 - DNA, 2985 bp, DROSOPHILA
tctcgtatactcgttgcatttaaacgagcgcatatatagcggatgcatatatatgcagaatacgagcaaaagtgttaattctaattttccctaattattcataattacggaaaacttgtaaggaggatttatgacgtggctaaagtgctaaccacgctggaaactcgaggataatttgttgtgttgattattatggggcggctaaccatttggttcctactgggactaacgttaatcgccgtttccaataatgttgggtttgtcaatgccgatgtcggaccaagcgaatcagaatgtcgaccctacattgaaaaggctattcatgaattgaaaacagatggtgtcagggatggatctggagaactgcaatccgatcagccacgtggggacgacgacgatgacgacgatgatgaggacgcgaaaagtgccaacgatttggatggagatggaatacccgatgacgaggacgatgatatcgatggggacggcattccgaacgaaaaggacgatgatatcgatggagatggcataccgaacgacgaggatgatgacatcgatggcgatggcatcccgaatgaagatgacgacgatattgatggggatggtgtgcccaactccaaggacgaggacatcgatggggatggtgtgcccaactccaaggacgaagacatcgatggcgatggcaaggcaaatcacgaggatgatgatctagatggtgatggcactccaaatcatgaggacgaagatctcgacggggacggtgtgcccaacgaggaagatgatgacctcgatggtgatggcaaaataaatcacgaggatgaagacctcgatggtgatggagtgaaaaatgacgaagacgaggatctggatggagatggcaaagtaaatcacgaggacgaagatcttgatggagatggcgtgaagaatgaaaaggacgacgatttggatggcgatggtaccaacaattctcaggatgaagacctagatggtgatggtgtgccaaatgaaaaggatgacgatctggatggagatggcatcctgaacgagcacgacggtgatgtggatggcgatggagttcccaatgaacacgatcacaaggatagcggtgagaatgccgatgatgatgatgacgacgatgatgaggatgacaaggaggcggtcaagaagcgaagcaaacgtgaagtggatgctgctcctgttctggacattgaggctccaccaagtcccgccgaagaatttcccgtagaggaagaaatcgtcaaggaggcatctgccgaagaggaagccgaagttgaggctgtgaaagaagaggagcccgagcaggaagctgttcaggaacccgaaccggaaccggtagtggaaccagaagcggaagtgcaacccgaaccagtccagcaggaagaagagaaggccgaatctgcggaagcgaaggaggaggaaaagccagcaccagttgaggaggctgaggctgaggaggaatctgtgcagcctgaagccgctcccaaagaacccgaagctgtccaggaggaagcacaggaagatgaaccacaaaccgatggcgcacaagatgccgctgatgatgatgatgacaccaagccagaggatgagcttctttgggaaggacacattcccgagaaccgacgcagtcgccagcacatcaccgaactgctccagttggatgaggagttcaatgcccgtgagaaggctaccgacaacgttgctgagatcatcctgcgggacattaagcgcatctacgagaatgctgtcaagcccctggagaccctgtacaaatatcgcgatctgagcaaccgccacttcagcgatcccgagatcttctcaaagccactgattctattcatgggtccttggtccggcggcaagtcgtccattcttaactatctgaccgacaatgagtacacgccgaactctttgagaactggtgctgaaccctctccggcctacttcaacattctgatgtggggcaatgagacggaggttctggacggcactcaactggcggcggactacacctttgccggcctccagaagttcggtcagggattggaggagcgcctgcgtggtctgaagatgaagagcaagatcctcgaaaaggtcaacatcgtcgagatacccggcattctagaggtgcgcaagcaagtgtcccgcgtcttccccttcaacgacgcctgccagtggttcatcgatcgggcggacatcatcttcttggtctacgacccggccaagttggatgtgggccccgagacggaggccattctcgaccagctgaaggggcgcgagtaccagacgcgcatcatcctcaacaaggcagacaccgtcaagcccgaggagttgttgcgcgtccagggcgccctcatctggaacatctcgccattgatgtcctccgcccagccgccgctgatgtacaccacctcgctgtggacccatccctaccaggatggtgctcccgcccgcctgctgctcgcccaggagcgcgccttcttgcgcgacctgcgcacagccatcgacaagcgcatcgagcacaagatcgccagcgcacgtcgttttgcggtgcgtgtgcgcaaccacgccaagatggtggactgctacctgaacacgttcaacaaccacaagacgctgtttggcaacaagaagcgcatcgccgatgacatcatcgatcatccgcagaactaccacatctacgagggactctccacactgacgaacatctcgcgctacgatcttccggatccggaagtctaccgcgacttcttccgcctgaatccgctgtacgagttcaagaagctgagggacacctgcacctacttccgcggctgtccgatcaccaaactggacctggccattgcctacgaactgcccgaattggccggcaagtacaagaagatgtccgaggctgcgttggccgccattgaggcccaacagcaggatggaaccataggccaggccgagcctaagaggacgagttga

SEQ ID NO: 41994 - protein, 930 aa, DROSOPHILA
MGRLTIWFLLGLTLIAVSNNVGFVNADVGPSESECRPYIEKAIHELKTDGVRDGSGELQSDQPRGDDDDDDDDEDAKSANDLDGDGIPDDEDDDIDGDGIPNEKDDDIDGDGIPNDEDDDIDGDGIPNEDDDDIDGDGVPNSKDEDIDGDGVPNSKDEDIDGDGKANHEDDDLDGDGTPNHEDEDLDGDGVPNEEDDDLDGDGKINHEDEDLDGDGVKNDEDEDLDGDGKVNHEDEDLDGDGVKNEKDDDLDGDGTNNSQDEDLDGDGVPNEKDDDLDGDGILNEHDGDVDGDGVPNEHDHKDSGENADDDDDDDDEDDKEAVKKRSKREVDAAPVLDIEAPPSPAEEFPVEEEIVKEASAEEEAEVEAVKEEEPEQEAVQEPEPEPVVEPEAEVQPEPVQQEEEKAESAEAKEEEKPAPVEEAEAEEESVQPEAAPKEPEAVQEEAQEDEPQTDGAQDAADDDDDTKPEDELLWEGHIPENRRSRQHITELLQLDEEFNAREKATDNVAEIILRDIKRIYENAVKPLETLYKYRDLSNRHFSDPEIFSKPLILFMGPWSGGKSSILNYLTDNEYTPNSLRTGAEPSPAYFNILMWGNETEVLDGTQLAADYTFAGLQKFGQGLEERLRGLKMKSKILEKVNIVEIPGILEVRKQVSRVFPFNDACQWFIDRADIIFLVYDPAKLDVGPETEAILDQLKGREYQTRIILNKADTVKPEELLRVQGALIWNISPLMSSAQPPLMYTTSLWTHPYQDGAPARLLLAQERAFLRDLRTAIDKRIEHKIASARRFAVRVRNHAKMVDCYLNTFNNHKTLFGNKKRIADDIIDHPQNYHIYEGLSTLTNISRYDLPDPEVYRDFFRLNPLYEFKKLRDTCTYFRGCPITKLDLAIAYELPELAGKYKKMSEAALAAIEAQQQDGTIGQAEPKRTS

SEQ ID NO: 41995 - DNA, 3674 bp, DROSOPHILA
actcacgaaattcttatttaaatattatgccatactctttatatgcacagctaataccaaatattaatgacaaacattatttaaaatgaacatttaacaatttgtatcgaaatgaagtgaagattccatgagattctcctcctcagaaaatcactgtatctcggctcctcattaaatagggtatttgcagctcttacttaatatgtacttattttttgggcgttttcgaagttgggttgtcggcttgaaataattaatgcgaactggtgttaatttatggttgtcgctttctgcgctgcaattgccattgcgtggcataatcacaaaactcaattgcaggttgggcactgacagggggatcagaagtcggcgatctctggctgcttgttagcgatttcctgccaacccacgaattttctggctcattgtttatctcagcccgagttctatgatttatggtggaaaatcgccagcaagtgcaaacttgattccgcaatgctgatggtgctgatcattacttaccatgtcaaggagtgttgctattttttttaaaaacagttcgcagctaatttattgcttacaaatttatgggaagaaacaattgttagttttaagcgtcaacttagcttgaagctacttaccctatttatatacttattaagatatagaatgtaaggaaaataagtatttggattggatagtaggaaaaaaataaattttgattaaattaaaaaaaaatagtcataataagtgatataaaatattttacctttattgttactatgttaataaacatagtccaattaaggtaactatcaattgcagtagctctcacatcagatattgaaattgttcaatacaacgaaaagattgcgagtttttagacattttttattggatcaacaatatctaagaattacatgactaagcaaataaattaatcgaagaacgaacgaaataaataaagatgggaaacactcagagggattcactcttaaccctacactccttccaaggtgcggtagctgccggagtcgaagctatgcccacccgcatacatgggcaccatgtgcttcttgtccttgcgcaccatgttctggaccagagtggccgacgccgctccctgttcgtcctcctcgaagtcctcaaactcgtcctctaggctctttgggaagagaaccggaccggaattctcgggtcggtgggcacgtggcttctgcttgggatgctggggacgcagcttcttgggcttacggtggaagtagctggagtaatcgggtcgggagtaggacttggacacgcccttgtacttgtagtgcttcaagccaggcgtggtgtgaaccaccttcttctggtgaatgtggttggaaatgctctcggggatgttaatcctgggctttgagggggagaaactagtgtgcagcgattgctgtggaaccgacggcttgtgtatgtagttgtgggggatctccttgggcttgtagtggtcgtagaagtgggagtgcgccggggatccggtggtgtaatggggtcggtactccttgggctcattcacgatcaccgccttccaatcgccctcctgcactgcgtaggtgggctgaagtttctgggagtagtcctctagtttatgggcagcggctatttgcttgtagtaagtatccctggcctgctgcagacggtccctgataccgggatccatgtccatgggtacctgcttgatcctggcgtgcggcttgatctcaatcaagctgggcaccttcggatgggagtgagtcaagtcctcgatgggcctcttcagaggcttgatgtccgaactgagcacaatgtgctcctgatccttgctgtagtggttgatctttgactgtgaggtatcatcgttcacttggttactgccctccgggctctctgtgattggatgcgaattagcgcccactgtcttgacaatcgcattgaatcccttcttggcgtctgctgtgtagtgaaccgttcgtatggagccgtctggttccagtacgctgtagtgacccttgaccccatcgccatcgcgggactcccactgggatttcacatccccagtgtgcagatccttgactccgtagctgaaggcgtagccctgatgctcctgaaatgaaaaatttgatatgtgcgacttagcgcgttttaaaacgccaagaaaaagcgtacgtctgtaatggtcttcaaccgcacccaaaaagttcgtacacgaactattcgaaaccccaatggctatgtcaacgtctgtagaactttatatgttttcacgtcgaccaacaaaaaaataccaaaaaaatgaatcaaatgcaacttttttgtgtcaaggcaaaaacgcgcgctgtgcacagtttgaaggcaattggaggaggccccttggttgggtttttcgaatcttggggaattgggtattcttttgatctgcagccgacatttaaactattaattaggagggcagtttaaccctagaaagacaaataaaggcaaacaaagtggtattcaatcttagggtaataataattctaatcacagcattttctcacaaggcttttattttaattgcctttatcatttttgataatagaagtgttaaatgcaattgactttagtttaagtcaaaatgacattctagatagttatttatagccttaccgccacgcattaaccccataaagccagccactagcgagccgaaaatttacataaattcaattaatataaaatgtagagcattcggtgtcacttggacacgtttgttttatgagtatgctgttgctcgtgttttccccttcttttctggcaccttcagtatttccacggcaaattgcaaaagtttttcgcatgcttggcgctggcttcaattaagcgcagacgtccataaatggccacgcacacagacgctgccagcctaatcttttcaattttttggccgacttgcagtagtggcttaaataatggctaactgctaactattggttactgctgctgctgctgctacctatcaattttaactccctgctccgctgtcgctgtccggaccaaacaaatgattacaagcgagtgtaacttgagcggcagccgtcgcacgcatgtccctctacgcaggccacagtggaacctcgctaaaggtaaatctccctaagatggtaatgaaatggaaacttaggttctacctgctagtttatttaatggccacagtgcgttgataccattataattttcaaaataagttatatataatatcaaacatatcaatatttttgttaaattctacaatcagaaatgaaatgaagcttacacttacaacaaatgttggaaatgtttcaagagtgtaagtaccactgtgcgctataaatatatatctaagagcctggatatatggtggttttaataagagtttcataaggcggcgcgctggcgcagtggtggccacccaaagagatcattgggagcagcggccgcggttggtggccaatttcgcaggcagctttgtgggtgcgtgtgaactttaactcataaatttatgggtgaccaatttatgatttgactaactggcgagctgggcgtatgcgcaatcgctccgcttcgctccacaattaaatgcaaattacgcatacgccgtgttgtcaacattttgacaacaaatcgcccgacagatcgtg

SEQ ID NO: 41996 - DNA, 1206 bp, DROSOPHILA
atgcgtggcgaccattacagacgtacgctttttcttggcgttttaaaacgcgctaagtcgcacatatcaaatttttcatttcaggagcatcagggctacgccttcagctacggagtcaaggatctgcacactggggatgtgaaatcccagtgggagtcccgcgatggcgatggggtcaagggtcactacagcgtactggaaccagacggctccatacgaacggttcactacacagcagacgccaagaagggattcaatgcgattgtcaagacagtgggcgctaattcgcatccaatcacagagagcccggagggcagtaaccaagtgaacgatgatacctcacagtcaaagatcaaccactacagcaaggatcaggagcacattgtgctcagttcggacatcaagcctctgaagaggcccatcgaggacttgactcactcccatccgaaggtgcccagcttgattgagatcaagccgcacgccaggatcaagcaggtacccatggacatggatcccggtatcagggaccgtctgcagcaggccagggatacttactacaagcaaatagccgctgcccataaactagaggactactcccagaaacttcagcccacctacgcagtgcaggagggcgattggaaggcggtgatcgtgaatgagcccaaggagtaccgaccccattacaccaccggatccccggcgcactcccacttctacgaccactacaagcccaaggagatcccccacaactacatacacaagccgtcggttccacagcaatcgctgcacactagtttctccccctcaaagcccaggattaacatccccgagagcatttccaaccacattcaccagaagaaggtggttcacaccacgcctggcttgaagcactacaagtacaagggcgtgtccaagtcctactcccgacccgattactccagctacttccaccgtaagcccaagaagctgcgtccccagcatcccaagcagaagccacgtgcccaccgacccgagaattccggtccggttctcttcccaaagagcctagaggacgagtttgaggacttcgaggaggacgaacagggagcggcgtcggccactctggtccagaacatggtgcgcaaggacaagaagcacatggtgcccatgtatgcgggtgggcatagcttcgactccggcagctaccgcaccttggaaggagtgtag

SEQ ID NO: 41997 - protein, 401 aa, DROSOPHILA
MRGDHYRRTLFLGVLKRAKSHISNFSFQEHQGYAFSYGVKDLHTGDVKSQWESRDGDGVKGHYSVLEPDGSIRTVHYTADAKKGFNAIVKTVGANSHPITESPEGSNQVNDDTSQSKINHYSKDQEHIVLSSDIKPLKRPIEDLTHSHPKVPSLIEIKPHARIKQVPMDMDPGIRDRLQQARDTYYKQIAAAHKLEDYSQKLQPTYAVQEGDWKAVIVNEPKEYRPHYTTGSPAHSHFYDHYKPKEIPHNYIHKPSVPQQSLHTSFSPSKPRINIPESISNHIHQKKVVHTTPGLKHYKYKGVSKSYSRPDYSSYFHRKPKKLRPQHPKQKPRAHRPENSGPVLFPKSLEDEFEDFEEDEQGAASATLVQNMVRKDKKHMVPMYAGGHSFDSGSYRTLEGV

SEQ ID NO: 41998 - DNA, 6169 bp, DROSOPHILA
gtttctctaaattgttagaggatctctcgtattctagttgggaaaaaagtattgtttgggagtgaaagattagggtccttttaaacattccaattccgatagttaaacaagattttttttttttatataattaaacgccttcagcgtgtattcatatatatgcagttatagtatattttttaaggctggtaaaaagttgttcgtattattgttaaaaaatgaattaggggattatcaatctcaatgtcgagcaccccgactgtggcgatcttaaatatcgtttatttgaaatgaacattttacaaacatcaatatacaatcctttatgtacaaatagaggcgcgcagtttgagatgagagcagcgcaagcagttcaattaaacgaaacgcttatcacatgagcacaaaatcggggatccaaagtggcaggtgtgggtcggatatatggttggatatcgggtatatcgggacaagatggtggccttgggacatcgctgtcgttgtggggtttacataaatacgtttaatgtttaatgagaagaatattggagttgaggctatttacagttgctgaatgaacaaaacaatttgcggtctgcgaagagctgcgcggaaaaataaatgaagtgttaataataataattgattataatagtataataataacaaatagtgtcaattaagtttctttagagtggttcagaaaaccatttatgtagatataggtatttgctatcacttctaataaccactttatataaacttcaaggccagcacaatcagtggaaaggaaactaattaattaattctaaattaatttatcaacaaagggaaaccctttactagagttaagctttcgttagcttttaagaggtaaaatcacttattaggaaaggtttgtttgagctgttatcgaataaacctaaggtatagctgttattagtgttccaaaaacttaaaaatgagttatttaggatcagtagaatcagtaccaccaacctcacgacttggtttccgtctgacgcttggccacaattttgccctggtcgcgactgttgatgacctcggcgtggaagcccgtctcccagtcggcgtagtacttcaccgtgcgcacattgccatcgggctcaaccaaggagtactctcccttgaccacgtctccatctcgctcctccttctggtgcttgttatctcccgtatggggatcattcacggcatactcgaaggcatatcgaggatgggcatcctgggcatgggggatataatgtgaggtgtataaaaaagaaaaagaggtaatgcgtcacttacgaagtgctccagatgcttctcgggcaccaccttcaggacggcatgttgagttacgggtgctgacttcaagtaggcggtggctgccacgggggcgtggctgctcagcgctggcacacttggagcatagcggtagaatccagctcccagcggtccgattccgcccactccgtgtgagtatccactcagggaggagtccaaatgggccagagaggatgcgcctgatgccagacccgatccatgggacagtagaccgtggtagctaagggccggggataccttcgcatgacccaaggagatggcaccatagtagccaccgctgggaccagatccatgccctaaattgcctcgatggaggagtgcgatgttgtatttccactaaagagctaaaattagcagtacttaccagcttggattccgtaggccgtgctgctggccagctttcctcccagggcataagcaggagccgatgtcaacttcgtcagcggcgcacccagcaaaactccaccatgtccactagacccgtacccgactcccactcccagcggggtcgatggacctgtggaaatgtggctgacagttggaacggccaccttggcgatagcaggagcagctgaaatggccacagctggcttggagacatattgatgggaaacggctcccgagctatatcccgatccactgcccccgtagccagtagccagcttagtggataaaacgggaacagagccgacggcgtgcccacctaaaatgtgacccacagctggagctacatacgttgctactttggcaattgcaggagcagctgaaatggcaaccgctggcttggacacatactgatgagagactgctccagaactatattctgaggcacttcctccgtacccgtggcccgtcgaaaccacaggagctgcataggacaatcctttcgatatgccagctccagtggagtagctggatattgccggagcagcataggtggccaccttggcaaccgctggcgcagcaagtgtcagtgctggcttggatacgtactgatgggacacggctcccgaaccacttattccatatcctgtagctactttagcgacggctggagcggcaggcaagtaagttttggagagtacaggagccactggagccactgcgatcgccggcttagagatgtactggtgggagagtgctcctccatgggccgattctccatagcccgtggctatcttggtgagactgggagccgaggaataggcggatatggccggagcagcatatgttgctaccttggcaatcgctggagctgatgcaatggcaactgctggcttcgagatatattgatgtgaaactgctccggagctgtatcccgatccgcttccgccgtatccagtggccactttggctaccactggagctgacgagtaagtggacacggcgggagcagtagcatacgttgagattgctggagctgcatatgcggcgaccttagccaccgccggtttagacacatactggtgggagacggctcccgatcctgacgattcatagcttgtggagagcttggtgatggcaggagcggaagagtatgtggccactgccggagcagctgccggataggcagctacaataggtttggaaatgtactggtgggatacatccgctgcctgactataggaaaccttggctagagccggagcggaggagtaagtggctatggagggagctgcgtaggtagccacttttgagaccacaggagcagtggcatacgttgatattgccggagaagcgtatgtcgctaccttagcgattgcgggggctgctgagatggctactgctggcttggagacatactgatgggagacggctccatgacccgatcctccatagcttgtcgcgatcttggtcactgccggagctgctgagtatgttgaaatggcaggagcagcataggttgccactttagcaaccgctggcttagagacatattgatgggaaacagcgcccgaactgtatcccgagccacttcctccatatccagtggcgactttggtcaccactggagctgccgcataagttgaaatggcgggagctgcataggtagccaccttggcgatggctggagcggctgaaatggccaccgcaggcttggacacgtactggtgcgatacggcccctgacccactcgaaccataaccatatcccgaggagtaggtggagacagtgggagctgcgtaggatgctaccttcgaaatggcaggaccagtggagtagcttgaaatggcaggagctgcatacgttgccaccttggccactgctggagcggcaatagccacagctggcttcgagacatattggtgggagacggctcccgatcctgaagctccatagctggtggagagcttcgagatggcaggcccagatgagtaagttgcaaccgtgggagcagcgtaagtggacaccttggcaatggctggttgggagacatactggtgggacagcgctccggatgcagtgcctccgtagctggccgccactttggtgatcgccggataggctgccactataggcttggatatgtactggtgggatacatctgatacctggctgtacttggtaattgagggagcatagctggcggagtatcctgttccgtgggaggagagcagtgacgaagtggtggccagtttcactgaaggcgctgagtaggtggacaccttggcaatcgttggcgctgaatacgaaaccgatggcgagtaggtggctatcctggagatgcccggcgagatctgtccatagctgtaaccaggagagctgtaggtctccaccttggagtagccgggtgtggtcttgctgtacgtgtacgcaggtgagctgtatgtctccaccttggaagtcactggtggcgcatagtagggaacgctggaaagcgatggggaggagtaagtcgccactttggatattcccggacttgccgaactgtaactatatccgggcgaggtgtatgtcgccactttagtgattccgggtgatggtggcaagtaggagttgtccaacttggtaaccgccggcgacaccaggttcttgatttcgatgcccgacggcacaacggttgcgtacttggccgctggtgacttgtccgcataggtaattcccgctcctccgtactccgctgagggagagaacaggctcttctgcacgggagctatgtatttgttgatctgagttatgccaccgtgagacaagccctcgattccggccgtagactgataggcggctccggaacttcccaccgaggtgtgcaggagttgtccgttctccgagtacgtggatatcgccgggctctggctgtacttcgtcactccgggcgagatggagaactttacctccgccggtggaggataggcataaccagcagtggatgcgtgtacgcagggcaagattggtggagccaaggtgggcgacggatccgcaagtaccacgctgagtatgcccaggagggccaccagatgaagctgaaacaaaacgtgaaaataaattgtaattgttttcctacattatttttttggaaaatgggtttaaaattcacggtaacaaaggaaaattcaagaatgaaaattttgtagctaagaaatatatttaaatattaaacatgtaaaaaaatctacaaaatcgaagtgtacacttttaaatcttttgttgtaatgtatccatgttatgcttttcgattataatgtgtgcactcttttaatataatataaacaagacaactcaattgtcaatggtttttaatcacgtttagcaggattttagttttaaaaccatatttggtttataatattattcaattaagaataacaacacattcaacattggccactgcatgtcctttttttttaaatcacgcttcattgtgtttgaaacacaaacaacatgtagtatagtcgattttaagactgtaatggtaatcatagtcctttttgaaatgtcagtatgtcgcaatacttagataaaggacccaccttcatgttttcacttttcaaactctgcacagtcgatgtttggttttcgtttgaaaggactcgcgagcggttgagcaaggatgttttcttaataacgccacatttgcacttttctaaaaagaaaactcgagtctgcgatccttggtgatgggaatccaaaggcttatccttgtctggctctgaaaatcacaataagctgatcaccgatttccctaaactctactaggaaacacaacggatcgaatcgaatcgggttggatcggatcggatcggatcggaacggatcgaaacggaacgattcgggatgtagagcagagccacgcggccgactggactggactgttggccagcccggccctataatcgcttatatacgttcggtcagttggccaacagtcgcgaaaagctcgcacgcatgcgcagcagccacgcaccagtttggcgacaaagcgacaaaaaaaaagtgtaactatgtgtttggctgagatcgaatcgaagcggtcgaagcgaaaagcgagaaaatggatctagctgcaggaaaagagccaagtgagttgcgcctaagctgcgactttggcgcgtgcagatgaagaattgatgactgttcgactccagatcgcgttgcaaagcagctttgttctcaccaatccgtaaaccgaaaaccgaaaactgaaaactgcaaactgcaagctctaactgaaacttaagctgaaaactggcgaactgcaacctgcctggccaattgttgggccccaccttcgatcggagcctcagttggtaacgttttattagatcatagtcgcgaacgcctcggctcaaaaataaaccgatcacaaaatgcgcgtggtgca

SEQ ID NO: 41999 - DNA, 3690 bp, DROSOPHILA
atgttgaatcttcatctggtggccctcctgggcatactcagcgtggtacttgcggatccgtcgcccaccttggctccaccaatcttgccctgcgtacacgcatccactgctggttatgcctatcctccaccggcggaggtaaagttctccatctcgcccggagtgacgaagtacagccagagcccggcgatatccacgtactcggagaacggacaactcctgcacacctcggtgggaagttccggagccgcctatcagtctacggccggaatcgagggcttgtctcacggtggcataactcagatcaacaaatacatagctcccgtgcagaagagcctgttctctccctcagcggagtacggaggagcgggaattacctatgcggacaagtcaccagcggccaagtacgcaaccgttgtgccgtcgggcatcgaaatcaagaacctggtgtcgccggcggttaccaagttggacaactcctacttgccaccatcacccggaatcactaaagtggcgacatacacctcgcccggatatagttacagttcggcaagtccgggaatatccaaagtggcgacttactcctccccatcgctttccagcgttccctactatgcgccaccagtgacttccaaggtggagacatacagctcacctgcgtacacgtacagcaagaccacacccggctactccaaggtggagacctacagctctcctggttacagctatggacagatctcgccgggcatctccaggatagccacctactcgccatcggtttcgtattcagcgccaacgattgccaaggtgtccacctactcagcgccttcagtgaaactggccaccacttcgtcactgctctcctcccacggaacaggatactccgccagctatgctccctcaattaccaagtacagccaggtatcagatgtatcccaccagtacatatccaagcctatagtggcagcctatccggcgatcaccaaagtggcggccagctacggaggcactgcatccggagcgctgtcccaccagtatgtctcccaaccagccattgccaaggtgtccacttacgctgctcccacggttgcaacttactcatctgggcctgccatctcgaagctctccaccagctatggagcttcaggatcgggagccgtctcccaccaatatgtctcgaagccagctgtggctattgccgctccagcagtggccaaggtggcaacgtatgcagctcctgccatttcaagctactccactggtcctgccatttcgaaggtagcatcctacgcagctcccactgtctccacctactcctcgggatatggttatggttcgagtgggtcaggggccgtatcgcaccagtacgtgtccaagcctgcggtggccatttcagccgctccagccatcgccaaggtggctacctatgcagctcccgccatttcaacttatgcggcagctccagtggtgaccaaagtcgccactggatatggaggaagtggctcgggatacagttcgggcgctgtttcccatcaatatgtctctaagccagcggttgctaaagtggcaacctatgctgctcctgccatttcaacatactcagcagctccggcagtgaccaagatcgcgacaagctatggaggatcgggtcatggagccgtctcccatcagtatgtctccaagccagcagtagccatctcagcagcccccgcaatcgctaaggtagcgacatacgcttctccggcaatatcaacgtatgccactgctcctgtggtctcaaaagtggctacctacgcagctccctccatagccacttactcctccgctccggctctagccaaggtttcctatagtcaggcagcggatgtatcccaccagtacatttccaaacctattgtagctgcctatccggcagctgctccggcagtggccacatactcttccgctcctgccatcaccaagctctccacaagctatgaatcgtcaggatcgggagccgtctcccaccagtatgtgtctaaaccggcggtggctaaggtcgccgcatatgcagctccagcaatctcaacgtatgctactgctcccgccgtgtccacttactcgtcagctccagtggtagccaaagtggccactggatacggcggaagcggatcgggatacagctccggagcagtttcacatcaatatatctcgaagccagcagttgccattgcatcagctccagcgattgccaaggtagcaacatatgctgctccggccatatccgcctattcctcggctcccagtctcaccaagatagccacgggctatggagaatcggcccatggaggagcactctcccaccagtacatctctaagccggcgatcgcagtggctccagtggctcctgtactctccaaaacttacttgcctgccgctccagccgtcgctaaagtagctacaggatatggaataagtggttcgggagccgtgtcccatcagtacgtatccaagccagcactgacacttgctgcgccagcggttgccaaggtggccacctatgctgctccggcaatatccagctactccactggagctggcatatcgaaaggattgtcctatgcagctcctgtggtttcgacgggccacgggtacggaggaagtgcctcagaatatagttctggagcagtctctcatcagtatgtgtccaagccagcggttgccatttcagctgctcctgcaattgccaaagtagcaacgtatgtagctccagctgtgggtcacattttaggtgggcacgccgtcggctctgttcccgttttatccactaagctggctactggctacgggggcagtggatcgggatatagctcgggagccgtttcccatcaatatgtctccaagccagctgtggccatttcagctgctcctgctatcgccaaggtggccgttccaactgtcagccacatttccacaggtccatcgaccccgctgggagtgggagtcgggtacgggtctagtggacatggtggagttttgctgggtgcgccgctgacgaagttgacatcggctcctgcttatgccctgggaggaaagctggccagcagcacggcctacggaatccaagctgggcatggatctggtcccagcggtggctactatggtgccatctccttgggtcatgcgaaggtatccccggcccttagctaccacggtctactgtcccatggatcgggtctggcatcaggcgcatcctctctggcccatttggactcctccctgagtggatactcacacggagtgggcggaatcggaccgctgggagctggattctaccgctatgctccaagtgtgccagcgctgagcagccacgcccccgtggcagccaccgcctacttgaagtcagcacccgtaactcaacatgccgtcctgaaggtggtgcccgagaagcatctggagcacttcgatgcccatcctcgatatgccttcgagtatgccgtgaatgatccccatacgggagataacaagcaccagaaggaggagcgagatggagacgtggtcaagggagagtactccttggttgagcccgatggcaatgtgcgcacggtgaagtactacgccgactgggagacgggcttccacgccgaggtcatcaacagtcgcgaccagggcaaaattgtggccaagcgtcagacggaaaccaagtcgtga

SEQ ID NO: 42000 - protein, 1229 aa, DROSOPHILA
MLNLHLVALLGILSVVLADPSPTLAPPILPCVHASTAGYAYPPPAEVKFSISPGVTKYSQSPAISTYSENGQLLHTSVGSSGAAYQSTAGIEGLSHGGITQINKYIAPVQKSLFSPSAEYGGAGITYADKSPAAKYATVVPSGIEIKNLVSPAVTKLDNSYLPPSPGITKVATYTSPGYSYSSASPGISKVATYSSPSLSSVPYYAPPVTSKVETYSSPAYTYSKTTPGYSKVETYSSPGYSYGQISPGISRIATYSPSVSYSAPTIAKVSTYSAPSVKLATTSSLLSSHGTGYSASYAPSITKYSQVSDVSHQYISKPIVAAYPAITKVAASYGGTASGALSHQYVSQPAIAKVSTYAAPTVATYSSGPAISKLSTSYGASGSGAVSHQYVSKPAVAIAAPAVAKVATYAAPAISSYSTGPAISKVASYAAPTVSTYSSGYGYGSSGSGAVSHQYVSKPAVAISAAPAIAKVATYAAPAISTYAAAPVVTKVATGYGGSGSGYSSGAVSHQYVSKPAVAKVATYAAPAISTYSAAPAVTKIATSYGGSGHGAVSHQYVSKPAVAISAAPAIAKVATYASPAISTYATAPVVSKVATYAAPSIATYSSAPALAKVSYSQAADVSHQYISKPIVAAYPAAAPAVATYSSAPAITKLSTSYESSGSGAVSHQYVSKPAVAKVAAYAAPAISTYATAPAVSTYSSAPVVAKVATGYGGSGSGYSSGAVSHQYISKPAVAIASAPAIAKVATYAAPAISAYSSAPSLTKIATGYGESAHGGALSHQYISKPAIAVAPVAPVLSKTYLPAAPAVAKVATGYGISGSGAVSHQYVSKPALTLAAPAVAKVATYAAPAISSYSTGAGISKGLSYAAPVVSTGHGYGGSASEYSSGAVSHQYVSKPAVAISAAPAIAKVATYVAPAVGHILGGHAVGSVPVLSTKLATGYGGSGSGYSSGAVSHQYVSKPAVAISAAPAIAKVAVPTVSHISTGPSTPLGVGVGYGSSGHGGVLLGAPLTKLTSAPAYALGGKLASSTAYGIQAGHGSGPSGGYYGAISLGHAKVSPALSYHGLLSHGSGLASGASSLAHLDSSLSGYSHGVGGIGPLGAGFYRYAPSVPALSSHAPVAATAYLKSAPVTQHAVLKVVPEKHLEHFDAHPRYAFEYAVNDPHTGDNKHQKEERDGDVVKGEYSLVEPDGNVRTVKYYADWETGFHAEVINSRDQGKIVAKRQTETKS

SEQ ID NO: 42001 - DNA, 5151 bp, DROSOPHILA
caccatcacttgtttatttttcaagttggtctacagctttcttttcctatctctctgataacaatgtttgtcaagtttttagggtaaatataatagagtaaataaaaatagagcgcgaagtgtttgttttaattttaatgacaatgttaacatactttattttgtgtatctgaatcatttactcatctagagtatccaattatgtattacacatattatacttacaaatccattaaaacttcacatcttatcaaaacacttattccttttagaaaataaagggggaatcaaggagcttacaaagcaagcgagctcaagcagcttagctccaccacccgcagctccagtaacgccttcctcacgcaccagcaccaccaccacgacaaccaccagcaccaccagatcgactaccttggcacccacctcttccagcaccgaagaggcacccttggccatcgacatacgcatcggctgacgaacctagacctaaggctccattctatcttatgcattaaagtgacattaaagttgctagccaaaccacaagttatctatccattaccattataatcggccaggcgaagcctggatgcgcacagcgtaaccatatccaggccacttacagggatcttcttttagggctgtctgcgctaaaatatatggtaattctagagcataaacaacggcagggggtgacagtaacacaaaatgcgaatgcaaaacaaacggaaagaaagtggcaagacaacctaccagctaaactgatctggaattgagcacactcagtcagcagaaacaaaacaaaagccccactttgccccactcctacccgcgaccattcccgcaaagttgcgattcttcggagaatcgcacctctcacgcactctacgcaggaacaaaggcgcaatccaagaaccggactgcaaaaaaaaaagagtgtttcgagaccgactcccactataaaagtcgagccgatcgagagcttcactgtcatttgacgccaaacgcgcgtcgcacgcagaagtctcgagattcccccgatttcacaatatagtatatatatagttatatattcaattcttcgccggatcgtcgtttcgtggaggagcatttagaaatgggtaagccgcactgtgcatacaaagtgcaaatcggtgaatgaacttgaggcgtgcagcgttatggacacataaccttagccggtccaaaagtataagacctaacacactggaacgataagagactcgaactacattcaattaaaaatgcgcgtcacgtcgatctcaaaaacaagtcttaacgggcaacgggagaggctttaacgattcttttatttgaaaacaaaaacgaacataacaagctgttgtattcctgaaaagtccaaggatgatgtgcttaaaataaacaatatacaatacttacttggttcataaactctcaaggagtgcacttccattaaattcatatctttataaacgtgttctatttataccttcttcattgccgcttatttaccacaactccttttagttcgatatattccgctcctactcctgggagtgctgtgctcctggccagctgccactgtggccagtgaccaggcttcccgcatcgtctgctactttagcaactgggccgtgtatcgaactggaatcggtcgctatggattggaggatgtgcccgccgacctgtgcacccacatcatctactcctttattggtgttaacgataagagctgggatgtgctggtgatcgatcctgagttggatgtggatcagggtggcttcagcaagtttacacaattgaagaaatctaatcccaatgtgaagctcgagatagcagtgggtggctgggcggaaggtggctccaagtactcacaaatggtggctgttcgcgatcgccggcaaagtttcatacgcagtgtggtacgctttatgaagcagtacaacttcgatggattcgacttggactgggagtatccgggagccacggatcgcggtggcaactatggggataaggacaagttcctttattttgttgaggaactgcgacgtgccttcgatcgcgagggtcgcggatgggaaatcaccatggcggtgcccgttgccaagttccggctgaacgaaggttaccacgttccggaattgtgcgagtgagttgaatacgtttctttatttttatttcccttagatatatataaatatatttatcatggttctgggcagtcagctagaagaagttaacttatcaaaatccccatatctatccagaaacttgtattccctttgatttattgcagagcgctggatgccattcacgccatgacctatgacctgcgaggaaactgggccggattcgccgatgtgcacagtccactctataagcgaaagcacgaccaatacgcctacgagaaactgaatgtggtaagtgtgattaaaaaaaaaaaaaacatgtggggaggatgggacggatttcgattctggtgccaaactaattatcgtcgccattcaagaacgacggccttgcgctgtgggaggagatgggctgcccggccaacaagctggtggtgggtgttcccttctacggtcggacgttcacgctgagcaactcgaacaagaactacaacatgggcacctacatcaataaggaggcaggcggcggagctccgggtccctacacgaatgccagcggctttctggcctactacgaaatttgcaccgaggtgatggacaagtccaagggatggacggtagagtgggatgacgctggcatggtgccctacacctacaaggacacacagtgggtgggctacgagaacgaggcatccatacagatcaagatggactttatcaagcagcggggatacgctggtgccatgacctgggccatagatatggacgacttccatggaatgtgcggcaggaagaacggcctaacgcaaatcctgtacgacaacatgaagaactatcgggttccggaacctacaaggcagacaacaccaagggtaaaactatatcagtaactattaaatggtctaataacttagcttaaatcgcttgcagcctgagtgggcaaagccgccagcaacaccgccaaatccagatgagggcgcagtggtggcaccaactactagcactaccaagcggccaaaaccaaaaccgaagccaacttcaagtccattgagcccaacatccgctccaggtcctgttccaactgttggcagtagcactccgaagccaaccacaaaggtaaagcttaactggttttatattatagataaagtttttctttaatattttaatatttaatatttatatcatttctatagaagcccaaaaagccaaagaagacaacaaccaccacaacaaccactcctgctccggaaaagagcactgaggagccagaagaagttgtttacccagtggatccagtggagcccactgatcccgagcagcctatgggaccgcagttcgatcccaacgagatcgattgtaccaaccgtgactttgtaccacatcccaattgccgaaaggttagtatttaggataagaagttcttcagagctaatagtttgaaaaaagtagtgcatacttcaaggcgatggtatgtattttgtatttggatgacttatttcggttaccaaactaaaatgtatattgttgccatgaaatgaattggccttttattttaaatgttcaatatagatacaaataaatgtgttttttggaatacgtttattttctagcacaaacacttaattataaaactgaaaaaatcgtatttaaaaacaatatttccaaaatttccacagtacttccgctgtgtccatggcaagcccgttgaattcgagtgcaaggagggaacggccttccacacggtcctgaatgtctgcgattggatcgagaacagcgaccgttactactgcagtcgaatgaagaacaaggagaagggcaacgaggcccattaactgtcccaaaatatatgcataaactatttaaaacgaaaaattttagcataggtttggaatatgtctagtaatacttagaactaggtatctaagtatttaaaatgaatagcatctaagggtcataaagtagaccagacgagacgaaaaccataaaaataaatatgattttaaaatccaataaaccaagaactaaatgagccgttcaatagatgtatgagccatcatttcgagaataaaacaatgcccgatgaggcagatcgtgtcttacataaccattacgcatacgtaatgcaccccggcctgccgcaattttagatggggacttgccatttctaattaggctaataaacgcaatgacttgggacagatttgcacttgtccgcggcgaagtgaggtgggctgcaccagaacttttagccttggaacacaaccaacgaacagctgttggtgcaatcaaccatataagcgagcaatgataaatgctacagcggaatgtataagttcaatccctaacatttggttttcataatctcaactcatgtgcggagagcttgagggaaatggaacctaagcacttgtgacacgaaacaaatcgcaaaggggccaacgctttgatttcgaaatattctttttggctcaaaagatgctctgagtaatttgcggaatgagcaccgcattgtctataattaaacattcctccaaaacgaaagtgccgagagagaaagtgatctagagctacgaaaatatctaatcatcaatatctaattaaagtttactaactggtaataatatatttcagaaatgttgaaaataatttccatttcccataaacccattaatctcctcaaaggttttttgtcacgtatccgccgggttgtacccaaaatcccggcagagagcgccgccacccggcgagaggaaaccgaaataaaaatgaaaattcaaatcaggcgaatgtgaaaagccactcactcactcaactgtgtgtgcttttgacaaaaattcgtgctacgaaaatatcaaaatcgaataattttcgcggtcacaaggtaaattcatggtatatgcatgttgagttacgaattggttttggaccgggagagatcgtctcgtatactcgtgtacggcaaaccgaaatttccttccttcagacattcagactagatagaaaatagatgtgatag

SEQ ID NO: 42002 - DNA, 2089 bp, DROSOPHILA
ccaaacgcgcgtcgcacgcagaagtctcgagattcccccgatttcacaatatagtatatatatagttatatattcaattcttcgccggatcgtcgtttcgtggaggagcatttagaaatggttcgatatattccgctcctactcctgggagtgctgtgctcctggccagctgccactgtggccagtgaccaggcttcccgcatcgtctgctactttagcaactgggccgtgtatcgaactggaatcggtcgctatggattggaggatgtgcccgccgacctgtgcacccacatcatctactcctttattggtgttaacgataagagctgggatgtgctggtgatcgatcctgagttggatgtggatcagggtggcttcagcaagtttacacaattgaagaaatctaatcccaatgtgaagctcgagatagcagtgggtggctgggcggaaggtggctccaagtactcacaaatggtggctgttcgcgatcgccggcaaagtttcatacgcagtgtggtacgctttatgaagcagtacaacttcgatggattcgacttggactgggagtatccgggagccacggatcgcggtggcaactatggggataaggacaagttcctttattttgttgaggaactgcgacgtgccttcgatcgcgagggtcgcggatgggaaatcaccatggcggtgcccgttgccaagttccggctgaacgaaggttaccacgttccggaattgtgcgaagcgctggatgccattcacgccatgacctatgacctgcgaggaaactgggccggattcgccgatgtgcacagtccactctataagcgaaagcacgaccaatacgcctacgagaaactgaatgtgaacgacggccttgcgctgtgggaggagatgggctgcccggccaacaagctggtggtgggtgttcccttctacggtcggacgttcacgctgagcaactcgaacaagaactacaacatgggcacctacatcaataaggaggcaggcggcggagctccgggtccctacacgaatgccagcggctttctggcctactacgaaatttgcaccgaggtgatggacaagtccaagggatggacggtagagtgggatgacgctggcatggtgccctacacctacaaggacacacagtgggtgggctacgagaacgaggcatccatacagatcaagatggactttatcaagcagcggggatacgctggtgccatgacctgggccatagatatggacgacttccatggaatgtgcggcaggaagaacggcctaacgcaaatcctgtacgacaacatgaagaactatcgggttccggaacctacaaggcagacaacaccaaggcctgagtgggcaaagccgccagcaacaccgccaaatccagatgagggcgcagtggtggcaccaactactagcactaccaagcggccaaaaccaaaaccgaagccaacttcaagtccattgagcccaacatccgctccaggtcctgttccaactgttggcagtagcactccgaagccaaccacaaagaagcccaaaaagccaaagaagacaacaaccaccacaacaaccactcctgctccggaaaagagcactgaggagccagaagaagttgtttacccagtggatccagtggagcccactgatcccgagcagcctatgggaccgcagttcgatcccaacgagatcgattgtaccaaccgtgactttgtaccacatcccaattgccgaaagtacttccgctgtgtccatggcaagcccgttgaattcgagtgcaaggagggaacggccttccacacggtcctgaatgtctgcgattggatcgagaacagcgaccgttactactgcagtcgaatgaagaacaaggagaagggcaacgaggcccattaactgtcccaaaatatatgcataaactatttaaaacgaaaaattttagcataggtttggaatatgtctagtaatacttagaactaggtatctaagtatttaaaatgaatagcatctaagggtcataaagtagaccagacgagacgaaaaccataaaaataaatatgattttaaaatccaataaacc

SEQ ID NO: 42003 - protein, 595 aa, DROSOPHILA
MVRYIPLLLLGVLCSWPAATVASDQASRIVCYFSNWAVYRTGIGRYGLEDVPADLCTHIIYSFIGVNDKSWDVLVIDPELDVDQGGFSKFTQLKKSNPNVKLEIAVGGWAEGGSKYSQMVAVRDRRQSFIRSVVRFMKQYNFDGFDLDWEYPGATDRGGNYGDKDKFLYFVEELRRAFDREGRGWEITMAVPVAKFRLNEGYHVPELCEALDAIHAMTYDLRGNWAGFADVHSPLYKRKHDQYAYEKLNVNDGLALWEEMGCPANKLVVGVPFYGRTFTLSNSNKNYNMGTYINKEAGGGAPGPYTNASGFLAYYEICTEVMDKSKGWTVEWDDAGMVPYTYKDTQWVGYENEASIQIKMDFIKQRGYAGAMTWAIDMDDFHGMCGRKNGLTQILYDNMKNYRVPEPTRQTTPRPEWAKPPATPPNPDEGAVVAPTTSTTKRPKPKPKPTSSPLSPTSAPGPVPTVGSSTPKPTTKKPKKPKKTTTTTTTTPAPEKSTEEPEEVVYPVDPVEPTDPEQPMGPQFDPNEIDCTNRDFVPHPNCRKYFRCVHGKPVEFECKEGTAFHTVLNVCDWIENSDRYYCSRMKNKEKGNEAH

SEQ ID NO: 42004 - DNA, 4336 bp, DROSOPHILA
ataatggccaagatactttgtggtcatttggatgtggcttaaagttgtatatatataggtatactctgcgaaacgttgaagacatttcatctagtcactaaatcttactcaactgtcactcgatttagaagctgttttgtttactgaaaattttcatcctgtacgcatttgcaaaatgtttgtgccaaactaaatgtctcgaaacattcagtgcattctttttaactatattttcatatgaaaattgttcgtttgtcttattgttcaaattttattaaacttgaactattaaggttaaaataatatcggccttagaactggattcgtacataagaaaataaaaaaaaaaaaacatatggcctaaggtatacatataaacacacatatagtgggcagggagaattttaaaagttctcttgatataactttacctatttatatattggtaaaaaataataaaagaaaaatatcaaatgatttttaggaattgagagtgacaacttgcagttgctgtttgttagcgtgaccaacaaacaaacaataaaaaatattgcataatttcaaatattttttttcaagtgtggtcgctttggtaggtttgggcgttctgtgggattgacagtactaaaatctacattcttcaccttaactttctagacgggacggacatcgactggtaattccgatcaagaataaatatactttatagagtcggcaactttcatggtaaacatgaagctgtgttaattcggccatccgtccgatcattaccaaataaatctgaacttcaataagaaaaaactgagtgatatgtgtacgttttacaaaaggtagaaatcccgaatttaaagattttgtgcaaacaaaactttaatttgtttcgccgtatatggattccatgaaaagctcattgccatcttctgactaataaatcacacaatactattgtgtaaaagataatagtaacacctatcatgaataagattgaatacaatcaatataaataaaagttaattctaggtttatttggcttattcagtaaaaaacaaacttaaggaaacactaaagacctttattatttttctagtagagcaccacctcctcaatcccataccaatttgtagagtacatcggtttcacctgacgtttctccacaatatttgtgagcagcggcagcaaattggctaaatcgaataaactttcttcgtagaaggagaggaaagtggcccattcggagagagtctcgagcaatgcctcgtccttggaaataatcagcagggtgaaatgggaggtcaagatgcagccaaaccactggatggcctgtacttccgtttgaattggcgagcaattcaggctgggtcgttcctccaactggacattggggtcattgaccagatcgaacaggtggctcatcaagtgctggacatgggagagctccagtcggtaacgcagatgctcctcgatgccggtggcatcaaatctgcaggctagcactgcatttagcagttccttgttggagtaactcttagccgttggtacagcgttggaatcgccattaatagcatgacgaggcttgcatttatctagagcatagcgcagtgaccaggccagcattctctccgatatgttgctgtagcgcctaagacacatcaggacatgctctgtgttgtcggtcttgatgaaaagtgtgagaatcctttcgatgatttcctcttccccagctccacttctctccagctgccggactaaagcctgcacagctgtattattcggccccttgtcaaagaagttcgtcattagagtgacactcacgtcctccagcccattctcgcaaatggtcgcctctccatgaacatgctgtttgataatttcgtcgatctcttgatccactacctcgggaggatcgtaagccaactcccggccatcagctttttggtagtccaagttgggcatctgcttatttaactgggatttcacagctctataatttaagggtttcgtactaccatcaaacttaataagcgactccagatactcctcctcgtttatgtgatccaattcaataggcgagaggtgagtatcactaaactgagagcccaacatgtccaccagcacctcccggttcattcggtaacggaccgccgctatattatgccccatggccaaaaggatgtgctcattcccggcccaaaggcgagagaagtccaggtacactttaaagtactgcttcgcgttcaccaccttaaactgagtgttataaaccaacagagaggcgccttcctgcccatagttggcgccgtagatggcagcaaagtttcgtgagactccgtgcacggatagcttgctctccacattcagctcggccagcatagatacgaattgtccaggggatcgctctgatgtggcctccgccaggttaagcatgaagatgcgtttatcagaccctgtaaaattaaataaatttatagttttcgttcttacatcaaaactcattcctcacactgatataactaaagttacttacaaatggtcagcaactgaggatctgcatcgccctcgacgacagcatatcccgtgaggcgaacctcttcccgcttaatgaggtacttccgccggtcagccgtgtccagggagaggcggataagctgcatttcgccggtggcctttgtttcctcgaaatatgtgagcacctgctggccctgggccaatgcgtggactgtgggcttgctgatgaccttgctggcggctagggccagttgctcagccgtatcctccttctggtcctttctcgaagccaatgcctgggaaagggtttggcactcgccatcgctgtagaggattaatgcctcctgttcggttgccaccacgtgagcgatgcttttctgaaactgtaaggaaagcgtattatccacaattatatgctgaattttagctgcccataccttcagcttcttgcacttggacacatcactggtgtccacatcccaaagacgcagcgcgtgatttccaaagacgcccacatacttctggctgctgggatcgtatataaccttggaggaaagcttctccggcagggaccaactgagcaactgcttttgtgtgctgatctataaggaaatcgcgtttgttacatgggcattttgatattttggtgtccaaacgcacgttcaaaacaaccaccacgttgcgcgccaacgtagtcaccacattgccattttccctgtctgcagctaggcccagaaactccttggggtcggggatgggaaacaggttgtagtaggacaggaatttggacattatttaattgaattgaaaacaattgcagcacgtgcaaagcggcatccaaaactaaaccacagggcgattcgtgccattgaaatcagtgttttggtatttaaaataccgacagtaaggctgccagacctctgcgaaatacgaacacaaatggttgccggacctgccacgtgctatcgataagaggaagagacagaagaagaagagagaaatgggtggaaagacaaaacaagcgccgcgcaccaaaaataatgccaaggtaaggcgtagtaaggtattaatatgttatttaaccgtgccctcgaccccccatcatccagccctcgagcagcagccgaacagccgagctgctgggcagttccacgcccatattcgtgggattctcggcgcagacggacggcggtggcctggtgccatttgctccgggattcgccagcgccgaacaaatgccggacagctttgatgcggccatcagtccgcaaacgcagatcatccttcgaaagctgtccaaaaaggatccaatgacgaagaagaaggcgctgcaggagctacacgaactgatcgagcagtctgacgtggaggtcctcaagaacattctgcctctgtggcccaagtactacctcaatctggctagcgatccggagcacactgttcgcgaacagacacagactgtgctgcagttgctcatggccaagtgtaaaaaggcgatggctccatatctaaagttacttgtgcccgtttggctgggcagccgatttgatacctacgctccggcggccagtattgcgagccaatcctttcgagacacctttgctggcaacgccaaccgatctcgggaagtctgcatgcactgtcaggtggagattctcgagtacgccacacgtaacctgaccttccacacagccgctactctgtcgattgggaaaagtctcactccggaggatgcggaacagaagtaccagcgcgttatcatcagtagtctcaagctgttgtcctttttcatggggcaaactgcgcagacggaggagctcagccaggtcaa

SEQ ID NO: 42005 - DNA, 2144 bp, DROSOPHILA
ctttgcacgtgctgcaattgttttcaattcaattaaataatgtccaaattcctgtcctactacaacctgtttcccatccccgaccccaaggagtttctgggcctagctgcagacagggaaaatggcaatgtggtgactacgttggcgcgcaacgtggtggttgttttgaacatcagcacacaaaagcagttgctcagttggtccctgccggagaagctttcctccaaggttatatacgatcccagcagccagaagtatgtgggcgtctttggaaatcacgcgctgcgtctttgggatgtggacaccagtgatgtgtccaagtgcaagaagctgaagtttcagaaaagcatcgctcacgtggtggcaaccgaacaggaggcattaatcctctacagcgatggcgagtgccaaaccctttcccaggcattggcttcgagaaaggaccagaaggaggatacggctgagcaactggccctagccgccagcaaggtcatcagcaagcccacagtccacgcattggcccagggccagcaggtgctcacatatttcgaggaaacaaaggccaccggcgaaatgcagcttatccgcctctccctggacacggctgaccggcggaagtacctcattaagcgggaagaggttcgcctcacgggatatgctgtcgtcgagggcgatgcagatcctcagttgctgaccatttggtctgataaacgcatcttcatgcttaacctggcggaggccacatcagagcgatcccctggacaattcgtatctatgctggccgagctgaatgtggagagcaagctatccgtgcacggagtctcacgaaactttgctgccatctacggcgccaactatgggcaggaaggcgcctctctgttggtttataacactcagtttaaggtggtgaacgcgaagcagtactttaaagtgtacctggacttctctcgcctttgggccgggaatgagcacatccttttggccatggggcataatatagcggcggtccgttaccgaatgaaccgggaggtgctggtggacatgttgggctctcagtttagtgatactcacctctcgcctattgaattggatcacataaacgaggaggagtatctggagtcgcttattaagtttgatggtagtacgaaacccttaaattatagagctgtgaaatcccagttaaataagcagatgcccaacttggactaccaaaaagctgatggccgggagttggcttacgatcctcccgaggtagtggatcaagagatcgacgaaattatcaaacagcatgttcatggagaggcgaccatttgcgagaatgggctggaggacgtgagtgtcactctaatgacgaacttctttgacaaggggccgaataatacagctgtgcaggctttagtccggcagctggagagaagtggagctggggaagaggaaatcatcgaaaggattctcacacttttcatcaagaccgacaacacagagcatgtcctgatgtgtcttaggcgctacagcaacatatcggagagaatgctggcctggtcactgcgctatgctctagataaatgcaagcctcgtcatgctattaatggcgattccaacgctgtaccaacggctaagagttactccaacaaggaactgctaaatgcagtgctagcctgcagatttgatgccaccggcatcgaggagcatctgcgttaccgactggagctctcccatgtccagcacttgatgagccacctgttcgatctggtcaatgaccccaatgtccagttggaggaacgacccagcctgaattgctcgccaattcaaacggaagtacaggccatccagtggtttggctgcatcttgacctcccatttcaccctgctgattatttccaaggacgaggcattgctcgagactctctccgaatgggccactttcctctccttctacgaagaaagtttattcgatttagccaatttgctgccgctgctcacaaatattgtggagaaacgtcaggtgaaaccgatgtactctacaaattggtatgggattgaggaggtggtgctctactagaaaaataataaaggtctttagtgtttccttaagtttgttttttactgaataagccaaataaacctagaattaacttttattta

SEQ ID NO: 42006 - protein, 673 aa, DROSOPHILA
MSKFLSYYNLFPIPDPKEFLGLAADRENGNVVTTLARNVVVVLNISTQKQLLSWSLPEKLSSKVIYDPSSQKYVGVFGNHALRLWDVDTSDVSKCKKLKFQKSIAHVVATEQEALILYSDGECQTLSQALASRKDQKEDTAEQLALAASKVISKPTVHALAQGQQVLTYFEETKATGEMQLIRLSLDTADRRKYLIKREEVRLTGYAVVEGDADPQLLTIWSDKRIFMLNLAEATSERSPGQFVSMLAELNVESKLSVHGVSRNFAAIYGANYGQEGASLLVYNTQFKVVNAKQYFKVYLDFSRLWAGNEHILLAMGHNIAAVRYRMNREVLVDMLGSQFSDTHLSPIELDHINEEEYLESLIKFDGSTKPLNYRAVKSQLNKQMPNLDYQKADGRELAYDPPEVVDQEIDEIIKQHVHGEATICENGLEDVSVTLMTNFFDKGPNNTAVQALVRQLERSGAGEEEIIERILTLFIKTDNTEHVLMCLRRYSNISERMLAWSLRYALDKCKPRHAINGDSNAVPTAKSYSNKELLNAVLACRFDATGIEEHLRYRLELSHVQHLMSHLFDLVNDPNVQLEERPSLNCSPIQTEVQAIQWFGCILTSHFTLLIISKDEALLETLSEWATFLSFYEESLFDLANLLPLLTNIVEKRQVKPMYSTNWYGIEEVVLY

SEQ ID NO: 42007 - DNA, 8461 bp, DROSOPHILA
aattttaaatcgttggcgcaggtaaatgatctaaatttgcaatcactcccccgtatattcccataacaaaatttcattttatatagttcgctcttatgaatggttaaactaaactctgtcttactttctcatgctccacagacttcttcatcgatgcgcatacaccaaatgtggaggatagtaaaacatcagcgccacaattctcccgcctggacctggagaccgagtcggatgctagtgtgctaagtgatcccgaggttgatcagacttttagctccacggcctccacgcacagcagcgacatgtatatagaaattgaggggtaattagtaatggggagggggcaatcctcttaggaactgtatcgaaacatctccaaagcggctcgtagcaaagcgaaaagcctagtagcgtttccattagtctaaattagtcttagtacgaccaacgtatgtacctaacttaacttagccgtatgctgccattgtatcatcgtcagtttgtaagcggcaattagctaataattgcattcttgttattagtcaccctcacacgacttgtattacatccaaatccccatctgtgtttagcctaagttgataatgtataaacaataaaaaaaataaacaacaaatatttacagaatgtctggttgcgcatttactattaataaaataactaattgtgattaatggggaattcaaggaaggaaaaaaaaaaacaaacaaaaatatggtgcgcttcgtcactatgtaaactgtcgttcacagtgatatatatgcagtgcacttctttcatccatctataacaatttatataaattgttagacattcgcattcgtaatatcaaattttttaaatttcattttctttataaaatttaatcggcataaaaatttaatacttctggaaaagaataccgttctaaaaagtatcgatgccaatgaatggaataccccctacgcacctgccatttttagtgcatatttccagaaagctgaaacggccacactgcaacatttttcataaaacaatcttgttttgatattggtaaattaattgccagcaattagtttaaattgtgtgtaaaataaaaggccaactgggcaggcaacaagtaaactaatcaccatggaggcggtgccccgtttgcatatgctctggttcgccctaaaatcgagtcccgagggaacctcctttgcggctttgaaaaaggtaaaaggaagagagtgcgaaagggggagtgaaataattaagagagccagcaaaacaaagaggagacaacttggtgaaacggaattatcggtcaaattgggaaaatgcgttgcttattggattcatattggaatcgaaattcccattctcaccatgccatttgctccattgcattttccgttttcaccaacttttaagccccctttgtctggcggctgagtcatcgtcgtcatctgattaaattggcaaacaaataaaaagttataagcaaacactggcagtttgttgggttattgcacttaattccccatgaaaacccatttaccctaaaatatattcttgttttcctacactaaactccataacaaaaatccaacttaaaacatttcacgttttacttccagtacatcgcggaattttatcatgaagatccagaggcttactccaaagaggtccatgccctggagactttgcgcaaccaggccatgcacaccacgaaagatggagcgccggtgatgaaacgctactattgccagctacacgcccttcagaatcgatttccacagctggcggatcgcggaatcttcacctttaaatggaaggatctctatcacagtgccgttcacgaggtcactgatctgcgattcgaacgggctgcggtgctgttcaacattgccgcattgcacactcagtccggagcgtcggtgacccgtggcgatgtggatggaatgaagatggcctgcactcacttccaggcggctgcttgggcctatggagagctgagagaacgctatgccaatgtcaatggcggaggggattttatgaccccagagctgctggtctttcagcaacaggtgtgctttgcccaagctcaggaatgcatactcgagaagtcgctaatcgacaataggaaaccgcatattgtggccaaagtgacggcgcagattgtggtttactatggagctgcactggctgctcttcttacgggaggagatgatggtccagtggctcaagtcatcgatagttctgtgtacaaactgtggaagaagtacgttcgcttcaagatcaactatctcacctgcatattgtacctataccagggccaacattccgaggagaagcgtcagatgggcgaaagggtgacgctctaccaggtaactataacattttgagctctatttaaaggaaaggtttaaatgcttactttatattcctttcaggcttcctgggacaaactggaggaggcgcgcaaagagtccaagggccttcctgaccagcgggaaatcaatgaatccctcagcttcaccgctgatgtggtggaagcaaagcgcaaaaatgccaaaaacgaaaatgagttcatttaccatgaggcggtgcccgaattgtccaccattgcagccgtccaaggtgccaatttggtcaatgggattggctttcaagtaagcgacgaggagcacgcgggtccagacatctttgccagattagtgcccatgaaggcccacgaagccagctcgttgtacagcgaagagaaagccaaacttttgcgtaagtacggagctctgctggaggagaaggacacccaactggagtcgtacatgagctccctcaccctggataatctgaatatcaacgaggagcaagccaataagttgccccagggcatcgtggatcgctgtgccgccttaaatgcaaacaagactgctatcagcgatcttgtagaggccatgtctcagctggctgagattacagccgatgtggagaccaacctgggcgagatttcaagcatgctggaggcagaagccaaagcggagcgagagttccaatccgccaccggcgttcaacgaacaccaaatgcccacattaccgagttatcgcgagagttccagaaatacagtgaagcccatgcacgggcaggggaatccaataataccttgcggaaagccatgagcctgcacgtaaataatctaaagatcctggccagaccattgcctgagattcagcaactgatgcccaaactaagttcggaactgaataccaccgaaattttcagggatgtgaagctcatcctcaacaaagtcaacgaaatgaaggcgcaacgtgctcagtttcatgcggatttgaggatagccatcaatgaggatgatatcactggcaaagtaattgcccacggtggacaggagggcctccaagctttatttgcaaccgagctgggcaagcacgacaagatcaccgaacttctcgatcagaatatggtggctcaaggtaatattctgcaagctctaactgaaaactatgccaaggcggcaccagttttgaaaacgctccaggacgtgaagcagaaacgggagcacttttacagctcgctagctgcatcctatgatgtttatgaggatctgctggccaaatccgccaagggcttggaattctacaagaaactagccggaaatgtacagaagctacttaccagatttcgatccgccagggatgtacagtccgaagagcgccagcaaaggatgcagagcgttaaggccgcaacaactccagttgtcagcaaaccaatagcggaaactacgcctgtgccagcggtgagcagcacccccaaattaagggattacctcaaggccaaggcagcgatggcggatgcctcgaatcccgcctatgtgcctacagtgcgtccagtgccggtgggctcggagaatcccacgcaggccgcttgttcctatgccactgcaccaccgaatgagccacctccaccctatagtctcacacagcagcagtattttgatcccagtgccgccggctacacgaatcccatgtatcagcagcaacagcagcacattgctccaccggcctacaaggcccaagcatcgccaaactctcagaccctccacggagcgctcggtcagatgaatttgcagggccagtcgcaggataacaaccaagcaggcatggcttataattacgggtatccaagtgggtctgttcctcctctagcttacgctccacccggaacagtgcccgcaagctcagcttcccagggattgaatatccagcagcctctgtatgtggctacatcgggcaatccagtttcggtttcaaatcccagtgagctgccgtccaccctgcaggcacccttcgtggtcaatccaatgtccaatccctaccaaacagcggcaggttattcagggcaggcttaccaacaggtcaatgctcaagctcaacaggtgacttatcctacagcaccatcgggctcttcaacaggacaatcagctcaacagcccttgggttatgcgccaagtcaggggccacagcagcaagctggtggatatccacaatctcagacaccgcagcaacaggtgggagcttatcaacagcagccattatcaggctatgcccaacagctgacgcctcagcaacaaactggatattcacagtcgcaagcaccgcagctccaagcgcccagctatgcccaaaatcagcaatcgactggacaagcacagcagcaacagactggatatccacagacacctcaacaacatctagctgggtatgctcagtcccagcaacaggctacaggatatccacaatcgcagacatcgcagcagcagaccaccgggtattcccagtcccagacgcctcaacaaccactggcatatcagcagcaaccatctggttatccacaacaacaacaacagcagtcacttgctccgcaacagccatcactttatccatcgcaggctgtccaggcgtcgccacaacctattcctggccagcaggcaacacctccgaatgctgggcaacctttgccatatccacagcagtacactgatcccaatgcagctccagctccagctcctggggtttcttctgtaccaagtcctgttccagtaccgactccagcccccacttcatctcaagctcaggttcccacatctccgcatccttcggccacctacaccagctattccaaccatcctggctatagctttaatccgcagacaggtaaatacgagtacagcagtggctatcagcaggataccagttcgttgaagggatcccaagcctcgcaaagctaccagtttagccagagtggcaagcagcagtcggtgggaacaacggactcagagattgccagtcgcagcaataccgccactggattcgatgtaagtgctatgcccatatatattaaaggtattgagacctaaaataacgaaatttttatccaacagtcacctatcgtgtcccacaccaaggttaatatggcagctaaggactccacttctgcgatagagggcaatgagtcatccaactactactccactccctatggataccttggcagtgtaaatccgcagcaacaacccactcctgcgcctccttcgaattcaactgcttcaatttatatgcaaagtggagcgagcagcactgctgaaacccagacgacttccagcggagttccttacgcctcctccgcggctttgaccaaagtagaaccaaagccggaggcattgcctcccaaggttaccagcaatgtggatctgcttagcgacctggacattgactgctccgttgctgttccgccgccaatgttgccgcagcctgttttgcagccccaggtggtggccactcctacgccgccggcaagtcaggtatcggtgcctgttaaggtagaaagtgtggcagagcacgctgctcccgcaacagcggaaattcctgtagcagccaccgagggaactgctcaaactccagttaccattccttcgggtccgaagtgtgccagtttagataacctatccaactgttccgacctaagttccctggagaactttgactgggactcggtatccgttacacattccgtcagtgagaaacagaccaaggcatctgccacagccaatggccattcgagcagttttgcattccaatccgaaacttttacggacgaaaaaacgacaaaatatttccaaaaggaggtggagagctatgaaaaattactagagaatttgcacgtgaaaatgttgaatggaaaaacacaactgggcgccaaatggcaagagctgcagcaaaagttggataaagaagccgctgccaacaagcgatccaccaccattgcgaaattgttcccggagaaaaatcgatcccttgattgtctgccatacgatcatgccagagtaaagctggacaagcagaccgatgactacatcaatgccgcctacatgaaggtgagttattccagaaaatgtttttatagcacacaatctttaaacgccgttgttattcatttagaacttgagtgccggctgtcccaactttattgtcgctcagactccccagccaaataccatcaacgatttctggtccatgatctggtcggagaagtcgcgcactgtggtttgcctgcacaccccaaatgaagtgagtaacttcagcaaaactatgagattattgaatctaaatatttgatatgttctatagcttttcgatccctactggccgcaagctttggaccagccgactcattatgatgattacaccgtgacctgcttaaaagtgcagcaacttagccactgctccgagtatcaacttaaattgtccatgcatggagcggacgcagtgctggatttatctctactgcagctgaaacagtggaccaaggggtaacatgtccagatttcgtccgatggaaagaaataaataattgctattttacagggctccagctcaacttctgggtgtggcggaaaatgctttggagacccatcgacaacgctgcaaggcagccaatgctccgcaatcgccgctcattatgaactgcttaactggttcagagcgttccgaactggtggccattggagtatgtgctattatagcgacccaaaacaagcagccaattttgttaagtaagcgtaaaattttatcactgtaaattaacactaatcgcgtgcccctatttagatacgattgatgtttggtctcgcatttgtgcgcagcgtcaaaattcgcttagggattccgccatcctggagcagtccatgcaaattgtgctctgcaatgctcacaatgtgctaaacaaacgtaagctatataattaaacatttttatatttgaaagtcaagtaaccattgtcgtgcaggtggcataatgacctcatatcaaatgaagatggcgccgcaggtgacagccaaggagcagcaggagaacaaggatccgctcaacgagttggatgcactttggaagctgaagtaaacgactgagccaagcaaccaactaaagatctatgcgtaatcaaaacgagtatttatacaaatatttaactgtgcagacctatttctaaatatccaatattgtttcaaacaagttaaggcaagagaaaagtatttaaagggatatcgaaaacatgttttattctgtatcgtaaacgtctctttcaactgttatataaattgtaattcgaaatcgaaaccgaatcgtgatgtgtatgggatattgtcaagcgtttcaaaccactgtacgagtatattagaaatcaatcgaacatttatatcacttaaaataaaatacattaaaaatcaaatgggtgtagaaagcattcctggtggaaaatatcagtaaaagtagccgaatttacatcgaatcatgaaggtgatcagcattcgctggaagacctgcctgccaggccttataatagtttcttacctggtgtgtgctctgttgtatttcggaatggatataacaaagattgagccagtggaaccaagagtagtgaaaaacaagaccaaagtgccacgaatgtatgccaaaaccatcaatcatgatggcaactgggagactattgtaactaatccggaattaaagcccagatatcgggttggcggcggcaggactggtgtccagttcgtgattggagtacccactgtactgcgaccgaaaaagaactatgtgctccaaaccgtggactgtctgatccgtcgaatgactccggagcagcgcgacaattgtctaattgttatattcgtgggtgaaactaagctgcagttcgccaagttcatagtaagggaactgcgtgtgaatcattcgacgcatatgcaagctggcctaatcgatgtcattgcgccacccttgaattactatcccaacttctcgagactccacatcacgctgaacgatgatccgcagcgagttcagtggaggaccaaacagaatctggactacatatacctgatgtcctatgctaagagcaggggtt

SEQ ID NO: 42008 - DNA, 5504 bp, DROSOPHILA
aaacggccacactgcaacatttttcataaaacaatcttgttttgatattggtaaattaattgccagcaattagtttaaattgtgtgtaaaataaaaggccaactgggcaggcaacaagtaaactaatcaccatggaggcggtgccccgtttgcatatgctctggttcgccctaaaatcgagtcccgagggaacctcctttgcggctttgaaaaagtacatcgcggaattttatcatgaagatccagaggcttactccaaagaggtccatgccctggagactttgcgcaaccaggccatgcacaccacgaaagatggagcgccggtgatgaaacgctactattgccagctacacgcccttcagaatcgatttccacagctggcggatcgcggaatcttcacctttaaatggaaggatctctatcacagtgccgttcacgaggtcactgatctgcgattcgaacgggctgcggtgctgttcaacattgccgcattgcacactcagtccggagcgtcggtgacccgtggcgatgtggatggaatgaagatggcctgcactcacttccaggcggctgcttgggcctatggagagctgagagaacgctatgccaatgtcaatggcggaggggattttatgaccccagagctgctggtctttcagcaacaggtgtgctttgcccaagctcaggaatgcatactcgagaagtcgctaatcgacaataggaaaccgcatattgtggccaaagtgacggcgcagattgtggtttactatggagctgcactggctgctcttcttacgggaggagatgatggtccagtggctcaagtcatcgatagttctgtgtacaaactgtggaagaagtacgttcgcttcaagatcaactatctcacctgcatattgtacctataccagggccaacattccgaggagaagcgtcagatgggcgaaagggtgacgctctaccaggcttcctgggacaaactggaggaggcgcgcaaagagtccaagggccttcctgaccagcgggaaatcaatgaatccctcagcttcaccgctgatgtggtggaagcaaagcgcaaaaatgccaaaaacgaaaatgagttcatttaccatgaggcggtgcccgaattgtccaccattgcagccgtccaaggtgccaatttggtcaatgggattggctttcaagtaagcgacgaggagcacgcgggtccagacatctttgccagattagtgcccatgaaggcccacgaagccagctcgttgtacagcgaagagaaagccaaacttttgcgtaagtacggagctctgctggaggagaaggacacccaactggagtcgtacatgagctccctcaccctggataatctgaatatcaacgaggagcaagccaataagttgccccagggcatcgtggatcgctgtgccgccttaaatgcaaacaagactgctatcagcgatcttgtagaggccatgtctcagctggctgagattacagccgatgtggagaccaacctgggcgagatttcaagcatgctggaggcagaagccaaagcggagcgagagttccaatccgccaccggcgttcaacgaacaccaaatgcccacattaccgagttatcgcgagagttccagaaatacagtgaagcccatgcacgggcaggggaatccaataataccttgcggaaagccatgagcctgcacgtaaataatctaaagatcctggccagaccattgcctgagattcagcaactgatgcccaaactaagttcggaactgaataccaccgaaattttcagggatgtgaagctcatcctcaacaaagtcaacgaaatgaaggcgcaacgtgctcagtttcatgcggatttgaggatagccatcaatgaggatgatatcactggcaaagtaattgcccacggtggacaggagggcctccaagctttatttgcaaccgagctgggcaagcacgacaagatcaccgaacttctcgatcagaatatggtggctcaaggtaatattctgcaagctctaactgaaaactatgccaaggcggcaccagttttgaaaacgctccaggacgtgaagcagaaacgggagcacttttacagctcgctagctgcatcctatgatgtttatgaggatctgctggccaaatccgccaagggcttggaattctacaagaaactagccggaaatgtacagaagctacttaccagatttcgatccgccagggatgtacagtccgaagagcgccagcaaaggatgcagagcgttaaggccgcaacaactccagttgtcagcaaaccaatagcggaaactacgcctgtgccagcggtgagcagcacccccaaattaagggattacctcaaggccaaggcagcgatggcggatgcctcgaatcccgcctatgtgcctacagtgcgtccagtgccggtgggctcggagaatcccacgcaggccgcttgttcctatgccactgcaccaccgaatgagccacctccaccctatagtctcacacagcagcagtattttgatcccagtgccgccggctacacgaatcccatgtatcagcagcaacagcagcacattgctccaccggcctacaaggcccaagcatcgccaaactctcagaccctccacggagcgctcggtcagatgaatttgcagggccagtcgcaggataacaaccaagcaggcatggcttataattacgggtatccaagtgggtctgttcctcctctagcttacgctccacccggaacagtgcccgcaagctcagcttcccagggattgaatatccagcagcctctgtatgtggctacatcgggcaatccagtttcggtttcaaatcccagtgagctgccgtccaccctgcaggcacccttcgtggtcaatccaatgtccaatccctaccaaacagcggcaggttattcagggcaggcttaccaacaggtcaatgctcaagctcaacaggtgacttatcctacagcaccatcgggctcttcaacaggacaatcagctcaacagcccttgggttatgcgccaagtcaggggccacagcagcaagctggtggatatccacaatctcagacaccgcagcaacaggtgggagcttatcaacagcagccattatcaggctatgcccaacagctgacgcctcagcaacaaactggatattcacagtcgcaagcaccgcagctccaagcgcccagctatgcccaaaatcagcaatcgactggacaagcacagcagcaacagactggatatccacagacacctcaacaacatctagctgggtatgctcagtcccagcaacaggctacaggatatccacaatcgcagacatcgcagcagcagaccaccgggtattcccagtcccagacgcctcaacaaccactggcatatcagcagcaaccatctggttatccacaacaacaacaacagcagtcacttgctccgcaacagccatcactttatccatcgcaggctgtccaggcgtcgccacaacctattcctggccagcaggcaacacctccgaatgctgggcaacctttgccatatccacagcagtacactgatcccaatgcagctccagctccagctcctggggtttcttctgtaccaagtcctgttccagtaccgactccagcccccacttcatctcaagctcaggttcccacatctccgcatccttcggccacctacaccagctattccaaccatcctggctatagctttaatccgcagacaggtaaatacgagtacagcagtggctatcagcaggataccagttcgttgaagggatcccaagcctcgcaaagctaccagtttagccagagtggcaagcagcagtcggtgggaacaacggactcagagattgccagtcgcagcaataccgccactggattcgattcacctatcgtgtcccacaccaaggttaatatggcagctaaggactccacttctgcgatagagggcaatgagtcatccaactactactccactccctatggataccttggcagtgtaaatccgcagcaacaacccactcctgcgcctccttcgaattcaactgcttcaatttatatgcaaagtggagcgagcagcactgctgaaacccagacgacttccagcggagttccttacgcctcctccgcggctttgaccaaagtagaaccaaagccggaggcattgcctcccaaggttaccagcaatgtggatctgcttagcgacctggacattgactgctccgttgctgttccgccgccaatgttgccgcagcctgttttgcagccccaggtggtggccactcctacgccgccggcaagtcaggtatcggtgcctgttaaggtagaaagtgtggcagagcacgctgctcccgcaacagcggaaattcctgtagcagccaccgagggaactgctcaaactccagttaccattccttcgggtccgaagtgtgccagtttagataacctatccaactgttccgacctaagttccctggagaactttgactgggactcggaggtggagagctatgaaaaattactagagaatttgcacgtgaaaatgttgaatggaaaaacacaactgggcgccaaatggcaagagctgcagcaaaagttggataaagaagccgctgccaacaagcgatccaccaccattgcgaaattgttcccggagaaaaatcgatcccttgattgtctgccatacgatcatgccagagtaaagctggacaagcagaccgatgactacatcaatgccgcctacatgaagaacttgagtgccggctgtcccaactttattgtcgctcagactccccagccaaataccatcaacgatttctggtccatgatctggtcggagaagtcgcgcactgtggtttgcctgcacaccccaaatgaacttttcgatccctactggccgcaagctttggaccagccgactcattatgatgattacaccgtgacctgcttaaaagtgcagcaacttagccactgctccgagtatcaacttaaattgtccatgcatggagcggacgcagtgctggatttatctctactgcagctgaaacagtggaccaagggggctccagctcaacttctgggtgtggcggaaaatgctttggagacccatcgacaacgctgcaaggcagccaatgctccgcaatcgccgctcattatgaactgcttaactggttcagagcgttccgaactggtggccattggagtatgtgctattatagcgacccaaaacaagcagccaattttgttaaatacgattgatgtttggtctcgcatttgtgcgcagcgtcaaaattcgcttagggattccgccatcctggagcagtccatgcaaattgtgctctgcaatgctcacaatgtgctaaacaaacgtggcataatgacctcatatcaaatgaagatggcgccgcaggtgacagccaaggagcagcaggagaacaaggatccgctcaacgagttggatgcactttggaagctgaagtaa

SEQ ID NO: 42009 - protein, 1790 aa, DROSOPHILA
MEAVPRLHMLWFALKSSPEGTSFAALKKYIAEFYHEDPEAYSKEVHALETLRNQAMHTTKDGAPVMKRYYCQLHALQNRFPQLADRGIFTFKWKDLYHSAVHEVTDLRFERAAVLFNIAALHTQSGASVTRGDVDGMKMACTHFQAAAWAYGELRERYANVNGGGDFMTPELLVFQQQVCFAQAQECILEKSLIDNRKPHIVAKVTAQIVVYYGAALAALLTGGDDGPVAQVIDSSVYKLWKKYVRFKINYLTCILYLYQGQHSEEKRQMGERVTLYQASWDKLEEARKESKGLPDQREINESLSFTADVVEAKRKNAKNENEFIYHEAVPELSTIAAVQGANLVNGIGFQVSDEEHAGPDIFARLVPMKAHEASSLYSEEKAKLLRKYGALLEEKDTQLESYMSSLTLDNLNINEEQANKLPQGIVDRCAALNANKTAISDLVEAMSQLAEITADVETNLGEISSMLEAEAKAEREFQSATGVQRTPNAHITELSREFQKYSEAHARAGESNNTLRKAMSLHVNNLKILARPLPEIQQLMPKLSSELNTTEIFRDVKLILNKVNEMKAQRAQFHADLRIAINEDDITGKVIAHGGQEGLQALFATELGKHDKITELLDQNMVAQGNILQALTENYAKAAPVLKTLQDVKQKREHFYSSLAASYDVYEDLLAKSAKGLEFYKKLAGNVQKLLTRFRSARDVQSEERQQRMQSVKAATTPVVSKPIAETTPVPAVSSTPKLRDYLKAKAAMADASNPAYVPTVRPVPVGSENPTQAACSYATAPPNEPPPPYSLTQQQYFDPSAAGYTNPMYQQQQQHIAPPAYKAQASPNSQTLHGALGQMNLQGQSQDNNQAGMAYNYGYPSGSVPPLAYAPPGTVPASSASQGLNIQQPLYVATSGNPVSVSNPSELPSTLQAPFVVNPMSNPYQTAAGYSGQAYQQVNAQAQQVTYPTAPSGSSTGQSAQQPLGYAPSQGPQQQAGGYPQSQTPQQQVGAYQQQPLSGYAQQLTPQQQTGYSQSQAPQLQAPSYAQNQQSTGQAQQQQTGYPQTPQQHLAGYAQSQQQATGYPQSQTSQQQTTGYSQSQTPQQPLAYQQQPSGYPQQQQQQSLAPQQPSLYPSQAVQASPQPIPGQQATPPNAGQPLPYPQQYTDPNAAPAPAPGVSSVPSPVPVPTPAPTSSQAQVPTSPHPSATYTSYSNHPGYSFNPQTGKYEYSSGYQQDTSSLKGSQASQSYQFSQSGKQQSVGTTDSEIASRSNTATGFDSPIVSHTKVNMAAKDSTSAIEGNESSNYYSTPYGYLGSVNPQQQPTPAPPSNSTASIYMQSGASSTAETQTTSSGVPYASSAALTKVEPKPEALPPKVTSNVDLLSDLDIDCSVAVPPPMLPQPVLQPQVVATPTPPASQVSVPVKVESVAEHAAPATAEIPVAATEGTAQTPVTIPSGPKCASLDNLSNCSDLSSLENFDWDSEVESYEKLLENLHVKMLNGKTQLGAKWQELQQKLDKEAAANKRSTTIAKLFPEKNRSLDCLPYDHARVKLDKQTDDYINAAYMKNLSAGCPNFIVAQTPQPNTINDFWSMIWSEKSRTVVCLHTPNELFDPYWPQALDQPTHYDDYTVTCLKVQQLSHCSEYQLKLSMHGADAVLDLSLLQLKQWTKGAPAQLLGVAENALETHRQRCKAANAPQSPLIMNCLTGSERSELVAIGVCAIIATQNKQPILLNTIDVWSRICAQRQNSLRDSAILEQSMQIVLCNAHNVLNKRGIMTSYQMKMAPQVTAKEQQENKDPLNELDALWKLK

SEQ ID NO: 42010 - DNA, 3258 bp, DROSOPHILA
ctaaattcaagatcaatgctaaggggcggaatctccaacgccgtgaatcacaatgagtccaacatatagatattaactttgatttgtattccggcccgacgcctctggaatgacaaatagacccagaaatcgacgtaaatgctggcactacgggcgtgggagtgttcatagatgtatcgggtgaaatgtggagcattcgataactttctaaaagagtcttatcacagcccgatatcacattagcataatcgtgactcttgtggctcagtggatcgcccacaagtgcttcagtgatagccaaatttggattggctataattaatacacaaaaaaagttttatatacaagtggccaaatttgaacaatttcaacacggttagatgtctctcatgttagattttccagcaaggaaaactaaatttaaattgactactatacttaatatttatatagtataggcaaactttttagtaattttttttttaattttaatttattatatgcgtaaattacgcttgcttcacaagttagtaattattatacagatattttcccaagtgtaatggctaacaaatacgttaatctgtgaggttttcgcactgccgcacaacgcactcaatggggttcaattcgacgacgaccgcaaaattaacaacattttgtcacatttactggcaattaatgtacgttagcagctattccggaccaacatcggcccgactaattacaatatgctcaagaaacaatcgacctatgaacgcggtggcttatgtacatacatatgtaaattggtagttggtatgaaaaacctgaattatcattaaccgatcaggtttatggcgttgagcggcgatgatgcgcgcaaaagtaactcaaaatctgagtgactaagggagcagcagataaaaaaaaaccccgacatgcgacattgtccaagtattaattgtgcggaataaagtgactcgacccgcgagatttagtcgattttgtgcggctaaagagcgaggttcaagcgaaacgttccacgaaagatatatacggctaaagtggtgcagttgtccaaggaatccagaatagcagtatgttagcctcagttgccgcccgtgtaagtccagagagcgtaaattgatggccccaaccccatttcaatcgcatatttcaaccagctggcgctgttcgctgtgataagcacccagagtctgcagctcctccaggctgctccgttcccaggcatcgagaatgcgtcagtatccgtatctgttagtcccgtattttctcttcacttcacctggttttttcccctttgttattttgctccggttttcagtgccttcaccagtgacgatttattggccgaggaatcgtcgcccgttgttagccaggtccacgtccagcacaatcggcatcgtcgccatcacgaggatggcaattaccatgggcacagacaccataagcggcactgggatcaccattttccgggtccagactgccatcaccctgccagattcgggtttggatttgagcatggaggaccacctccccaaggccaccaccacagattcgagccacatgacttccaaccgtttccaaatgcctttggaccaccggaatatgaggagcaccggcggccatttgaagcgccactggagccttttgaaggtaagtgttatttttgtacaaaaattttatatttttgtatctagtttgttttggtaaatatttaaattagatcgggtcagagtattaaagttggtatattgcaaagtgttgaaagaaattattacaccatcacttgtttatttttcaagttggtctacagctttcttttcctatctctctgataacaatgtttgtcaagtttttagggtaaatataatagagtaaataaaaatagagcgcgaagtgtttgttttaattttaatgacaatgttaacatactttattttgtgtatctgaatcatttactcatctagagtatccaattatgtattacacatattatacttacaaatccattaaaacttcacatcttatcaaaacacttattccttttagaaaataaagggggaatcaaggagcttacaaagcaagcgagctcaagcagcttagctccaccacccgcagctccagtaacgccttcctcacgcaccagcaccaccaccacgacaaccaccagcaccaccagatcgactaccttggcacccacctcttccagcaccgaagaggcacccttggccatcgacatacgcatcggctgacgaacctagacctaaggctccattctatcttatgcattaaagtgacattaaagttgctagccaaaccacaagttatctatccattaccattataatcggccaggcgaagcctggatgcgcacagcgtaaccatatccaggccacttacagggatcttcttttagggctgtctgcgctaaaatatatggtaattctagagcataaacaacggcagggggtgacagtaacacaaaatgcgaatgcaaaacaaacggaaagaaagtggcaagacaacctaccagctaaactgatctggaattgagcacactcagtcagcagaaacaaaacaaaagccccactttgccccactcctacccgcgaccattcccgcaaagttgcgattcttcggagaatcgcacctctcacgcactctacgcaggaacaaaggcgcaatccaagaaccggactgcaaaaaaaaaagagtgtttcgagaccgactcccactataaaagtcgagccgatcgagagcttcactgtcatttgacgccaaacgcgcgtcgcacgcagaagtctcgagattcccccgatttcacaatatagtatatatatagttatatattcaattcttcgccggatcgtcgtttcgtggaggagcatttagaaatgggtaagccgcactgtgcatacaaagtgcaaatcggtgaatgaacttgaggcgtgcagcgttatggacacataaccttagccggtccaaaagtataagacctaacacactggaacgataagagactcgaactacattcaattaaaaatgcgcgtcacgtcgatctcaaaaacaagtcttaacgggcaacgggagaggctttaacgattcttttatttgaaaacaaaaacgaacataacaagctgttgtattcctgaaaagtccaaggatgatgtgcttaaaataaacaatatacaatacttacttggttcataaactctcaaggagtgcacttccattaaattcatatctttataa

SEQ ID NO: 42011 - DNA, 717 bp, DROSOPHILA
agcgaggttcaagcgaaacgttccacgaaagatatatacggctaaagtggtgcagttgtccaaggaatccagaatagcagtatgttagcctcagttgccgcccgtctggcgctgttcgctgtgataagcacccagagtctgcagctcctccaggctgctccgttcccaggcatcgagaatgctgccttcaccagtgacgatttattggccgaggaatcgtcgcccgttgttagccaggtccacgtccagcacaatcggcatcgtcgccatcacgaggatggcaattaccatgggcacagacaccataagcggcactgggatcaccattttccgggtccagactgccatcaccctgccagattcgggtttggatttgagcatggaggaccacctccccaaggccaccaccacagattcgagccacatgacttccaaccgtttccaaatgcctttggaccaccggaatatgaggagcaccggcggccatttgaagcgccactggagccttttgaagaaaataaagggggaatcaaggagcttacaaagcaagcgagctcaagcagcttagctccaccacccgcagctccagtaacgccttcctcacgcaccagcaccaccaccacgacaaccaccagcaccaccagatcgactaccttggcacccacctcttccagcaccgaagaggcacccttggccatcgacatacgcatcggctga

SEQ ID NO: 42012 - protein, 211 aa, DROSOPHILA
MLASVAARLALFAVISTQSLQLLQAAPFPGIENAAFTSDDLLAEESSPVVSQVHVQHNRHRRHHEDGNYHGHRHHKRHWDHHFPGPDCHHPARFGFGFEHGGPPPQGHHHRFEPHDFQPFPNAFGPPEYEEHRRPFEAPLEPFEENKGGIKELTKQASSSSLAPPPAAPVTPSSRTSTTTTTTTSTTRSTTLAPTSSSTEEAPLAIDIRIG

SEQ ID NO: 42013 - DNA, 7264 bp, DROSOPHILA
tgcgggaggagaccgcctcgaatttgtcacacaaatcaaacgaactggatcgcgagaccatccgtcagtgggatgccatgtcgagtggcctaatgaagagcaaccacagcggagttgaggctacaggagctagctctgcccacctgcccctaaccagcagtgtgcgctccatagttcagcagttgaacaatagttccatggatgatgccaatggcaatcccatggcgacgggcaaaaagtcaagagcgaacaacaataattagtgaggctagcaccgcggaaaatgcaacctcctcgtttccgttccgaaaaatatatgtgtgcaatcatttccgtagtttcaattttagctttgcattttgcaattttgcaacttttgattttgcactctccaaaatattttatgtcactctgtttgcccgtcataattttcgattaggtagtgctctatttgttttgttgactgtcactgttgctgttgttgttgctgttattgtcattattgttgtgttatgttgttttgtttaattaatcaactggtaagcaaacttatacttatttatccaacccacttatttcattaagtcattgaagcgcttgtaaatatattcgccactcactcacattctcacccatgcactcacatctgtaaagttgaacaaatccatagatagataacttatttgggaagttacaaatagccatacaagagccagcagctgcagatacagataaaatatatgctaaacatccgtagatatttccataacccacccacccaggaaaaattatacaaatattagtgcaacacagagccaacaccaattacaaatccaaattaaatattccgtacaactgctgggcattcgctaaccgattactgattgcttttctaaatatttcgcgcacgcattgaaactattttaagcccaatcccctcaattcactcgaccatttgaaattacctcagtttcctaatcaaatctctgtgaccttatagcctcgatttccgtgcgcaatgtgaacaatctgccggtgggaaatctgacggtgaagccggatccctcggatgtccatcaggagtccgcttttgcaccctactatggtggagcggcggaaactaagtacgccaagaatacggtgctcacggatcgcggtctgtatgccgcaaacggatctggattggccacatccacgccccaaaatcatcagcagttccggatgcggcacaccggaagtagggcggaaatcgatatgctggaacgcgagacaagcagtcagatcagggtgagttcatgtcgggttaaaacttaagcgcatttcagaatctttccaaaatttgacatacctcactcaattctgtgagtaagcagtcttaaacctattgtccgtccatacaattaaaatgttacgagagcatgaaaaatgaaactcaatgaaatgcttctcaccgaatttgctactttgggggcaggaacgaacgaaagcttaacatatgtttacacaacccacagaacttggatgtctcggccggggatttgctgagtcgcacccacgaggagctggtccttttgctgattcagttgaggagacagagtagccagactgccagggccatcgagcagtgctgcagcgatatccatgatgtgcaggtggataaacaagtgcattttatgtttatcttcgggaggttttggctaacttctggtgctggttctgtgactaaatctattttaagcccatctcactgtttaaaatattattttaagtagccccactaacaatgcatatatgtaatccttcacagaatcgcctgcgaagtgccgagggtttgaccagagccgagagtatccagcgtttggactacttgaagcagcaccttttggacctggagcggcactacgagaagagcaagccgctggtcaatttggtggacaacatggtcaagttgggctcactgtatcgcaacgatgcaaacggcagggtccaaccagccacactggatcgcctggagttcaatcagcggatgcaggagcagcaaatgctgcaagaggagcagcagcagtgggagcgtctcagtcccaatcaggcagagttgcaggtatggatatttatttattaagcacacctataacaaaagtagagtataaataaataaatatatttgaaatatttaggccaaggtgcgtgagctctaccaactggatcagctgctgcaggaggagtcgggcactttgcagagtttgcagcgggacaaggaagatctcgagcgagccttgggaggattgagggctcgcatccacgacagcaatgccacgcccatggccctggaggcggccaagaagcagcagcacatcctggagcgtgagctgtcgcgggttcatcagcttctggccgagaactctaaggtatccaaggtgcctagtagaagttttttgcattttgtgtccaccactgcgtgttatttgtctgcttgagcttcgcatgtcgcttatgtaactaaccaaaaactaattttaccaggattaaattataaacaggagttcatgaaaatacatatatatagagaataggtagagagggaaaattttaattaaattccaaagttgaaagagtacatttttgctagccaaacaatgttgttgcacttaaaatcgatatcaaaattatttgctttttagtccacctaccttttgctgagcctatgatagaaatttataaaaaaattattataatcaacaagtttttcattccgaattttacatgtgcttagttagataaataaaaatgcattacatttgaaataaaaatgttttgtcaataaggaattgatgtgcagaataaatatatatatcagaatacgtttgttactatggctatcacaagctatcacaatttaaatgaattgaaatcgaggtataaagttttttatataacaaggatagtcttttattcaactagtgattagaaaagctcaaatgataggattaatgcaaaagacttctcgtgtttgtggctctgctgcatgtgccattctcgtaacccgagagccaaccaattaatccgtaatgctaccttgcagaaactggagcagacagtggcgggaaatgctcgcctggagcaggagttactccttctccgtcagaaggtacaagccgttcgaggatccaccaccaatggaatgaacggtgatggctctcacatcaatggtgaccaaactgccgccgttttggcctcggaattggagcgagtgcagtccctggtgggcgatatgcaaagacaacgccacgaactcagctccgcagttcgccagctgacggagaactcgaccaggttgtaccaggagattggtaacaaggagatgaacggcggtggctccaccaatggcagtctgaagaagcgaagcaactcaactagttggacggaaaccgatttggatgctaatatgctgcgatgcggatcccgccagcagttgaatgattccactttgaacctatccactcccctctatgtggacaccaatagttcgaccaaactgagtgactacaatcgatacaatggcagtagcgatgccatcgagatgagtggagtggacagtgatggtttcctggacagcaatccattcgcgctgggcttggagaagcaggagattaagacagtgaggattgtcaagcgagagtctgaacgtcggaatcgcgatcgcagtgaaaggggtctaagcaactccattcagaatctggatcaggtcctggaggaggagcaatatgcccaacagcagagggaacagcagctgtacgctcaaaacttggaagaaccgatgaccaacgggcaccacagtcgatccaagtcattgccccgaaactacagtgagcccccgaaacaacgacacagtcgtcatctgaatggtggcaagcagaatggtcaccactataatggtggctacgattacgatcggaacagcaactacgagcatcagccgccaccaccaccggcaccacagagcaatggtcatcaccacaatcatcagcaaagggagcagcgggagcaccttaatccactggccaatgcctatttcgccaagcagctccagcagcaggcgaatccctcgagggacagtgcccgcgtggccttgcggaccaagaccgattccctgcagagcctcaacaaaagccttacggacatcagtccggagccagtgttccagagcgttgctgcccgccagatcatcaacgaaatgtccgccggttcggcatcggaggacaccgagaaggtggtggagaaggtgccaccgcaccacaagcatcgcagagcggttccaagggagaagaggcgacactacactgcgccaaacaatgtcaatcagaaagccatggaaaaggtgcaggccgaaaacgatatgaatcgaaatgtaagcgaatgataaggaaattaatgtcgtcattttaactaataatttttccgttttcagaacaccaactggagagctcgcgatgatttggatatggaggtggccctgcgaccgcgaatgaatgctcctgatgtcgttcgttctgctttgggacagggcgaaaagatatccgagaacaccatagacaatttgctgctggcaccgaacaaaatagtcatacccgagcgttacatacctgaaacagtgagaaattaataatcgtttttttttattcaatttattaatctatttaaatttaaatagacgcccgagctgtcgccggaggaaaagaagcgtcgtcaggagaaggtcgagtccatcaagaaaatgctggctgaggcgcccattagcagcaatgtaagcctcccagactcagtccatatatccatatatattcatttaaaataattcaattccttcaggaaaacgaaagcctgcccccgagcaaaatcaacgccgagaagaagcagcgcgagcacctgctgcaactcaaccaaatcctggcccaacaggtgatgcaagtcagcaagatcgtggccggtaagtagagtcaacctggaatacattaggtctcctaccagatgataatccttgtgttaagttccaatcgatacccgaaaataaagaaccaatgcaatgccgtgcaagttgagtttatgttccatgtttatgttcttactaatatgctctctcgaaatcgaacatatagacccttgtgttatttatctatacgtatatatatacctaagcgtttattcagtgtaatctaaccatgccagaaaacccatccatttcaaactgtcaactctatgctcttctaatctctatatatgtatcttctttcaactctttctgatttctagatgattaatgataaaacatatcatatgcataccatctaatctaaagcgttaagcccccgttcgcataagaactcaatgatcatgcccccccacctcattgcgtgcgtaatcaccggcgtcgtccaaagttcataaccccttctcacaatgacacacctccaaacacacaatctagacactctcaacagtcaatcatacatctcaaaacctgtggcccacattgccctctcatgcattcgcatctgcacccgaccagattatgtataattaattataaattaagtaaccatcgatgagagttctatgaacttccgcaagattgcatatttcacatattgcgcatacgcaatgttagcagacccagaaagcatatcaagctgagaattctcaggagtttctaatttgttttaaataaatatttcaataatcatattgtgaataattcgtattagaccatatttatttaagagatgattttgtatgttattgaggttgaaaggccctaggaaggtatatatttattataaaactaacactcaatttacgttaatcttataattgtataatttttgcattcgtttaattctacatgtttatttgtttgttttgcatatttttctaggaaatcccactagtcacaactaatttgcaagtagcttgtcgagttgtttctgttcaccttttgtgttttacatacctatgcattgcatttaacttttgttcacgttgtgtgtttttttttgccaatctgagagggttcgcataacgatacgcggtaaatgagtttgctgttcgaaacataccaaacatatatatgcataactagtacgatacacctaactatacagtaactacagcaaacaagaacacacgcgaagttgagatttacagcatgctaaactcacataaaaaactcacccaaatcaaacgcaacagctcacaacaagaatactaaaaaaaaaaacagaaaaaaagagaaaaaacgacaacaagaataaactgcaacgcaatagcaacaagaacaagtacaacaacaacaacaagcacaagaacaacaagaacaacaacagatatacgattacgtaagtccaggtttgtacacatcttgtttataccataaccataaataaactgtaatcgattagcttccaggcattatgtaatcacgaccaaaactctgcttagcctagatatcaaatatattggccgaaataattaacctgcacgccataaatataattgtatactatataagctgtaaatgataacgcactcttacactaatccactaaaccacaaacatgcaaacttaccaaacaccaaaaaattcacaaaaaatagtaaatcaccaaactgagcacagattttaattatttcaacaaagagcaactatattggaaattaaagaatacccagttattcaataatagaaataatatcaaatccaaatttcaataattaataagagaaaaaagtcatataaagccaggacagtaatatcggaggattaaacttttattaaattaccaaaaagaatgctgaactatattaaataaattttaagtaataattgtcgcaaaaattggaatttaacaagtacgcagtgattttaaaggttttaaaaattgtgtcttgaattgtttgcaaaagttttaaaattaattcgaaatgcaaatggctgagtttccaaactaaatttctgcactgcctaacatgcgtataaaagttgccaataagagtcaagaagcgctaaatcgagtaagtataagctcaaagcaccaagaaaacagctaagacaggagtagcagacaacacacactaccaaacaacaaagttccgaaaaaaggacacaaatccgacaaacacacacgatatatatacttccaaatggttatcggtgtactcttttttatactcaaacttttacagcacgcttgggaaggtttttgaacta

SEQ ID NO: 42014 - DNA, 3002 bp, DROSOPHILA
cctcgatttccgtgcgcaatgtgaacaatctgccggtgggaaatctgacggtgaagccggatccctcggatgtccatcaggagtccgcttttgcaccctactatggtggagcggcggaaactaagtacgccaagaatacggtgctcacggatcgcggtctgtatgccgcaaacggatctggattggccacatccacgccccaaaatcatcagcagttccggatgcggcacaccggaagtagggcggaaatcgatatgctggaacgcgagacaagcagtcagatcaggaacttggatgtctcggccggggatttgctgagtcgcacccacgaggagctggtccttttgctgattcagttgaggagacagagtagccagactgccagggccatcgagcagtgctgcagcgatatccatgatgtgcagaatcgcctgcgaagtgccgagggtttgaccagagccgagagtatccagcgtttggactacttgaagcagcaccttttggacctggagcggcactacgagaagagcaagccgctggtcaatttggtggacaacatggtcaagttgggctcactgtatcgcaacgatgcaaacggcagggtccaaccagccacactggatcgcctggagttcaatcagcggatgcaggagcagcaaatgctgcaagaggagcagcagcagtgggagcgtctcagtcccaatcaggcagagttgcaggccaaggtgcgtgagctctaccaactggatcagctgctgcaggaggagtcgggcactttgcagagtttgcagcgggacaaggaagatctcgagcgagccttgggaggattgagggctcgcatccacgacagcaatgccacgcccatggccctggaggcggccaagaagcagcagcacatcctggagcgtgagctgtcgcgggttcatcagcttctggccgagaactctaagaaactggagcagacagtggcgggaaatgctcgcctggagcaggagttactccttctccgtcagaaggtacaagccgttcgaggatccaccaccaatggaatgaacggtgatggctctcacatcaatggtgaccaaactgccgccgttttggcctcggaattggagcgagtgcagtccctggtgggcgatatgcaaagacaacgccacgaactcagctccgcagttcgccagctgacggagaactcgaccaggttgtaccaggagattggtaacaaggagatgaacggcggtggctccaccaatggcagtctgaagaagcgaagcaactcaactagttggacggaaaccgatttggatgctaatatgctgcgatgcggatcccgccagcagttgaatgattccactttgaacctatccactcccctctatgtggacaccaatagttcgaccaaactgagtgactacaatcgatacaatggcagtagcgatgccatcgagatgagtggagtggacagtgatggtttcctggacagcaatccattcgcgctgggcttggagaagcaggagattaagacagtgaggattgtcaagcgagagtctgaacgtcggaatcgcgatcgcagtgaaaggggtctaagcaactccattcagaatctggatcaggtcctggaggaggagcaatatgcccaacagcagagggaacagcagctgtacgctcaaaacttggaagaaccgatgaccaacgggcaccacagtcgatccaagtcattgccccgaaactacagtgagcccccgaaacaacgacacagtcgtcatctgaatggtggcaagcagaatggtcaccactataatggtggctacgattacgatcggaacagcaactacgagcatcagccgccaccaccaccggcaccacagagcaatggtcatcaccacaatcatcagcaaagggagcagcgggagcaccttaatccactggccaatgcctatttcgccaagcagctccagcagcaggcgaatccctcgagggacagtgcccgcgtggccttgcggaccaagaccgattccctgcagagcctcaacaaaagccttacggacatcagtccggagccagtgttccagagcgttgctgcccgccagatcatcaacgaaatgtccgccggttcggcatcggaggacaccgagaaggtggtggagaaggtgccaccgcaccacaagcatcgcagagcggttccaagggagaagaggcgacactacactgcgccaaacaatgtcaatcagaaagccatggaaaaggtgcaggccgaaaacgatatgaatcgaaataacaccaactggagagctcgcgatgatttggatatggaggtggccctgcgaccgcgaatgaatgctcctgatgtcgttcgttctgctttgggacagggcgaaaagatatccgagaacaccatagacaatttgctgctggcaccgaacaaaatagtcatacccgagcgttacatacctgaaacaacgcccgagctgtcgccggaggaaaagaagcgtcgtcaggagaaggtcgagtccatcaagaaaatgctggctgaggcgcccattagcagcaatgaaaacgaaagcctgcccccgagcaaaatcaacgccgagaagaagcagcgcgagcacctgctgcaactcaaccaaatcctggcccaacaggtgatgcaagtcagcaagatcgtggccggaaatcccactagtcacaactaatttgcaagtagcttgtcgagttgtttctgttcaccttttgtgttttacatacctatgcattgcatttaacttttgttcacgttgtgtgtttttttttgccaatctgagagggttcgcataacgatacgcggtaaatgagtttgctgttcgaaacataccaaacatatatatgcataactagtacgatacacctaactatacagtaactacagcaaacaagaacacacgcgaagttgagatttacagcatgctaaactcacataaaaaactcacccaaatcaaacgcaacagctcacaacaagaatacta

SEQ ID NO: 42015 - protein, 823 aa, DROSOPHILA
MRHTGSRAEIDMLERETSSQIRNLDVSAGDLLSRTHEELVLLLIQLRRQSSQTARAIEQCCSDIHDVQNRLRSAEGLTRAESIQRLDYLKQHLLDLERHYEKSKPLVNLVDNMVKLGSLYRNDANGRVQPATLDRLEFNQRMQEQQMLQEEQQQWERLSPNQAELQAKVRELYQLDQLLQEESGTLQSLQRDKEDLERALGGLRARIHDSNATPMALEAAKKQQHILERELSRVHQLLAENSKKLEQTVAGNARLEQELLLLRQKVQAVRGSTTNGMNGDGSHINGDQTAAVLASELERVQSLVGDMQRQRHELSSAVRQLTENSTRLYQEIGNKEMNGGGSTNGSLKKRSNSTSWTETDLDANMLRCGSRQQLNDSTLNLSTPLYVDTNSSTKLSDYNRYNGSSDAIEMSGVDSDGFLDSNPFALGLEKQEIKTVRIVKRESERRNRDRSERGLSNSIQNLDQVLEEEQYAQQQREQQLYAQNLEEPMTNGHHSRSKSLPRNYSEPPKQRHSRHLNGGKQNGHHYNGGYDYDRNSNYEHQPPPPPAPQSNGHHHNHQQREQREHLNPLANAYFAKQLQQQANPSRDSARVALRTKTDSLQSLNKSLTDISPEPVFQSVAARQIINEMSAGSASEDTEKVVEKVPPHHKHRRAVPREKRRHYTAPNNVNQKAMEKVQAENDMNRNNTNWRARDDLDMEVALRPRMNAPDVVRSALGQGEKISENTIDNLLLAPNKIVIPERYIPETTPELSPEEKKRRQEKVESIKKMLAEAPISSNENESLPPSKINAEKKQREHLLQLNQILAQQVMQVSKIVAGNPTSHN

SEQ ID NO: 42016 - DNA, 4819 bp, DROSOPHILA
ccctactaaccacagtgcgctcccgcaagcgccgtgataagaaccggcagatcatcgtcgaaggccgtcgtctcatccaggaagccctgcaatgtggtctcaaaatggaagtactcctcttctcccagaaagatcagttggctctggtcaaggaggaagtaggcgtggcacaggtggagacgggtaccaagatttacaaagtgccgcagcacgacctaaagacgtggtcatcgctggtaactcctcccggtctgatggctatcttcgacaggccgtcggacaaaggcttggagaaaaacctggcggagcaacagcgtctgggctctcagccctttcccattacagttgtgtgcgacaacatcagggagcccaacaatctgggcagcattataaggacctgcgccgcgctgccctgcagtcaggtggtggtcacccacggctgctgtgatccctgggaatcgaaggccctgagaggaggctgtggcggtcagtttagagttccaattcgggatgatgtaacttgggatgagctcgcgctaaccattccgccagaggcggccgacgactgtcatgttttcattgccgagaccaaccaaaggaagcgggagaacaaccagaccattgactatgcagatatcaagggtcttggagcccataacttgctcattattggcggagagagtcacggagtcagtgaggaagcttaccggtaaggggggaaacgaataagttataaaatggaatgctaattatgtttttatattgtcagtttcttaaacttggttggaggtaagggaaagtgcatctacatcccgctggcagctggcatcgatagcttgaatgtggcatctgctctgacgctgttgctttttgaactgcgccgaaaactcattcatcaggcatcagaaaaagaataagtttggaatagcaaccgatataattaaatgtattttctttaattgttaatttctatgacaaagtgtataaatcgcagttaaatcccatcaataaacttgagtatatttgttatgatcctttcgaaaatacaattttcatcttgtgtcaggcataatataaatttattgctaggctgtttcacaaatatagtaattaataattacatttaattcaactattagcttcgatttccttgtaaacctcgcgcttatactcgtccagaccaccttcgatcgctctgactgtgcgattgccacacacccagagttccttgcagacgaccttaatgaggcgttcgtcgtgggaaaccaggattacgccgccctaagaaagacagtacacatgtatttcatggtgtaaatttccactaaagtccactttaccttaaaggcatttatggctcggcccaaagcatcaatggtttcaatgtccaagtgattagtcggctcatcgagcaccaggaaatttggctccgctataaaataaatatattatgttgatgttaatgttattgaaagaagatggatagtcactatcttacccatgcacatctttgctaaggccactcgtgatttttgtcctccagataaactggcaatgctctgcagtgccagtggtccggatatgccgaagctgcccaactgccggcgatactcttcgtccgggcgaccaggaaacagttctgccaaaactcccacacacgttacattcatattcagatggtccacatggtgctgcgcaaaatatccaattcgaagaccgcgatgcaggacaatgtttccgtgaatagtgctcagttgaccgacaataatcttcagcagcgtcgactttcccgctccgttttctccgacaatgcaaattcgagagtccgatgtggctgagagattgacgcccttgaagatgggcagtggatcttctggattgtaacggaaagtaacctccgaaatggccagcacgggaggattaaggggttccacttcggggaatttgagcgtgaccacagtctccttttccactggctttagttccggcctgcaaagcgaacgtagatgttttaaatttcttccagtcattattttaatttatatttttgtacttacagcttttcgagcattttaattttggattgcacagacgaggcacggtttgcgttgtatcggaagcgatcgatgaagtcctggacatgagctctgtgagccatttgggcctcgtattcacgtctttgggacttcagcttctccgtcttggtcttctcgaactgttcatagtttcccctggggaaaaaacaatttatatttaaattaggctacattttgtaatttgtaatagttacttgtatgcctccagttcctgggaatgtaggtgaataatgtctgtcggcaccgtgtccaggaagttgcgatcgtgagaaactaccagaatggtggtggcccatgtctgcagatagttttccagccaaataatggctttgatgtctaacatgttcgtcggctcatcgagcagtaacagatcgggttttgagaacagtgccctggccaaagcaagacgcatgcgccagccgcctgagaaggatttagttggacgcagctgcatatctgcatcgaatcccaagcccttaagtatcacagatgcgcgggccacagccttgtccgcctcgatgttctgcagagaggcgtaggtctcgctcagctcattggacagcgtcgcatcctgaactccattgttaagggcagccagaatctccttctcgcgggtcagaagtctcgttcgctcagtatcacattccagcacactctccactgctggtgtgtcatcgccaaccacctcctgctccacgtgcagcaccgatatgtgcgaagggatctgtagctgtcgctcggcaatcatgcggagcagtgtagtcttgcccaggccattgcgtcccaccagaccatagcggcgtccgtaagacagcagcagattcgcattctgcagaagaactctaaatggaattaacaataattttcggttgctcaatttcgacagttaggttgcctcacttttcgccaaaagccaggtcaaagttttcgatcttgatgtccatggatcggttaagacctttctgatccagcttggtgttcttcttgttggtcacctgtgaggctgtggccgtttgtagcttcaccgcaacaggaatcataccatgtttgttcacctcctgccgtttctcctgcttctgctgcagcttggcctccgcctttcctagtttcttggagtccactttctgttaaaataagaatagtttagttgttatttaatgaaagtcgtattgatggcgccgttcattcagtttattggagtggttcgtcaaggggaacacttacattggcgccatctttgttggccacccagatgctttgcatatccttgtccagccgctccatgttcttggccatctcctcgatgttgaccggcgcgttgagaacctttcgctccacgttgacctcgttgttcttcatgatgttgaggaactgctcgcaaagcgtacgtacactctcctccgacctatcacagtcgacgctctgcaggatgtcgcccaccgcttcgaagatgtcatcgccgctttcgaagtcctcctcgcctggcaattggaatttgtgtgcggggtaaagaataaaagatcacaggctagtgcaaggcacttacttccggtgagcacgccaacgacataggtgagcagctcgtggtcgattttgggaaactcgcgctgcagaatgcttgtgtactcgctcatcttgaccttgatcgcaaattcgctttctggacgtgtggcagtcggcttttaattgacttttccgacttttattccaccgcaaacgaaaactaaaggggatagcagagtgaccgttgctgggtcgactaagcatatttcagagatggtcacactgctttacttctaatatttttccctactatatatttttaaatatcagatttattttttccagcagttttagcaccatcaaaatttcacctgattaacaaagaatttccagtttagtttagtttgttgttcattttttcaatcacttcattgtacagtgtgaacgtctctcagggtgaccaaagaaatcccagctgttttcacagttatcgaccgtgtgacagctctgttatgttagcaaccactgttaatcgaattgcataaaattccaattctcttttgcaagattacttgtgaaacgattaaaaaaggcaatatgctaagcaaaacggggttaattggcgccttggtgcgtagatccttcggcaccagtcagatgttgcgagagacgatcaagaaccacgagccaaacaatctggagcgccgtatgttggtttggaccggcaaatacaagtcgcagtccgagattcccaatttcgttaggtaagtgccgattcttagagagcaaatgcaacaggtgtctaagttttggtgtcaaaacttgcagtcaggatgtcatggagcgctgccgcaacaaaatgcgcatccgcctggccaacataatgatcgcactcaccgccgtgggatgcgccattatggtgtacagtggcaagcaggccgccaagaaaggagaatccgtcacaaagatgaatctcgagtggcacaaacagtttaatgactctcagcagagcgaaggatctgctccggccgccaaatagaaaatcactccgaaatccctcactcgcctagtaatattagaactggccaggcttccattttcacttccaaagaagattggctaaaactggccttaaaagattttgctaataatcagttggtctgaagattgttgaaaatttttctttttaaatttagatttttatttttgatttgaatgtg

SEQ ID NO: 42017 - DNA, 2344 bp, DROSOPHILA
ttttcgtttgcggtggaataaaagtcggaaaagtcaattaaaagccgactgccacacgtccagaaagcgaatttgcgatcaaggtcaagatgagcgagtacacaagcattctgcagcgcgagtttcccaaaatcgaccacgagctgctcacctatgtcgttggcgtgctcaccggaagcgaggaggacttcgaaagcggcgatgacatcttcgaagcggtgggcgacatcctgcagagcgtcgactgtgataggtcggaggagagtgtacgtacgctttgcgagcagttcctcaacatcatgaagaacaacgaggtcaacgtggagcgaaaggttctcaacgcgccggtcaacatcgaggagatggccaagaacatggagcggctggacaaggatatgcaaagcatctgggtggccaacaaagatggcgccaataaagtggactccaagaaactaggaaaggcggaggccaagctgcagcagaagcaggagaaacggcaggaggtgaacaaacatggtatgattcctgttgcggtgaagctacaaacggccacagcctcacaggtgaccaacaagaagaacaccaagctggatcagaaaggtcttaaccgatccatggacatcaagatcgaaaactttgacctggcttttggcgaaaaagttcttctgcagaatgcgaatctgctgctgtcttacggacgccgctatggtctggtgggacgcaatggcctgggcaagactacactgctccgcatgattgccgagcgacagctacagatcccttcgcacatatcggtgctgcacgtggagcaggaggtggttggcgatgacacaccagcagtggagagtgtgctggaatgtgatactgagcgaacgagacttctgacccgcgagaaggagattctggctgcccttaacaatggagttcaggatgcgacgctgtccaatgagctgagcgagacctacgcctctctgcagaacatcgaggcggacaaggctgtggcccgcgcatctgtgatacttaagggcttgggattcgatgcagatatgcagctgcgtccaactaaatccttctcaggcggctggcgcatgcgtcttgctttggccagggcactgttctcaaaacccgatctgttactgctcgatgagccgacgaacatgttagacatcaaagccattatttggctggaaaactatctgcagacatgggccaccaccattctggtagtttctcacgatcgcaacttcctggacacggtgccgacagacattattcacctacattcccaggaactggaggcatacaagggaaactatgaacagttcgagaagaccaagacggagaagctgaagtcccaaagacgtgaatacgaggcccaaatggctcacagagctcatgtccaggacttcatcgatcgcttccgatacaacgcaaaccgtgcctcgtctgtgcaatccaaaattaaaatgctcgaaaagctgccggaactaaagccagtggaaaaggagactgtggtcacgctcaaattccccgaagtggaaccccttaatcctcccgtgctggccatttcggaggttactttccgttacaatccagaagatccactgcccatcttcaagggcgtcaatctctcagccacatcggactctcgaatttgcattgtcggagaaaacggagcgggaaagtcgacgctgctgaagattattgtcggtcaactgagcactattcacggaaacattgtcctgcatcgcggtcttcgaattggatattttgcgcagcaccatgtggaccatctgaatatgaatgtaacgtgtgtgggagttttggcagaactgtttcctggtcgcccggacgaagagtatcgccggcagttgggcagcttcggcatatccggaccactggcactgcagagcattgccagtttatctggaggacaaaaatcacgagtggccttagcaaagatgtgcatggcggagccaaatttcctggtgctcgatgagccgactaatcacttggacattgaaaccattgatgctttgggccgagccataaatgcctttaagggcggcgtaatcctggtttcccacgacgaacgcctcattaaggtcgtctgcaaggaactctgggtgtgtggcaatcgcacagtcagagcgatcgaaggtggtctggacgagtataagcgcgaggtttacaaggaaatcgaagctaatagttgaattaaatgtaattattaattactatatttgtgaaacagcctagcaataaatttatattatgcctgacacaagatgaaaattgtattttcgaaaggatcataacaaatatactcaagtttattgatggg

SEQ ID NO: 42018 - protein, 708 aa, DROSOPHILA
MSEYTSILQREFPKIDHELLTYVVGVLTGSEEDFESGDDIFEAVGDILQSVDCDRSEESVRTLCEQFLNIMKNNEVNVERKVLNAPVNIEEMAKNMERLDKDMQSIWVANKDGANKVDSKKLGKAEAKLQQKQEKRQEVNKHGMIPVAVKLQTATASQVTNKKNTKLDQKGLNRSMDIKIENFDLAFGEKVLLQNANLLLSYGRRYGLVGRNGLGKTTLLRMIAERQLQIPSHISVLHVEQEVVGDDTPAVESVLECDTERTRLLTREKEILAALNNGVQDATLSNELSETYASLQNIEADKAVARASVILKGLGFDADMQLRPTKSFSGGWRMRLALARALFSKPDLLLLDEPTNMLDIKAIIWLENYLQTWATTILVVSHDRNFLDTVPTDIIHLHSQELEAYKGNYEQFEKTKTEKLKSQRREYEAQMAHRAHVQDFIDRFRYNANRASSVQSKIKMLEKLPELKPVEKETVVTLKFPEVEPLNPPVLAISEVTFRYNPEDPLPIFKGVNLSATSDSRICIVGENGAGKSTLLKIIVGQLSTIHGNIVLHRGLRIGYFAQHHVDHLNMNVTCVGVLAELFPGRPDEEYRRQLGSFGISGPLALQSIASLSGGQKSRVALAKMCMAEPNFLVLDEPTNHLDIETIDALGRAINAFKGGVILVSHDERLIKVVCKELWVCGNRTVRAIEGGLDEYKREVYKEIEANS

SEQ ID NO: 42019 - DNA, 4334 bp, DROSOPHILA
ccaaagccgcacttctatgcttcccaaagtagcgctatatgtttgtccatataatgtgaaaacattgcgatcgtgggcatatttttgcatattgttgactaacccaatttgcactgtttacccgccgaaattatacttgacattgaacgtgaaatggggccattgatcatcgcagggaaatgcaatccatccatgggaactttaaagtatctgaaagatatgcatggtaatatggtaatattaataatatggtaatttatattaaatattatattaaatattaaacgctctcctagataatcgttttaagaatatgtttatagtacccaaaagtatttacctgtaattgaactgtaattctccgcaaaaataacaaaataagcttgatgactatacctttttttgtaaactaccttctgccaggtatttgataataagccagcgaaaaataaacattaccttacaattggcatttgtgtaagctgtgataattgactcatctgcgattatcgtacatttcaaaagcatccagaccattttacaaggcgggggatttgaagaactcgtaataccagcgtcgtgtgctgttgaaaaccaacaagcgcgtccgtcgttcacgtcagtgaaaatttgccaaaatagaaacaattcaaatagtttaaaatcggcgagcgatgggcgcgcacgccttcgacatttttaaatcacttaatatgcgcgacaggcatttaaatcacacagatatgcgtctataccaaaaaaaaaaaaaaaaataataataataaaaaaaaatagatagccaaacaatccggcttctagaatgaaattgcttccacaattcccagcacgggtgcgcttgtcaaccgttaagagaccccggctccacctctgcactaatttttttttatgagcgggctccgctgaatgattttgtcaaaattatagtagcattttgcttttcttcatcggtatccacagttctaatcgggcacttctggcgagcggtcgcgtaaagattgaatagtccccagttccccaatttccccagtcattcatcaaaatattgaatcaacgtgtgcggcggtggcaagtcaatatttggctttggtgaactcattagcaagggacaaaaggactcaccaataaatcggaaaggcagtgaaagtcctttggcacaatgagacgattgcttatgtttgtagtgctcctgaccgcacaactgcagatccaggcacaaactgcactaagtatgattagattgatcttaaaggattaatccttataaagaagtaatccttcatttgtgcgtgtttttttttggaattaattaaatactatgtgctttggaacttaaaatgccagtggcataaatgccagtagattactattattagattagataatttctatatttatgccattccattgcggatttccattttgatggatcttttttttttttgccgatacctgtagacaagaaatgacagcaaatttaaagtcggtcaatgactttggtgccaaacttagggctttgacctcttctgctttagcttggagcgaatgtccttcccaagtcctttaagctttgcacttcagatttttataaattttaagagtatagggtatcgcttaaatttcttaaagaactaccaaattttccttaggctatgagcaagcacgacaagctgttctcacggcggaggaggagctaatgactgggggacacactcacctgaacacggaggaggagaaggtggacgatatattcatggagtacaagctgggagagttggcccagggattccggaatgcggagcaaaatgcggccgctctgcactttttcaaggccaaaccgctgatcgatcggagtgcgatcttccggtttcttcagaagatgcccaagggctcggtgctgcatgtgcacaacaccgcctccgtgagctccaagtgggtggtggacgatctgtcgtacatgcccggactgctgcgctgcacgacggccacgggacaaagtatcctgtcattccgcaggactccgaaggagcacaagtgccagtcgcagtacgtgcttgtttcggatgagcggcgaaactcgttggatcgtcaggtctacgatcggaatttcgagcgtctgatcaacttgtacactccagttccagagcgtaagtgggtgatatcgtttttaacccgcaacgtcatgttagtcttatcttacagtggagtaccccaccattacccgggtttgggatcgattccagggcatgttcgacggtctcagcgatgcgttaatctacttgccagcctttcgagcttatcactggcagatgctggaggagctctacaatgacaatgtgatgtacacagagattcggaccagtttcaaaacagtaagaagcgatgtaatatcatattcgcaacattaattctatataactaattagctatatgatgccagtggacgcacttttcccagagagcgtactatccacgagctgtatgccttaaatcagaagttcatgaagctgcatcctgattttctgggcttcaaagtcattatggccgtctatcgcggctatgaactcgatcatcttaaggatatagtcgaggtgttcaagaagttgcagtaagttttggcgctttttcgtagagtatttgcattcacataacttttctagccaagcattgccacactttctggttggattcgatttggtgggtcaggaggacaagggaaagccactctactccctgctgccagtcctcagagatcttccgccaacagctcggcttttcctacacggcggagagaccagtgagtggtagttcttttcgatctgatcatcgacttgatgatctattccttacagattggtttggtgcctcaacggacattaatctgctggacgcccttttgatgaacacaacacgcattggtcatggttatgctctggctaagcatccgattctcctgaatgcagtcaagtcacgccggattgccgtggagcttagtcccatttcgaatcaggtgctgcatctggtttgggacctgcgcaaccatccgggctcccagttttttgccctcgatgtgcccgtggtgatatgcaacgatgatcctggcttctggaatgccaagggtctgagctacgatttctattatgccatcatgagtctggcgccaaacaatgcgggactgaggctactgaagacactggtgtggaattcggtgcgatactccacgctgacggaggaggaacagacgagagctttcaaaatccttgaactcagctggtcgcgattcatagacgacgtattggagggcagtgtattttaaatgaacttataagtgaaaataaacagccaaagagtttataaatcattagtgaagtaatgcggcgaattgtgctaagtttcaatttgctctttttaataagaaatagtcagctggacatgaacttattcagcaacgaaataggaaataaccctataccaaacaatgaatgatgacacttctattaacttcctaatgataactccttgtcatccgatttataatgttgcagaaatcgttcgcagctttccagaatctgcagatatgcagcattaaagcctcccatgccttgaatctgtgaaagaaagcacaactttagatactctctacataactatgattatttaaattacaaagtatggatcctcgatgatctcatcctccttgcgtccaatatagctacccagcaattgaatcttgcatgtcggactgggagtaagagaagcagccatatgctcaagctccaataggttgctattgtccatggcgaatatgtaatcgaagtcatagaagtcttgagcgcttatctgtaagagtgaaaaaaggatcagaaggttactttatggttatatgattgatattaccatacgacccaagtggtttgttttcaaaccatgctgttttaacaattgttgtccacgtgcctggggctccaggccaacgttccaactcctgaggccagcactgtccacataccagtcctgcagattccgtttcactaccaaatgcttcagtatggcctcggccattggtgaccggcatgtgttgcctgtaagtatcggtttaaattagagtttttgtcttttatttattcactcttaccaatgcacacgaacagaaccttcattttcgcaatgggaactgcaagttccgatgagcaacgctgctgattcattgagtatatataatttataaaccggttcacgtttagtatcaacatttattagattatctaaatcacaacacttttacaaatcattcatttctggaggcgctctttcat

SEQ ID NO: 42020 - DNA, 1698 bp, DROSOPHILA
agcggtcgcgtaaagattgaatagtccccagttccccaatttccccagtcattcatcaaaatattgaatcaacgtgtgcggcggtggcaagtcaatatttggctttggtgaactcattagcaagggacaaaaggactcaccaataaatcggaaaggcagtgaaagtcctttggcacaatgagacgattgcttatgtttgtagtgctcctgaccgcacaactgcagatccaggcacaaactgcactaagctatgagcaagcacgacaagctgttctcacggcggaggaggagctaatgactgggggacacactcacctgaacacggaggaggagaaggtggacgatatattcatggagtacaagctgggagagttggcccagggattccggaatgcggagcaaaatgcggccgctctgcactttttcaaggccaaaccgctgatcgatcggagtgcgatcttccggtttcttcagaagatgcccaagggctcggtgctgcatgtgcacaacaccgcctccgtgagctccaagtgggtggtggacgatctgtcgtacatgcccggactgctgcgctgcacgacggccacgggacaaagtatcctgtcattccgcaggactccgaaggagcacaagtgccagtcgcagtacgtgcttgtttcggatgagcggcgaaactcgttggatcgtcaggtctacgatcggaatttcgagcgtctgatcaacttgtacactccagttccagagctggagtaccccaccattacccgggtttgggatcgattccagggcatgttcgacggtctcagcgatgcgttaatctacttgccagcctttcgagcttatcactggcagatgctggaggagctctacaatgacaatgtgatgtacacagagattcggaccagtttcaaaacactatatgatgccagtggacgcacttttcccagagagcgtactatccacgagctgtatgccttaaatcagaagttcatgaagctgcatcctgattttctgggcttcaaagtcattatggccgtctatcgcggctatgaactcgatcatcttaaggatatagtcgaggtgttcaagaagttgcaccaagcattgccacactttctggttggattcgatttggtgggtcaggaggacaagggaaagccactctactccctgctgccagtcctcagagatcttccgccaacagctcggcttttcctacacggcggagagaccaattggtttggtgcctcaacggacattaatctgctggacgcccttttgatgaacacaacacgcattggtcatggttatgctctggctaagcatccgattctcctgaatgcagtcaagtcacgccggattgccgtggagcttagtcccatttcgaatcaggtgctgcatctggtttgggacctgcgcaaccatccgggctcccagttttttgccctcgatgtgcccgtggtgatatgcaacgatgatcctggcttctggaatgccaagggtctgagctacgatttctattatgccatcatgagtctggcgccaaacaatgcgggactgaggctactgaagacactggtgtggaattcggtgcgatactccacgctgacggaggaggaacagacgagagctttcaaaatccttgaactcagctggtcgcgattcatagacgacgtattggagggcagtgtattttaa

SEQ ID NO: 42021 - protein, 467 aa, DROSOPHILA
MTGGHTHLNTEEEKVDDIFMEYKLGELAQGFRNAEQNAAALHFFKAKPLIDRSAIFRFLQKMPKGSVLHVHNTASVSSKWVVDDLSYMPGLLRCTTATGQSILSFRRTPKEHKCQSQYVLVSDERRNSLDRQVYDRNFERLINLYTPVPELEYPTITRVWDRFQGMFDGLSDALIYLPAFRAYHWQMLEELYNDNVMYTEIRTSFKTLYDASGRTFPRERTIHELYALNQKFMKLHPDFLGFKVIMAVYRGYELDHLKDIVEVFKKLHQALPHFLVGFDLVGQEDKGKPLYSLLPVLRDLPPTARLFLHGGETNWFGASTDINLLDALLMNTTRIGHGYALAKHPILLNAVKSRRIAVELSPISNQVLHLVWDLRNHPGSQFFALDVPVVICNDDPGFWNAKGLSYDFYYAIMSLAPNNAGLRLLKTLVWNSVRYSTLTEEEQTRAFKILELSWSRFIDDVLEGSVF

SEQ ID NO: 42022 - DNA, 12025 bp, DROSOPHILA
agtaacaggtgattggattggattcgaaaggagagaggagagttagagacaggggaaagagaatgtagagcgtaagagcgaaccggcttttctaccatttgttattattactttcacaggatctgttaatatttcggaaccgaagagaaacccagtcccgatacatgtctattttaatctaaacctatcagattcttttgattcctgtgtaaccctcagtagcattacacttgttcccagaaaaatggaatctggtatcttaaaaagaaaactgaaagtaatttattctgaacccaatacccttctagattttggtgatcaaacataataaattgttagattagggactcgttctacgaaaatctgcttatcgatttaatcatagctaatgttggaatttatttttaatacaattgctcgataccttagctagaataattcaaaaacgttctgaattgtttatccttcatttttaaactgtaaaatttgagcttattcagagtggagtagtataagaaaatgttgaatattttgataccggatccgatagttatagaaccggaacctacggatcccgttgacctttttcttatcgcactctgatattccaaccggtcggacacatgtgtttttcatccgtgaagtcggcccagaatatttccatcattcaatatttaccaccttttatagttttgtttactatcttgccgacttttttgtcttgccgtcttgctctcctctccatcctaaaaatactcttcctgcgctccatctggcaatgccgctcgacaactgtacttcaaagagcgttgccaggcaggtcacttctctcatagatacacagatacaggcgcgcacgcacaccagcacgcaaaataaccaccaccagcagtacagaaattacacattttctccccgagtagagaactgaaaaactggccgcgctggcagcgccggagcagcgaaattcgatcgaaaccatttactcagtctcagttcgagttatccaacgttggcgagcggacaaacaagcaggagaaaaaagcgtacgggcaagagaaagagaaggcacaaaatcacccacagccactgaaattttcttttgcgctccggtgagaagataatttcacaaaccaaaaccgaaccaacaaacaaaaaaagtgcgctccgtgagcgggaaaacaataacaaaatcaagagacatgcgattataaaacgaacaaaataactgagtgacaaaaaaaaattaaatgcgtgtctcatggcttgactgtactgtgtattaaaaaatgtgattgtgtcggctgtccgtctgtctgagtttgtgcgcgtgtgtgtgctgttggcgtttttaaatgtggcgcgctatttttgtgtgatttttgtgggcagcaacgaattttgaaacatcaattgtatactagttgtcagtccccttgtgaaaaagtcttctccaacaacaaaattcctgtgagcagcctacacacatgcgttgtctcgctctcgcgcgctctggcccccaaagagtgcgagagcgggagagtgagaccgagaaagagagagagagagagagagctaataactaacgtctgtactctttttcttttccatttttcatttcagtttcgagaaagcagcgcgccaagcagcaagaagaggaagagcaaagggagttggaaaagcagtggcgtcgtggaggaggagtagaaaggggatttttgcgaaaaatcccaacttgaagagaattttccccgtaaccgttaaacattaaatcgtcgtgttggagacaaatagcagcgaatacgctagcaacgctggggaggaacaacaattgttggatttggacgcgaccgctttgatgtcgctgccaatgaattcgctgtattcgctcacctggggcgattacggcaccagcctcgtatcggcaatccaattgttgcgctgccatggcgacctcgtcgattgcacgttggccgccggcgggcggagttttcccgcccacaagatagtcctgtgcgccgcctccccctttctgctggacttgctaaaggtaagtgctcggttcggaaacactgcctaaaacacctttcaataagagagcttgtacataacctcaaacgtttcgtacagtttgtaaacagagaaatccaatcgcagaaataggttaatgtttggagcgcagagaaactgacactcgcacgcaaatgcatacatatgtataaataacgcagatttacgctccgctccaaaagttgtctagagatttttgtacaagttttccactgtcaattgagttgaatgagtggctccgccccccgcattcccgccgtctatcttgcttatcagctttttcttgttgcaaagttcaccggagaacgagagagtgagacgtagagacagagcgcagacagagagggagagagcgagagaaccagttggttcggtcgacagaaaagtggttttgggcccggtggtgtaacagagaggggagagccgaaagctggtgcgccaacttttaaatcgcatgtgttagagcgagcgcaaacgagagcgccaaaagcagcgcggcaactgttgtagttgttggatggttggagctttcgtcttgccttttggttcttgctgttgttgggtgcacacgagcgcgacctctttcttcacagacagaactgtacagttggctctggctagggggaacttgaaatattggggggaatatggatacatatacaaagataattaaaattaaatttgtattgattggtttgatttccttaacccatttcctaagctaagtcttttgtattttgtatgtcaccattttagattgctagattgattgtctaacagcaaacttcgctcaattaaaagttcctggactttaatagacttatctacttcaaatctttatttaaacttataacatagtgaccaagtccagattgtaccaaagataagcaagcctgtctggtgcgcttccctcgtatcgaatccaacccgtatttctataaactaaagcatttcatattaggaaggcgcacttttaaatggagcttgcaagttttttcatgagctgtattgcgatactgtactttttaacaactcatttgcactttaactttgacgcttttccgccactctgtcgattgttcaaagtgtgcgcttaagtatgaaagttggaccgtcttcaatgcgtggccctatcgtaatggaaatactgaccaaaacagagcgcggccagcgaaatgaaaacacctgatgcgacgccgacagcggctactctgcgcttcgctcccccttattctcagcgctcctcatctctcctctccttttctgggccgtgaaaaagtaaacagagcgaaatttttgaaaacgccgctcagagccgtcgtggggaaatgtcaaagaaaaaaaaaaaaaaacaaaaagaacgggaccaatgcggctgtgaactctgcaagagtccgaaaagtacaagatgtactgatctcgttacactcacacacgcacgcaaaaacacatggcggtcgctctttgttgctcttgctccctctcccttgctcctacggcaaatggaatgcaactctgaaaaatcgatgagcgagactttggttggaggcagagttcaaagagcgcaaatgggagtgcggtgagatgtgtcatttcaagagattggcattggatgaagggagggtgttggttggtgagtccgtaaatggagaggggttgttttctgagcaatgctatataattaaatgtttggagcgggagcgggagcgggagaggacacagaagaagaacagctaagcgctctttctttaagcgctgctctgttttctttttcagcatctgaaatctcaaaatcctgctgcagaatgtgcagagcgcgcaaaagtaaaagccggttgtcttttgtctgtgtcactgtgtgcgtgagcggaggagagtgtgagcgacgcgtcgcaccgcgagtttccattatttccatctccgtccgactgtttttgttattgtttttatttggattggcggacggacgaacgggcctctcaattcacgccaaaaatgtgagacgatttcaaaacaaacacaactctctacgatgaagttcgagccaagagaaatgttggatgaagagcctacgaactttgcaaagtgtcaagaagtttttcttatagaacatttttagatttcaattagaaaatttctataacttactagaaaccggttttggttatcgtacataccttaaacaatagagaaatatttatatatcatttaaaatcaatttatcttgccctattcttaataactccttttaatctcattagttttacttatataaatacaaacttatcagctctaaataaattagattatatatgtcttctcgatatttacagaatacaccatgcaagcatccagtggttatgttggctggcgtcaatgcgaacgatctggaggcgctgctggagtttgtgtaccgcggagaggtgagcgtggatcacgcccagctgccgtcgctactgcaggctgcccagtgcctgaacatccagggactggcaccgcagacggttaccaaggacgactacaccacgcactcgatacaactgcagcacatgattccacaacatcacgaccaagaccaactgattgccacgatcgccacggctccacagcaaacggttcatgcccaggtggtggaggacatccatcatcagggccagattctccaggcaacgacccagaccaacgcagcaggacaacagcagaccattgtgacaaccgacgcggctaaacatgaccaggcagtgattcaggcttttcttccggcacgcaaacgcaaaccacgcgtaaagaaaatgtcacgtaagttaaaaacttatttttgtaaacagttgattcagaaaatttgtccaataaactctgaacgtattgggtaagaattagaaacaaaaaataataacatgcatttctacttgtgcagctacggcaccgaaaataagcaaagttgaaggaatggatacgattatgggcacaccgacctcttcacacggctctggatccgtgcagcaggtgcttggcgaaaatggagccgagggccaactgctatcatccacaccgatcatcaagagcgaaggacaaaaggtagagactattgtgaccatggaccccaacaacatgataccggtaacgtcggctaatgcggcaactggcgagataacaccagcacaaggagccactggctcatctggcggcaatacaagcggcgtcctatccacgccaaaggcaaaacgcgctaaacatccgcccggaacagagagtgagttttaatttcggtgtattcacttgccggcttaaagttattactaattataagtatatatttgagaataatgcattttgttagagccagtgaatacccaatataccatcccacaacgtgttccaagaactaaagaacgctattttccgtttttagaaccacgttcacgatcacaatctgaacaacctgctacttgccccatttgctatgctgtcattcgtcaatcccggaacctgcggcgccatctcgagctgcggcattttgccaaacccggcgtgaagaaggagaagaaaagtaagtccggtaacgatacaaccctagactccagcatggagatgaacaccacggcagagggcgacaacacagtgggcagtgatggagcaggcggagcaggatcagcaggaggacaatcatctggtacgacgccaacgagagtgatatcgaatgcaccgcaggccgcgggggcgccggccatcctggcccaaggtgtgctgccccagcagcagcaacagcagcaactgcagcagcaacaccagcagcacttgacagcaacattagcgggtggtggacaggcatacatcaaacatgagggcggcggcgggggcggcactgggcagcagcagcaacagcaagcggcacaacagcagggcatgcagaacgtcatacacattgtgggcgatcaggtcttcataccgcagcagcaacagccgcagccgcagtagccacctccagccgagccttcaatcattccaacgcaccaacgacaccatcatccacatttccaaaaaaacattaaaaaaaaaaacataacactcacaaaaacgatttgtaaataacaatcagcaaacaaacaaattccccgtgatctgatcgaatgatttgtgttcatttcctgtatcatttttaatttttccataattaattgctgcgtaagtttatattttgcataacttttcaaaattgcgctttttaacatataacattttcttatgcagtattttcttgcatattgtagcacagagaaaaggacaaaaagagagaattccgtatgtctccacctaaatgaatactcgattaacttacttaaataatctaattagtagtgtcgcaaataattgttgtaaaaattaattgtacaattacaatcgaggatcgcaatcggtttaagtttctctattttagatattatattacaaattgtttaattaataaaatattatatatttttttatataacaaaaacaaaaccaaaattaatctctgcctgtggcacggactttaatttactgcaattggctgtttataattattgtttctcttagttgcaagaaaatactgttggtcgatttccaaacctactaacttcgtactgatctttgtaatgtttcgcaattcctctggagcaaatcttgcgcatttagaattgacaatctggctgataatcgtatttaaaagtcttgaattaacgttgaatattgttacgttgtttttgtatcttttttaattataactacacgtttgttttattttttaacagtttttcactagattttttttatttctattattagttttgttatttgttgttcatattgatttaaacctatattaatatttgttttgtcttgcgtttttaagttttttgtttgtaacacctttcatctacacaatcaacacatcttcatgtcctgtttccggctgtagtccttaaaggccgcgttgtttctcttttgggccagagatgttgctgtagtgtcgtcctctcgctctgtattactcctactatccaacagtctaccttggctaactccagcggcagtcttctcaccagcaactcattccttccttgcagcaaccagtggcaagaagtctagtagcggatccagcggttcaggcagtggggcactgagctccagtggcagtgtgccgcaggtccagacggttcaatccctgcacactttacagggtgtgcaagtcaagaaggatccggatgcccagcaacagcagcagcagcagcagcagcaacaacaacaacaacagcagcaagcaatgacagtgagcggtgcgacgggcggacaagtgcaacaacaggtgcagcaagtgcagcagcaggtccagcagcaacagcagcagcagcaacaacaacaacaacagctgcaacatcaccaaatcatagactcgtcgggcaacattacaacagcaacaacgagtgctcaagcggcagctgccgcacagcaacaggcggctggccagcagcagcaactggtggcacaatccgatggcagcgagagtggagctccgctttcaattgcccaggtgcagacgctgcagggccatcagatcataggcaatttaaatcaggtgaatataactgactttcaacaacaacaaccgcagcagcaacaacagcagcagcaacaacagcagcaacaacaacaacagcaacagcaaacacaacagacgctctgatcggaccgaagtcttagatccatcttgtactattctatacaattattaatttgggtttttgctaaacgctttaaatattctctttgcggaatgcgtagacaaattctaaattagttttagaaagccagaaaggcatatttagttgtttaccgttttgttgtacaatcttatgactttaaatgttgatttacccctcctacaacttattttgttgctagacaaacgcttaagtgctctatggttattggaaattacgtgcatattttacatactttataaatattatcattttgtatggttttacaaatgtcccaatgctagaggacctctagtcattttgaagtcctgcagatcagtaaacaccttaatccaacaaggatcccttgctcacgtccagattttggccatgaacgaatgcaccttgatttaaaaaatattaacaaatacattaagtttaaaaatccttgagttacaaagatttacttaagcagctcaaaagtaattgatctgatcaaaagagagttcgctcaacaaggtttctaaaaacccacccaccaacaatcacttaagtaatcaatcaaccaatcaataaatcaactcgatatctctgctttcgtttttgtttaagaactaggcgttctatgtttaaattgaaccaattttatatgtatattacttaattttaatagttgcaaatttttcctaaaatttagaccccgttgtactagttttggatgatgaaatatacatattcctggaaactatgatttaattatataaatttgaacgaaagggtatatttcatctacctaaactggacgaattattgttagtcttcttacacacttaaataaaatctaattttatttaaaaccaattacaaaaaataagtttaataaaacaaaactttttcaaacaaaattattattagtattttcttttgtttttcgcttttcggtgatggaactttttgatttaatttttcaattaatttactcatagtccctttagcaaccaaccttacctattaattaagtatttctgtaatttacagcatgaattaacgttttaaatattttttgtatattagttttttgcttttcctgatttgcagtacggctgacctaaaaaatgaagacaaacttaattgaaaaatcaaatagtgactaatgacacttcacacaccagcaacgaaaactcaccaacaccacatgcattctgcactgcagtttacaccattttgcaacacatgagcaatcattaacaaatcgtttttatcttgtcttcttctctttctcgctgccacgttaataacaactaaacgtcatctaaccaatcaaattcaatacatctgtgtgtaaaaactaaacattcatgcatccgacaacaaatcaaaatcattcaaaaaaaaaaaaaaacagggcaacaacaagaacattttggtaaagaaggttttcattttgaaaggcggtaataatacgtaatgatgatccaacgatatgtccagcggccctggaggaggaggaggaggaggagaaggtggaggcggcggcagcgggcaacagcagcataacaccagcagctcgagccacaacaacagcagcaacaactgcggcacggcagcagcaactcaattgagcagcagcagcaacagcagaagcatcacaccagcaacatcgacatcatcgactggaactggaacaggaaccacatccacgctgcagcgtcgtatactgcgcggtcatgcggcgcaaacgaccagcggcgagcgtgtcctgctcatcaactatgtgccacaaacaggagcatcagccaccgcatccactcaaagtacttctcaattgcccacccgtaagatactccaggccagagcctcagcggcagcagcagcggcggcagcatcatcgtcatcatctggtggcggaggagccggagcttcatcctcctcgccaccatccacgccagctgtttcgtttgccggactgggttccgaggtgacggtcaccttgacgcgcacaaatcagcgctccagcgtgaccaatgtcactgccgccggtcatattgttcgaaatcagcaagccacaacctatcatcagagcaccaacaccgccagcacagcatcgaccccaagtggcacgtcggcgatccatgagcacatggccacatcaacgtcgccaccgccattggtgttcacccatcatccacatcatcaccatagtcagcagcagcagcagcagcaacatgagtatcaccaagagcaccagttggtggagcaccatcagttggaccaggagcacataatcatagatcatcaccaacagacggaggatgatcaattgatcgaatacgatgatagcggaacgatcgaggagcagcatcaacagttgcaaatgcaggaggatttgcagcaacagcagccacatcatgaagttgtccaagaggtgtatctccagtaggagcgattagtgctaagccgtagtgaaataagttttagccactctatatacaatttttggacacccaaaatgtgtgcaaaagcagaatcgaattgaacaaagctttaatttggaattttttctaaaaatgtatcagtatccctaagtttttaacccatttaaatttctatatataataatcacctgtttcaattgcacacattttgaggattgccaattgagatagtgtacataactacaaacttattaataatcttagaagcgtggaatttttagaaaaccatgtctcaatttgtatataattttcggacaattagaaaagtatttttcaatgaaagtattaatctcaaatgaaacatattgaagtaaaaattcaatcaattacgagttaataaagattatttttgtactatacaaataccgcttctagatacttgctagttgagttgaaaatgcggatatatataatataataacctttgacgatctattcaataagctattgtcagttaaagatcaaaacaaacagaaatcgtaatcaattgtatgatatatacacttcaatgtagagcaaaaaacttcgcacataatacgcatgtatctatggatcaattcaacgctgattgttcgaaaactgtttgataacgagggccctttggattacattgcgaatagaccgatgagtgtctgttctgtaggagaaacatattcatgcaacccagtatttggggccaaggcaataaagtgagccggtttgtgtactgaaagaaacataaaaaaaacttgtgcatttttttgtcacgaggggggtgcaatgaaactcagtggcgatttgaattgttttatctatttattgtttgttgcctttgtaacggttgcctatacacaatgttcttttctaatatacaaaaagccatttaacagctatctcttttaactatttacaaattttattactcttttttttacaagtagcaaactaaaaagctacaaaaattacgtactaccttgtttttttttatatttaatttacacgttgcggttaccatttaaaatgtctgtcctacgattggtaagcttaaattggggcgcttggaggtctttgaatacacaatttgtaatttgtaattgaattgcaatatctacaaaaatgttgattttcattagcatgtaatcaggcactagctagacaatattttcctttaattgcagctatttgcagctatcctgttctctttaagataaaaatgtcttaaaatgcaatttgaaaagattattgttccaagttatcttataacacttttggacctgcattaatgttggtttatagtttttgtttaacttttctgtttaagcattttgaactttgcatcagtttaagttctttgattaattagttgtttaaagatctcgtttacttttgcaaatctattcaatttttaagtaccaatttttgtttctcacttctctagtagcagctgaaaaatgatcgcagaacatagctaatcattagatattatctggcaattataactataatgtctattatgtcagtgttctttttttttttatcaatgtttatgttatgttgcacaattattgccctgattatttggcacttttcattaggcgactgctggcaaaacattcgccaaagaagcgatccaatgaatgatacaaatggggtcgcacattggacagtccatgatcctcgtcagcgtagctctaaaagattacaaaattgtaacgaaaaatccttttgagactagctctt

SEQ ID NO: 42023 - DNA, 4432 bp, DROSOPHILA
agttatccaacgttggcgagcggacaaacaagcaggagaaaaaagcgtacgggcaagagaaagagaaggcacaaaatcacccacagccactgaaattttcttttgcgctccgtttcgagaaagcagcgcgccaagcagcaagaagaggaagagcaaagggagttggaaaagcagtggcgtcgtggaggaggagtagaaaggggatttttgcgaaaaatcccaacttgaagagaattttccccgtaaccgttaaacattaaatcgtcgtgttggagacaaatagcagcgaatacgctagcaacgctggggaggaacaacaattgttggatttggacgcgaccgctttgatgtcgctgccaatgaattcgctgtattcgctcacctggggcgattacggcaccagcctcgtatcggcaatccaattgttgcgctgccatggcgacctcgtcgattgcacgttggccgccggcgggcggagttttcccgcccacaagatagtcctgtgcgccgcctccccctttctgctggacttgctaaagaatacaccatgcaagcatccagtggttatgttggctggcgtcaatgcgaacgatctggaggcgctgctggagtttgtgtaccgcggagaggtgagcgtggatcacgcccagctgccgtcgctactgcaggctgcccagtgcctgaacatccagggactggcaccgcagacggttaccaaggacgactacaccacgcactcgatacaactgcagcacatgattccacaacatcacgaccaagaccaactgattgccacgatcgccacggctccacagcaaacggttcatgcccaggtggtggaggacatccatcatcagggccagattctccaggcaacgacccagaccaacgcagcaggacaacagcagaccattgtgacaaccgacgcggctaaacatgaccaggcagtgattcaggcttttcttccggcacgcaaacgcaaaccacgcgtaaagaaaatgtcacctacggcaccgaaaataagcaaagttgaaggaatggatacgattatgggcacaccgacctcttcacacggctctggatccgtgcagcaggtgcttggcgaaaatggagccgagggccaactgctatcatccacaccgatcatcaagagcgaaggacaaaaggtagagactattgtgaccatggaccccaacaacatgataccggtaacgtcggctaatgcggcaactggcgagataacaccagcacaaggagccactggctcatctggcggcaatacaagcggcgtcctatccacgccaaaggcaaaacgcgctaaacatccgcccggaacagagaaaccacgttcacgatcacaatctgaacaacctgctacttgccccatttgctatgctgtcattcgtcaatcccggaacctgcggcgccatctcgagctgcggcattttgccaaacccggcgtgaagaaggagaagaaaagtaagtccggtaacgatacaaccctagactccagcatggagatgaacaccacggcagagggcgacaacacagtgggcagtgatggagcaggcggagcaggatcagcaggaggacaatcatctggtacgacgccaacgagagtgatatcgaatgcaccgcaggccgcgggggcgccggccatcctggcccaaggtgtgctgccccagcagcagcaacagcagcaactgcagcagcaacaccagcagcacttgacagcaacattagcgggtggtggacaggcatacatcaaacatgagggcggcggcgggggcggcactgggcagcagcagcaacagcaagcggcacaacagcagggcatgcagaacgtcatacacattgtgggcgatcaggtcttcataccgcagcagcaacagccgcagccgcagtagccacctccagccgagccttcaatcattccaacgcaccaacgacaccatcatccacatttccaaaaaaacattaaaaaaaaaaacataacactcacaaaaacgatttgtaaataacaatcagcaaacaaacaaattccccgtgatctgatcgaatgatttgtgttcatttcctgtatcatttttaatttttccataattaattgctgccaaccagtggcaagaagtctagtagcggatccagcggttcaggcagtggggcactgagctccagtggcagtgtgccgcaggtccagacggttcaatccctgcacactttacagggtgtgcaagtcaagaaggatccggatgcccagcaacagcagcagcagcagcagcagcaacaacaacaacaacagcagcaagcaatgacagtgagcggtgcgacgggcggacaagtgcaacaacaggtgcagcaagtgcagcagcaggtccagcagcaacagcagcagcagcaacaacaacaacaacagctgcaacatcaccaaatcatagactcgtcgggcaacattacaacagcaacaacgagtgctcaagcggcagctgccgcacagcaacaggcggctggccagcagcagcaactggtggcacaatccgatggcagcgagagtggagctccgctttcaattgcccaggtgcagacgctgcagggccatcagatcataggcaatttaaatcagggcaacaacaagaacattttggtaaagaaggttttcattttgaaaggcggtaataatacgtaatgatgatccaacgatatgtccagcggccctggaggaggaggaggaggaggagaaggtggaggcggcggcagcgggcaacagcagcataacaccagcagctcgagccacaacaacagcagcaacaactgcggcacggcagcagcaactcaattgagcagcagcagcaacagcagaagcatcacaccagcaacatcgacatcatcgactggaactggaacaggaaccacatccacgctgcagcgtcgtatactgcgcggtcatgcggcgcaaacgaccagcggcgagcgtgtcctgctcatcaactatgtgccacaaacaggagcatcagccaccgcatccactcaaagtacttctcaattgcccacccgtaagatactccaggccagagcctcagcggcagcagcagcggcggcagcatcatcgtcatcatctggtggcggaggagccggagcttcatcctcctcgccaccatccacgccagctgtttcgtttgccggactgggttccgaggtgacggtcaccttgacgcgcacaaatcagcgctccagcgtgaccaatgtcactgccgccggtcatattgttcgaaatcagcaagccacaacctatcatcagagcaccaacaccgccagcacagcatcgaccccaagtggcacgtcggcgatccatgagcacatggccacatcaacgtcgccaccgccattggtgttcacccatcatccacatcatcaccatagtcagcagcagcagcagcagcaacatgagtatcaccaagagcaccagttggtggagcaccatcagttggaccaggagcacataatcatagatcatcaccaacagacggaggatgatcaattgatcgaatacgatgatagcggaacgatcgaggagcagcatcaacagttgcaaatgcaggaggatttgcagcaacagcagccacatcatgaagttgtccaagaggtgtatctccagtaggagcgattagtgctaagccgtagtgaaataagttttagccactctatatacaatttttggacacccaaaatgtgtgcaaaagcagaatcgaattgaacaaagctttaatttggaattttttctaaaaatgtatcagtatccctaagtttttaacccatttaaatttctatatataataatcacctgtttcaattgcacacattttgaggattgccaattgagatagtgtacataactacaaacttattaataatcttagaagcgtggaatttttagaaaaccatgtctcaatttgtatataattttcggacaattagaaaagtatttttcaatgaaagtattaatctcaaatgaaacatattgaagtaaaaattcaatcaattacgagttaataaagattatttttgtactatacaaataccgcttctagatacttgctagttgagttgaaaatgcggatatatataatataataacctttgacgatctattcaataagctattgtcagttaaagatcaaaacaaacagaaatcgtaatcaattgtatgatatatacacttcaatgtagagcaaaaaacttcgcacataatacgcatgtatctatggatcaattcaacgctgattgttcgaaaactgtttgataacgagggccctttggattacattgcgaatagaccgatgagtgtctgttctgtaggagaaacatattcatgcaacccagtatttggggccaaggcaataaagtgagccggtttgtgtactgaaagaaacat

SEQ ID NO: 42024 - protein, 519 aa, DROSOPHILA; identical to SEQ ID NO: 26991

SEQ ID NO: 42025 - DNA, 9642 bp, DROSOPHILA; identical to SEQ ID NO: 26989

SEQ ID NO: 42026 - DNA, 3301 bp, DROSOPHILA
acaaaatcacccacagccactgaaattttcttttgcgctccggtgagaagataatttcacaaaccaaaaccgaaccaacaaacaaaaaaagtgcgctccgtgagcgggaaaacaataacaaaatcaagagacatgcgattataaaacgaacaaaataactgagtgacaaaaaaaaattaaatgcgtgtctcatggcttgactgtactgtgtattaaaaaatgtgattgtgtcggctgtccgtctgtctgagtttgtgcgcgtgtgtgtgctgttggcgtttttaaatgtggcgcgctatttttgtgtgatttttgtgggcagcaacgaattttgaaacatcaattgtatactagttgtcagtccccttgtgaaaaagtcttctccaacaacaaaattccttttcgagaaagcagcgcgccaagcagcaagaagaggaagagcaaagggagttggaaaagcagtggcgtcgtggaggaggagtagaaaggggatttttgcgaaaaatcccaacttgaagagaattttccccgtaaccgttaaacattaaatcgtcgtgttggagacaaatagcagcgaatacgctagcaacgctggggaggaacaacaattgttggatttggacgcgaccgctttgatgtcgctgccaatgaattcgctgtattcgctcacctggggcgattacggcaccagcctcgtatcggcaatccaattgttgcgctgccatggcgacctcgtcgattgcacgttggccgccggcgggcggagttttcccgcccacaagatagtcctgtgcgccgcctccccctttctgctggacttgctaaagaatacaccatgcaagcatccagtggttatgttggctggcgtcaatgcgaacgatctggaggcgctgctggagtttgtgtaccgcggagaggtgagcgtggatcacgcccagctgccgtcgctactgcaggctgcccagtgcctgaacatccagggactggcaccgcagacggttaccaaggacgactacaccacgcactcgatacaactgcagcacatgattccacaacatcacgaccaagaccaactgattgccacgatcgccacggctccacagcaaacggttcatgcccaggtggtggaggacatccatcatcagggccagattctccaggcaacgacccagaccaacgcagcaggacaacagcagaccattgtgacaaccgacgcggctaaacatgaccaggcagtgattcaggcttttcttccggcacgcaaacgcaaaccacgcgtaaagaaaatgtcacctacggcaccgaaaataagcaaagttgaaggaatggatacgattatgggcacaccgacctcttcacacggctctggatccgtgcagcaggtgcttggcgaaaatggagccgagggccaactgctatcatccacaccgatcatcaagagcgaaggacaaaaggtagagactattgtgaccatggaccccaacaacatgataccggtaacgtcggctaatgcggcaactggcgagataacaccagcacaaggagccactggctcatctggcggcaatacaagcggcgtcctatccacgccaaaggcaaaacgcgctaaacatccgcccggaacagagaaaccacgttcacgatcacaatctgaacaacctgctacttgccccatttgctatgctgtcattcgtcaatcccggaacctgcggcgccatctcgagctgcggcattttgccaaacccggcgtgaagaaggagaagaaaacaaccagtggcaagaagtctagtagcggatccagcggttcaggcagtggggcactgagctccagtggcagtgtgccgcaggtccagacggttcaatccctgcacactttacagggtgtgcaagtcaagaaggatccggatgcccagcaacagcagcagcagcagcagcagcaacaacaacaacaacagcagcaagcaatgacagtgagcggtgcgacgggcggacaagtgcaacaacaggtgcagcaagtgcagcagcaggtccagcagcaacagcagcagcagcaacaacaacaacaacagctgcaacatcaccaaatcatagactcgtcgggcaacattacaacagcaacaacgagtgctcaagcggcagctgccgcacagcaacaggcggctggccagcagcagcaactggtggcacaatccgatggcagcgagagtggagctccgctttcaattgcccaggtgcagacgctgcagggccatcagatcataggcaatttaaatcaggtgaatataactgactttcaacaacaacaaccgcagcagcaacaacagcagcagcaacaacagcagcaacaacaacaacagcaacagcaaacacaacagacgctctgatcggaccgaagtcttagatccatcttgtactattctatacaattattaatttgggtttttgctaaacgctttaaatattctctttgcggaatgcgtagacaaattctaaattagttttagaaagccagaaaggcatatttagttgtttaccgttttgttgtacaatcttatgactttaaatgttgatttacccctcctacaacttattttgttgctagacaaacgcttaagtgctctatggttattggaaattacgtgcatattttacatactttataaatattatcattttgtatggttttacaaatgtcccaatgctagaggacctctagtcattttgaagtcctgcagatcagtaaacaccttaatccaacaaggatcccttgctcacgtccagattttggccatgaacgaatgcaccttgatttaaaaaatattaacaaatacattaagtttaaaaatccttgagttacaaagatttacttaagcagctcaaaagtaattgatctgatcaaaagagagttcgctcaacaaggtttctaaaaacccacccaccaacaatcacttaagtaatcaatcaaccaatcaataaatcaactcgatatctctgctttcgtttttgtttaagaactaggcgttctatgtttaaattgaaccaattttatatgtatattacttaattttaatagttgcaaatttttcctaaaatttagaccccgttgtactagttttggatgatgaaatatacatattcctggaaactatgatttaattatataaatttgaacgaaagggtatatttcatctacctaaactggacgaattattgttagtcttcttacacacttaaataaaatctaattttatttaaaaccaattacaaaaaataagtttaataaaacaaaactttttcaaac

SEQ ID NO: 42027 - protein, 582 aa, DROSOPHILA
MSLPMNSLYSLTWGDYGTSLVSAIQLLRCHGDLVDCTLAAGGRSFPAHKIVLCAASPFLLDLLKNTPCKHPVVMLAGVNANDLEALLEFVYRGEVSVDHAQLPSLLQAAQCLNIQGLAPQTVTKDDYTTHSIQLQHMIPQHHDQDQLIATIATAPQQTVHAQVVEDIHHQGQILQATTQTNAAGQQQTIVTTDAAKHDQAVIQAFLPARKRKPRVKKMSPTAPKISKVEGMDTIMGTPTSSHGSGSVQQVLGENGAEGQLLSSTPIIKSEGQKVETIVTMDPNNMIPVTSANAATGEITPAQGATGSSGGNTSGVLSTPKAKRAKHPPGTEKPRSRSQSEQPATCPICYAVIRQSRNLRRHLELRHFAKPGVKKEKKTTSGKKSSSGSSGSGSGALSSSGSVPQVQTVQSLHTLQGVQVKKDPDAQQQQQQQQQQQQQQQQQAMTVSGATGGQVQQQVQQVQQQVQQQQQQQQQQQQQLQHHQIIDSSGNITTATTSAQAAAAAQQQAAGQQQQLVAQSDGSESGAPLSIAQVQTLQGHQIIGNLNQVNITDFQQQQPQQQQQQQQQQQQQQQQQQQTQQTL

SEQ ID NO: 42028 - DNA, 4310 bp, DROSOPHILA
gcccacttttatcaaacaagttacaacattacgcgacagttctcttaatttcagcacgaagattatactttcctaaatatttgcaatatttgagatttagacctcatccaccaacttttagcctaggcactcttaggtgtcaagcgagttcattgccacgaaagtcatcgatacaaaaatacttaagcaagactaagaaaaggatttgtgcacaagtgtctattcagcggccagcacttggcaagggtttgcgctgaagtgctcgaaagggaaaagcaatacactatccaaatagctaagaagtgaaatgtactgaaccacactgcgtatacttactcggtcgtttttccttgccctgcaagggaagttacaagttagttcagttagctcgaaaacgaatattagatatgtgtggtcaacctgttgcgatttctggctctcaactgcccgcctgttcgcctccgtctcagcccgcaggagcacatcgtcgagcgcctcccgcaacgcggccatgttctggggattttgcttgaaggcctcaatccgcgcctccagtgactccgtttcgattccatcaacgctgtccggagacgctggctcgggatccgcaaatctggcatgcatctttcctgggtttttgtgagaattcctttttatcctttgaaaatgctgccagaagcgtttcgagctttgcctttgtcctgcgatgggtatctacaaggagtgctgagcagagctctttgtgcgttcacccagcaatgcgctggagaaatcaatagcaagccacttgggggcccatacccgcacatgcgtgctgactgcgtgggcaagctttcgatttgtggggtgggagagcagtcagttgatttcaacagttcgttatttacagaactgtagcttaatatttctatgggaaatccttaaataatgtttttttttttgcttgctaagaagaactaaatccattttacacaaaacgtgtgaaaataatgatttaatattcttcctatttgtgtggttacatttttttggggtaggaacccgcattttttattttattgcatacaatatgacaaaatgtggactacgaactaagctggctactccaggtgcgagagatcgtccagctcgggcggtgcgcgcacaatctccgtctcaatgatcagcgagttggcgtctaggatgctctgaaagattgaactgttataccatcaactgctggcgcttcgctaccggcaataacacacacattatcgctgctccgctgtgcagccgctagtagactgccgctcgagcttgagttcgaattggaggcactggcagcgttggaggccgcggagaggaccacgctgtgcggagagctgccacgccgcaccaccttcgcctggccctgctgcggcgagttctgggtgactatcacaaacttttgcgccggctggttggcctgaatggctcttatttgcggcagggacgagactccgggacttctaaaacaaaagaatatttaaccgcttagtaatgggcataaaaagacatgtcaacatggtttccattaggaatcaaatgcttggctggaattttattttatgcttaaaagtgttatttacccctgtctctgtgtggtgggcatggacactcgtccgatggttgttgctgtttgtgctgcactcgtgatgggtgccgtgttgatagtgttggatgacagggttacaatgcttgaggcgggcgcatttcgaactttgactactgcctggcacagcgacggccccaggaagccaaagtcgttcttgtagtcctccgctgtatctggcgctgagcgcatttgcctgagaatcgggggacagcacttctgaagcatggcgcggatgtgacctgctgctgtcttgtcagtgttgctgatggaggtgccgagcaggtgaggttcaatgcgctccgatatgaacttaaggcggggtatgatgaaaacctttatgacttcgccccccagctccgagagacccgcaatagagccgtaaagcgaggacaggtgggtcttgtcgttctgcagggccttgctgaagatgctgaaggttgggaaatggatgttaaaaggttatttaatttaagtggatgtgatttaccgggtgacacgggtttgcagattgttggttagggtattgaagttcttgcagatttgagccatcagtcgggaggcaaagtctcgcagggcccagtgattgtccagctcggggcgcatacacagctgtttggacacaatgcacgtcatcaccgagggtatcagttcgtggagctatgcggagacaacatcgtttttatgagaaacaaagaacaatacaataagaaatttcttacgtatttctccagaaacagcgaaggattatccagaagcgcacgaaccatgcgcatgaggtaaataagcaacgccaagttgttctgaaccacattgaccttaactccctcggcaatgaaggtgcacatgcggggaagcatttcgtgcaggccaggatcggatcccagcgactgcagcgcttccccgcgccgcggctcatcagatcccacgcacgcctcggtgatctccttgtagtacaactgctgctccacggacaactcgtgcgtggccagttgcttgacatgaatggtctccacgtttttcagcttgtgtatcttgccggtggtgggtttgcctgccgcatctttgtttaggccttgatccatcttaataactggattgaccgagtccagtaactgggaatccttcgagagcggaggggggttttcgggcacagtgggttgcactccctccacaacaaaccaatgggagcgcagggtgagatccaggggaatttttacagagttggtggatgtgatttctcctaggtcgatttccttgtcctcggtgaagtgcagctcccgtcctccgccagatgcgaagcggaatggaatgaagtccttggctacgaaaccgtactgcggctccacatttcgcaccttaagggacatgtcgatgtcccgcactgagagcttctgccgcttggcgtggttcatgaacttggccgcatcctgtacaatcctcttcagcttgatggacacatcctccgctagttccttggcggcgtcatccgacagggagcccactccgatgctctccgcgatcaccttcatggactccgccgagatgctggagccgtacagcatgctgctggaggggctgctcggtttcgacggttttccactcatttcccaggtttttacaaataaacaaataataatcgccgagctgctcggccagtgtgcacacacccaaaagagaaaatctagctattctggcttttttgttgtttcatatcgtctgctataattagttttatggtcacctaaaattttgctatttgcgagttcatgtaaggaatatattcccataacaaatatttagttacaatagtaaaaaaaatataagaattcatttttaattcataaaaaatgtcatattaatattactggtttcacattgttatacaataatcggcttgtttttttccagctatttttgaatagaatccactattgttcgcgatagttgcctgctaaattccgccgcaaggtcacactgtcgcgtagacatcacgtacaccccagctgggcacactgaaacgcagtctttttctttatttatgttcgtaaatttttggttgcctggctttttgttgttgcgccacattaacaataacaattgatgcgccccgccaccgcccactagtcgcgaaaaaagtgaattatcggtaccgcggattaatgtgccacatgcgagaagcgttgcaacgttgcgccgtcgtcgggcgtcgaacaaagcagtttttgggaaagtgaaaacggcgccattttagaagcaggcaagccacggcctaaggctcaagaaaagtgcaaatgcaatgtgtgcagcaatagattgtcatttcggcacaaacgaaaccgactactgaggtctactactagcccagaaaacaatcaagcgtaagtgtgctgtaggtaatggttttttttttggacgatgtcaccgcggtttgacctactttaaaggcgattaagagtgccaccaaatcgaattaaaaacacttggctaacaaaagcgaacctttgcagctccccagcgactccaaaatatgagctgtagccaaaatgagacggcagcagcaaaggttctggaaacgcaacgcgcacaagaatccggcagtgaaaatgaggcaagtctttaaaatggcaccctttatgcaatgctatatgtaaagtgtgttgttctcctcaggaaaccg

SEQ ID NO: 42029 - DNA, 2071 bp, DROSOPHILA
tctcttttgggtgtgtgcacactggccgagcagctcggcgattattatttgtttatttgtaaaaacctgggaaatgagtggaaaaccgtcgaaaccgagcagcccctccagcagcatgctgtacggctccagcatctcggcggagtccatgaaggtgatcgcggagagcatcggagtgggctccctgtcggatgacgccgccaaggaactagcggaggatgtgtccatcaagctgaagaggattgtacaggatgcggccaagttcatgaaccacgccaagcggcagaagctctcagtgcgggacatcgacatgtcccttaaggtgcgaaatgtggagccgcagtacggtttcgtagccaaggacttcattccattccgcttcgcatctggcggaggacgggagctgcacttcaccgaggacaaggaaatcgacctaggagaaatcacatccaccaactctgtaaaaattcccctggatctcaccctgcgctcccattggtttgttgtggagggagtgcaacccactgtgcccgaaaacccccctccgctctcgaaggattcccagttactggactcggtcaatccagttattaagatggatcaaggcctaaacaaagatgcggcaggcaaacccaccaccggcaagatacacaagctgaaaaacgtggagaccattcatgtcaagcaactggccacgcacgagttgtccgtggagcagcagttgtactacaaggagatcaccgaggcgtgcgtgggatctgatgagccgcggcgcggggaagcgctgcagtcgctgggatccgatcctggcctgcacgaaatgcttccccgcatgtgcaccttcattgccgagggagttaaggtcaatgtggttcagaacaacttggcgttgcttatttacctcatgcgcatggttcgtgcgcttctggataatccttcgctgtttctggagaaatacctccacgaactgataccctcggtgatgacgtgcattgtgtccaaacagctgtgtatgcgccccgagctggacaatcactgggccctgcgagactttgcctcccgactgatggctcaaatctgcaagaacttcaataccctaaccaacaatctgcaaacccgtgtcacccgcatcttcagcaaggccctgcagaacgacaagacccacctgtcctcgctttacggctctattgcgggtctctcggagctggggggcgaagtcataaaggttttcatcataccccgccttaagttcatatcggagcgcattgaacctcacctgctcggcacctccatcagcaacactgacaagacagcagcaggtcacatccgcgccatgcttcagaagtgctgtcccccgattctcaggcaaatgcgctcagcgccagatacagcggaggactacaagaacgactttggcttcctggggccgtcgctgtgccaggcagtagtcaaagttcgaaatgcgcccgcctcaagcattgtaaccctgtcatccaacactatcaacacggcacccatcacgagtgcagcacaaacagcaacaaccatcggacgagtgtccatgcccaccacacagagacagggaagtcccggagtctcgtccctgccgcaaataagagccattcaggccaaccagccggcgcaaaagtttgtgatagtcacccagaactcgccgcagcagggccaggcgaaggtggtgcggcgtggcagctctccgcacagcgtggtcctctccgcggcctccaacgctgccagtgcctccaattcgaactcaagctcgagcggcagtctactagcggctgcacagcggagcagcgataatgtgtgtgttattgccggtagcgaagcgccagcagttgatggtataacagttcaatctttcagagcatcctagacgccaactcgctgatcattgagacggagattgtgcgcgcaccgcccgagctggacgatctctcgcacctggagtagccagcttagttcgtagtccacattttgtcatattgtatgcaataaaataaaaaatgcgggttcctaccccaaaaaaatgtaaccacacaaataggaagaa

SEQ ID NO: 42030 - protein, 592 aa, DROSOPHILA
MLYGSSISAESMKVIAESIGVGSLSDDAAKELAEDVSIKLKRIVQDAAKFMNHAKRQKLSVRDIDMSLKVRNVEPQYGFVAKDFIPFRFASGGGRELHFTEDKEIDLGEITSTNSVKIPLDLTLRSHWFVVEGVQPTVPENPPPLSKDSQLLDSVNPVIKMDQGLNKDAAGKPTTGKIHKLKNVETIHVKQLATHELSVEQQLYYKEITEACVGSDEPRRGEALQSLGSDPGLHEMLPRMCTFIAEGVKVNVVQNNLALLIYLMRMVRALLDNPSLFLEKYLHELIPSVMTCIVSKQLCMRPELDNHWALRDFASRLMAQICKNFNTLTNNLQTRVTRIFSKALQNDKTHLSSLYGSIAGLSELGGEVIKVFIIPRLKFISERIEPHLLGTSISNTDKTAAGHIRAMLQKCCPPILRQMRSAPDTAEDYKNDFGFLGPSLCQAVVKVRNAPASSIVTLSSNTINTAPITSAAQTATTIGRVSMPTTQRQGSPGVSSLPQIRAIQANQPAQKFVIVTQNSPQQGQAKVVRRGSSPHSVVLSAASNAASASNSNSSSSGSLLAAAQRSSDNVCVIAGSEAPAVDGITVQSFRAS

SEQ ID NO: 42031 - DNA, 4414 bp, DROSOPHILA
tcaacggtaattattttaaaatcccgaatgaccgttatttaggtttaatattaacattaaatttaaacgtaatagttattagttgtacaacttttaagaatacgaagttaatgatagtatttattattataatgctgctatgaaggaaaaagaaactagcgaatttttatgaaatactttctaaaactggtcaaactacaaaatataagctaatgaaaaatgtatatttaaaatgttaaagcaaacacagataggtaaaaggattttaattaaaaaatccttctctttcattcacacaattttctttaattgcaattagatttcatgcataagattcgaaattataaattagaatcaatttacctcaaaatgcggcagcttttgaaaacgctgcacctgctcgaatagaatcttaattgatttgatcgtgaacttaagtctgtaatgggtgtgcgcaatccgcaatctacaagcagattaagagcttaggccaagtcgttacttacttcatcatctcgttggggatccctttgtctatcgtttggcttctgcctcggcttctgtgggagatacaagatacccagttagtttggagcaaggtcagtcgtcaaaagtcagtcactgggctgtattagatttccctgttcgacggcagtcaccacaaatgttcaccacaaaaggtgcacgtacagtgtacccagccaccacccacccacaaccctcggaaaatgtttgttttccgaagcggcaaaaatgctgagccacttgtctttgctccatgcccattgcaatgggtctccgcttcggtgtgtgtcgtcaatggtggtcgctgtctaccggcgtggccacgtcggctgtcaatcaaaattatgaataatgccgggtcggttgcctccaattggccgccttctccaaccacatgggctggccatccatcccctatccaatgtaactaggtggccagcccacggagcacttgccagttgtcattcggttctcactgcaaacggaccgaccacgtgaaattcggttctttcggtttcggaatattgcatcatacatagcttggactagccaaggagataccactaactcacccttggattatccacgcaatggcagccggtgtcttcaagagttttatgcgcgacttctttgcggtcggttgatagcgaaatcaattttagaactaaagaattttttttttaatttttactaaggcttccaaaaattgcccaaatttgctgactgagttcgaaacgtaatctaaggtttgagttcaagttcaagcggtcctactgtattcaagaccccatggaggtccttgagaacagttccagctgacgaaatgtttggaatgcgggaaatcagccagcagtcgactggataatccctgctaatccacggcaaaagtgcagccggattagggcattcaatcgaggtggtcaaaagcgctaagacccattcacccattttcttacaggtgaaatacgatgagcagcgaaatgatccgcaagcggaacgactggatggcaacggacgactgtatcccaactgctcgtcggatgtgtggctgcgatcctgcgagcgggagatagttgatcccattgagggccatcacagcgggcacattcccaaatggatatgcggtagtctgttgcgcaatggacccggcagctggaaggtgggcgacatgaccttcggccatctgttcgactgctccgccctgctgcaccgatttgccattcggaatggacgcgtcacctaccagaatcgcttcgtggacacggaaacactgcgaaagaatcgctctgcccagcggattgtggtcacggagtttggcacagctgctgttccggatccctgtcactcgatcttcgatagatttgcggccatttttcgaccggatagtggaacggataactcgatgatttccatatatcctttcggggatcagtattacacatttacggagacgccttttatgcataggtttgcatattaacaattcttagaacaataatgtagtattcatttctaatattttagaataaatccctgcactttggccaccgaagcacgaatctgcaccaccgacttcgtgggcgtggtgaaccacacatcgcatccgcatgttcttcccagtggcactgtctacaacctgggcaccacaatgaccagatctggaccggcatacactatactcagtttcccgcacggcgagcagatgttcgaggatgctcatgtggtggccacactgccgtgccgctggaaactgcatcccggttatatgcacaccttcggcttaacggatcactactttgtgattgtggagcagccgttgtccgtttcgcttacggagtatatcaaagcccagctaggtggacagaatttatcggcgtgtctcaagtggttcgaggatcgaccgacactatttcaccttatagatcgggtttccggcaaactggtgcagacctacgaatcggaagccttcttctacctgcacatcatcaactgctttgaacgggatggccacgtggtggtggacatttgcagctacaggaatcccgagatgatcaactgcatgtatctggaggccattgccaatatgcaaacgaatcccaattatgctaccctctttcgtggacgtcccttgagattcgtcctgcccttgggcacaattcctccggcaagcatcgccaagcggggactggtcaagtccttctcccttgctggactaagtgctccgcaggtttctcgcaccatgaagcactcggtctcgcaatatgcggatataacctacatgcccaccaatggaaagcaagccactgctggagaggaaagccccaagcgagatgccaaacgtggccgctatgaggaggagaatcttgtcaatctggttaccatggagggcagtcaagcggaggcgtttcagggcaccaatggcatccaactgcgtccggaaatgctgtgtgattggggctgtgaaacacctaggatctattatgaacggtatatgggcaagaactaccgatacttctacgcgattagctccgatgtggatgcagtgaatccgggcaccgtaagtgcttatacttctttctccagatcagttatatagaatccctatttctatagctcatcaaggtggatgtgtggaataagagctgtctaacctggtgcgaggagaatgtctatcccagtgagcccatttttgtgccttcgccggatccgaaatccgaggacgatggcgttatcctggcctccatggtgctgggcggtctcaacgatcgctatgtgggcctaattgtgctatgtgccaaaacgatgaccgagctgggccgttgtgatttccataccaatggacccgtgcccaagtgtctccatggatggtttgcacccaatgccatttagatacggaactccttatatgggaagactacttagcttaggagatagggtaaagcatctgcccagtattacgtttagatttagactagatttagactagcatttaatcttagaacttagaattttggattcaagacattcgcaataaactcctgccacttgcgctggaatacccgattgattttccgcctctcgtccgaggtgagaacggcgtacttgatggagttcaaggccagctgcttgagaaagcgcagatccgcatccgccggagccaaggccatgaaggcgtagtagaaatcgtagctgagacccttggctccccaaacacccggatcatcggatgatataacgatgggaaagttctcggctatcaggaagctggccggatgatttcgcagatcccagacgaagcccaagacctggttggaaatgggattcacctcgatggcgatgttacgcttcttgatggtggaccacaattgtggatgcttgggcagggcgaaggcatggccaatccgcttcgtattcagcagaatggcgtccatcatgttccagtccgttcggccattccaatctatggaataggtagattgattctcatataccctatatgggattcggataacatactcgtctcgccggcgtggaagaagtagtttgccgtgctaggaagatcggacagttggttgatatacctgttcagcggttctccagtgtcctcctgaccaatcagatcgaaaccaatcacaaagttcggtttggcatggctgcagcaaataagattttatagggtattaaaatatgatatgatttttcaaaaaggtgtaaaaattgcgactcttttaataattatgtacacactgagctaaacttactgcagctgcttaaaagtggtgattcggcgcaacatctcctcctcggatgcgcgattccgcttggcatatatcaccttaacaccgatgaagtcatggtgcttggccttgaattcctccacaatccgttc

SEQ ID NO: 42032 - DNA, 1978 bp, DROSOPHILA
ctgcaaacggaccgaccacgtgaaattcggttctttcggtttcggaatattgcatcatacatagcttggactagccaaggagataccactaactcacccttggattatccacgcaatggcagccggtgtcttcaagagttttatgcgcgacttctttgcggtgaaatacgatgagcagcgaaatgatccgcaagcggaacgactggatggcaacggacgactgtatcccaactgctcgtcggatgtgtggctgcgatcctgcgagcgggagatagttgatcccattgagggccatcacagcgggcacattcccaaatggatatgcggtagtctgttgcgcaatggacccggcagctggaaggtgggcgacatgaccttcggccatctgttcgactgctccgccctgctgcaccgatttgccattcggaatggacgcgtcacctaccagaatcgcttcgtggacacggaaacactgcgaaagaatcgctctgcccagcggattgtggtcacggagtttggcacagctgctgttccggatccctgtcactcgatcttcgatagatttgcggccatttttcgaccggatagtggaacggataactcgatgatttccatatatcctttcggggatcagtattacacatttacggagacgccttttatgcatagaataaatccctgcactttggccaccgaagcacgaatctgcaccaccgacttcgtgggcgtggtgaaccacacatcgcatccgcatgttcttcccagtggcactgtctacaacctgggcaccacaatgaccagatctggaccggcatacactatactcagtttcccgcacggcgagcagatgttcgaggatgctcatgtggtggccacactgccgtgccgctggaaactgcatcccggttatatgcacaccttcggcttaacggatcactactttgtgattgtggagcagccgttgtccgtttcgcttacggagtatatcaaagcccagctaggtggacagaatttatcggcgtgtctcaagtggttcgaggatcgaccgacactatttcaccttatagatcgggtttccggcaaactggtgcagacctacgaatcggaagccttcttctacctgcacatcatcaactgctttgaacgggatggccacgtggtggtggacatttgcagctacaggaatcccgagatgatcaactgcatgtatctggaggccattgccaatatgcaaacgaatcccaattatgctaccctctttcgtggacgtcccttgagattcgtcctgcccttgggcacaattcctccggcaagcatcgccaagcggggactggtcaagtccttctcccttgctggactaagtgctccgcaggtttctcgcaccatgaagcactcggtctcgcaatatgcggatataacctacatgcccaccaatggaaagcaagccactgctggagaggaaagccccaagcgagatgccaaacgtggccgctatgaggaggagaatcttgtcaatctggttaccatggagggcagtcaagcggaggcgtttcagggcaccaatggcatccaactgcgtccggaaatgctgtgtgattggggctgtgaaacacctaggatctattatgaacggtatatgggcaagaactaccgatacttctacgcgattagctccgatgtggatgcagtgaatccgggcaccctcatcaaggtggatgtgtggaataagagctgtctaacctggtgcgaggagaatgtctatcccagtgagcccatttttgtgccttcgccggatccgaaatccgaggacgatggcgttatcctggcctccatggtgctgggcggtctcaacgatcgctatgtgggcctaattgtgctatgtgccaaaacgatgaccgagctgggccgttgtgatttccataccaatggacccgtgcccaagtgtctccatggatggtttgcacccaatgccatttag

SEQ ID NO: 42033 - protein, 620 aa, DROSOPHILA
MAAGVFKSFMRDFFAVKYDEQRNDPQAERLDGNGRLYPNCSSDVWLRSCEREIVDPIEGHHSGHIPKWICGSLLRNGPGSWKVGDMTFGHLFDCSALLHRFAIRNGRVTYQNRFVDTETLRKNRSAQRIVVTEFGTAAVPDPCHSIFDRFAAIFRPDSGTDNSMISIYPFGDQYYTFTETPFMHRINPCTLATEARICTTDFVGVVNHTSHPHVLPSGTVYNLGTTMTRSGPAYTILSFPHGEQMFEDAHVVATLPCRWKLHPGYMHTFGLTDHYFVIVEQPLSVSLTEYIKAQLGGQNLSACLKWFEDRPTLFHLIDRVSGKLVQTYESEAFFYLHIINCFERDGHVVVDICSYRNPEMINCMYLEAIANMQTNPNYATLFRGRPLRFVLPLGTIPPASIAKRGLVKSFSLAGLSAPQVSRTMKHSVSQYADITYMPTNGKQATAGEESPKRDAKRGRYEEENLVNLVTMEGSQAEAFQGTNGIQLRPEMLCDWGCETPRIYYERYMGKNYRYFYAISSDVDAVNPGTLIKVDVWNKSCLTWCEENVYPSEPIFVPSPDPKSEDDGVILASMVLGGLNDRYVGLIVLCAKTMTELGRCDFHTNGPVPKCLHGWFAPNAI

SEQ ID NO: 42034 - DNA, 10325 bp, DROSOPHILA
ccagtctgcaaatatccatggaattatttactacgggcatcattattaaccaccgcggttgctactcacgcgagcttgatgagattggggctggtcagcagctgcggacaactgtgcccattgctcaccgtctctatgaagtgcttaagctgatccaacaggttctggcgcagcattttgtcgtcctaggcatcgggaacgcagcaccgaagttggccaagtgagcaaatgcatcgcagcagcgggtcgctgcgtctttcactcggaataccaaaacgacggggcacaactgcaggcatttggaatccgccgccacctggccacactaaggcggcagaaaattcgaaattctttaatatctgaaaatcataaaattaacagaataataaatatcttagcactctaacgtgtcattacattcattataaactagcacctgagattagtttaagatgacactttacattcaagttaaattaagctggaaaagatttctaatcggaattatgtgtttactacaatgctaactttcgaatcgaggatgtaattactgagtaatcaaactgtttgctctttttaatactaagtaaacgtacttatagctctattttctaattttataatatttaacgtgtttttgttttaaaatattatcgtaacagtagggagtgcgaaaaacggtaacaccaaaacccagttcgtgcattattgcacactcttttggggcgaatcaagagcgaaagacaacatggcgtcgaagcggcgaatctgtctcgcagtttgtcgtgctgtttgcttttttctgctctgatttgtacaaatattcattcaaggtgctccagttttgccaagtatatgttaatagagtaccataacaatggtggcgtcacaggggtgctagagttcgatatcgataacagctcacattctcgtcatatgcaactatcgctgtactctctggccgagtatcgatacgcagatattatcgtcgtggtcagaccaacgctctagcgtcggtccgcggaaaatagcgaaaattacaattatccgggaagatatattggtcgaaaactaactcgtgatcccccaataaatatgcgcaagagaaaattgtatataaactgatcgaatgcagccagcgtgctaagcactaaaagcgaaaaacgccagaaacagaaacaaggaattgcagcgtgagtgtataactttttggtttttgcccccgcgctctttctctctctttgctgctctctctctcccgctctcttttgccctcttgcggcttctgtgttgtctgcgtgctagtgtgtgtgtgtttgaattttactgtgaatgtgaccgacggtgtgttctcacgtactccgtggatgatttgcggccttgccagggaatcggactatatatcccggcaatagcccatattggatcccgattttgaatacaactcggctgatttgcttctttcagtgtctccccttttatcgcactttatgcaacaacgcataccgtcgtgttgaatttcctcgctctccgctgtgtgtggtttgtaggtgtgcgtgtgttcgaggtgagttagccgtcgtctgtttttcttttccctgcgttttgtgtgcgtttcaatgaaatgcaaaatcgccagcgaatatcgcggaaatgcgctgctcctaaatattatgtatacataaataaagtatcgaatcaaaacaaaatcggcttgcaacaacaacaaaaacattgcagagtgtgggtggcgcgtgtagcgatcaaaattgcgtgcatgtgtaatgtgtgtggtggagagacggcatttttctttaccacacgcctcttcttctttcccacaatacactgcaatttttgcgattctgttttgcgcctgccattcgcaataattttattgaatgaaccgcaaaagagacggcccaaaaagcgatgtacttgccagacgttgtgtctgtgtgcgtccaagtgtctgtagcgcgttgtgtgtgtatcgcgtatgaaaatacatcaactgttgggcatcaacaaaaaaacggaatcaaaaatttataataaaaaatgaaaggaaattagctgactttgtaatcgcaatcggagagtgtttacttgctaaattttcgagttctccgcccgtctctttcccttcatccctcctgccttcaccgccaataccaccccaaaaaattgcatacatgcacacacgccttcggttgtgcgagtggtttagtgtgtgagcgcgcgcgtattctgcacacattgtcatgcatgcaaaaaacaagatacgacgcgttcgcaatcgttagattccgtctcccccaattcatggcgtttcattgctgggggcgaaagtaagaagataacgaaagggatatgcgaaccacttcctaatgaagtcctgcatccttagcttttggattcccacctcttcgccttctccttcttcacacggacacttgcagcgttcgcgcccatgcgtgtgtatgtgtgcgaagaacaggaagagagcagcgagactccaattatccatttacagttgcggttgaaatgatggagcatagttgtattatttgtattcacacaattaccggtggtatttaaagtcttaacaatatttattaatttcctgctaccttcctaaattttattcatagttttaatactgtacccaagtaccttaagttccctaatcagatgtaaacttgttgataggcataattcctatcttagtttgtatttttgtctactataacctaaacttaattctactacgaatttaattacaacatactaagactgtaatctacaaaccaaacgaaaatgccttgaataaaagaggtctagtgattcataatacgatttgcacacgtgttattaactaggtagtagcgaaatagagtcaaaaaggccaccgacttgttcacaactgtatctcttactaacttccctataaaaactaattgttgctggggcgaaaaaatactgccaagttgtcatatttgccggactttattgatgactcgactccagagctctatatttcgcacacagattttctctcggcacttttcgcaaccttctgcggccgctggttattaataaaaattaataataaacgaaatctgtggcgctgtgcggcacttggacacacttatgtacacatgagcattctcgtgtttttcgcagctgattgcgtaaacgaaaccgctcgctacgtttgttttgaattgctacttttgttttggtaccgattcagacttggaatccgattcagttacagattgagattgagattgagatactcaggctctccgcctgggcttcaattctcctgcgggcgttatcagtggcctatggcgctttattggaattaccatggaagtgggaacttaatcgctgtgcaaatcgcttcgaaacagcgcagcacgcattttccccgacgtcttgcaaccttgggcgagtggcactgcgggcggtgggtggtgagcggttgggtgatctagagtgacgtaaatatttgtggtggacagtcaacattgaggtggcgctcttcaacgatgacgtagcttttgccacttctgtttactcgcacattatttcacacacttctccattgattttcgccgtgcagataacgaaatagtggactgattgttaactgtgtataaatgaaaatatgggtatgatatgtgtttatttacactttttttctgtgtacgagaatggttagattactccccttcctcgttttgagtcacccgctctctggccctcgccgctgtttgttttcttcgcgcgcgtgtttgctctcgccgtggggcgaaagcgcagcgataatagtggctcagatatagtgtatactatatgtatagtaaacctactcataccgaaaaccccatcgcacagatacggatacatttacagatacacgcgcgcactgcggaaggcctagatctaatggaaaacgctaaatgtttgtaaacagaccgggcacatttcttttcttttcttaattattttttgcatttcgcattttagttggcatggtcttctcacggcttctctctcttcacacatctttcttccgaaaatacactcacacacacgcacaccgaacgtagctttcacattttcattcatcgcaatcttcgccatgaagtgttgcaaaggccccaagataagatataggatgcacttggataccttaacctcacctttttgcgacaatagcacacgaataatccaattttttgtatgacgttgttgggcgaacaattttataagtcttggaaaggaatttctgtgctgtgttgatacacaaaacaacaaaataataaaaaattataaatggtattgaactactgtactagtgaatagtttgaaccagactttaaattaaaggcaattatgatgttgaaaatatttaagtacctttatgcatgcatatagttaaaatacaattttttagataacaaacaacatatgcgtttactgtcattaaaaaagggattataaaaccataaaaaaaggatttcgaaaaagtagtgttttttaatattgtatgatctttgaacgtttttttttttaattgttttattttcctaacttgcagtgcagtctcgtcgtgcgcccatcccaatcccatcagaccccacccggcgttggagtgcaagaataacatggatatagaagtcaagcataaagattagccgaatcctttgaattttaaattcaagatcctaatttaaattagctaagtagcatagcctagccaatagtccctagccagaggaacggttccaagccgcaagcactcgcgttcatagtcccgatcgaaattcaaacgaatcccaagggcaccaacagcgtgtagaaccgcagaagcacagcaaggaggaacatcatcatgacgactgacacccgccgacgcgtcaagctgtacgcgctgaatgcggaacggcaatgggatgatcgtggcactggccacgtgtcatccacctatgtggaaagactaaaaggtgggtttacgaaattaatgaagccttgcgaagtgatttaagtttcctattgctcactaacaacttacaggcatctcgcttttggtgcgagccgaatccgatggatctctacttttggagagcaagatacaaccggacaccgcataccagaagcaacaggatacgctgatcgtgtggtccgagggggataactttgatctggccctgagtttccaggaaaaggcgggctgcgacgaaatatgggaaaagatatgtcaggtaagcgtcgttgaataagcatatgcagttataaatgtgcttatctatatatcaatgaacttaaacaatttctatatggttttcacatcaattgccaactaaaacttttgcaggtgcaaggcaaggatccatctgtagaaataactcaagacatcgtcgaagagtctgaggatgagcggtttgaggacatgtcggatactgcgccacccattgagctaccaccctgcgagctttcccggctggaggacatctcggaaacgatacaaagctgtctctccacgccgctgcgaaaggaaaagttgtcgatggctctggagtcggagagctatatcaagaagctgctgaacttgttccacgtgtgtgaggacctggacaataccgagggcctgcatcacctttttgagatcttcaagaacatcttcttgctaaataagaacgcgctctttgagattatgtttgcggatgataccatctttgatgtggtcgggtgcctggagtacgatccgagtgtgtctcagcccaaaaagcatcgacagtatctgaagcagttagccaagttccgcgaggcagtgccgattaaaaacctggacctgctggctaagattcaccagacgttccgggtgcagtacatccaggacattatcctgcccacaccatcggtctttgtcgaagacaacatgctgaacaccctgtccagcttcatcttcttcaacaaggtggagattgtcacgatgatccaggacgacgagcggtatctcctggatgtgtttgctgttctcaccgatcccaccaccggagacgcgaaacgccgcgacacagttctcttcctcaaggagttctgcaactatgcccagaacctgcagccgcagggcaaggactcgttctacaaaactctcacctgcctaggcattctgcaggcgctggaactcactctcgtgatgaacgacaagaagaccaaatcggcctccatcgacatcctcacggccatcgtagagttctcgcctctggtagtgcgcaattacacgctcaaccaggccaatcggccagaagtggtaagttaacctggaatatgaagatagtctagatatgactatgatttacatgatttcttttttttttcacaccaggagcgtatgctactgaacattgccatcgaacaaatgctgaatgactcggagccggagcttggaattgcggtgcagctaatgggtatcgtcaagattctgttggagccggaaaacatgctcaccgagaagggcgattttctcaacttcttttacaaatacagtgtgcaaacgttagtgggtaagtgcgagtactctataccagcatattctagagactaactgcttaatgggttatagccccggtgatacttaacacgataggcgaccgtccgcaaaacgaggactatcagacggcccagctgctgggaatcgtcctggacattctttcgttctgcgtggaacaccacagttatcacattaaaaactttttgttgcaaaaggatctcctcaagcgaatactggtgctaatgaagagcacacatacgttccttgtcctcggcgctctgcgattactgcgcaagataattgcacttaaagatgagttttacaataggtaagcgtccccaaaaactcttatggttaaacaatataaccaacttaccttacttacagacacattgtcaagtgcaatctgtttgcgccggtggtagatgccttcattcgcaacaacggccgatacaaccttctggagtcagcaattctggagctgtttgagtttataaaactcgaggatatccgcactctgtgcgtttacttcgtggagaacttcagcaagatatttgatgaaatcgaatacgtgcagacatttaagtacttgaagaatcgctacgatcagtaccaggatcggcttaaggaccgcgacaagatggaaaaccgaactgacgggtaagttttgctgcagcgccttgtgctacaacacaatgtgaaaatatttggctgtattatcttaaagtggcctgcccatcatccgtagcggtggccggtttcgtcgggatcagcggcaaatggaggaggaagaggaaatgtggtttaacgaggaggacgatttcaccgaggaaatcgacacatacaacaatgtcatgaaatgttagtactaaattaatatcgttttagcattaccaaaccaaatatattgtggcgaatatctaagcaaaaaagctaatattcaaaaacattacattattatttatgtaccattgatgaattgtaaatatattccgatctcgacttgcagccgtcagcgaaaagaatggcccgcaaacgcaaaaccagcagaaatcctctccgccacacagcacgtcgccgcacagtggattgttgggaagcctgagcaccaccgcgtcatccactgccacatccgccacgtcaggtgcaccggtggccagcggcagcagtagccccgaggccatctccgccgacgagcagacgcaggcggcggtgcatttggctgccgctgcccttcagcaccaccagcaacagcaacagcagcagcagcagaacccattccagcaacagacacagcccgagatcgcggagctacaacagcagctgagcagcgtggaagcgcctcaaagccaggagttggagctgtcacaatcggccgccgccagtgcatcgcccacttcgtcatcctcgtctctggaagcctcgacgtcctcttcatcggcgtcatcgtcttcatcctcgtcgtcctcgtcctcgccgcccggctcatcggccgcagcatcgctatgcgattcggcgacagtagccgccgtggcagcatcacagtttctctcaacgatcgccacagccatggcggcctctgtgacggcggcggcggcaacaaacagctccccgagcatttcgccagctccagctgtgtccagtccggatatcgagaacgccgacgcccagttgccgcccagcgatgacgccagcagcccggccagtggggagcaagacgctaacagcacggaaggtaccagcagtgaggccgacaagacgacggccaaaaaggtaagttgtggaacccataaaatgggaatgtcatagtgttttctgtagtattacttgtgaattgtggattttatcttcaaaatgcgtgcttaaatatttctataatgaatcaatgtttaagttgtaaatataggagcattggcaaatatttaaataaaaagctaaaattccctcacaaacttgaagcaacaatatgcctgcatgtatgggtatacaattaccttctattctgtgacgattaaagtgcacgactattataagaagtttaagtagcgttacgtatgaataacaaatgtgtggatgcattaattatattattttcgttaccataaacagggtctggtggactatgagagtgattctggcgaagatgactacgaggaggatgagtactccgaggggccacaagcacaaaagcgcgcgcgtcaggcatagttggccgatgacgagcacagcggcatcaattataaattagtacacacataacagaatacaagaaaccacggcaaacaacaagcaacaaacaacacacagaccccacacaccaacaccaacgaatgttaggattgcattggcggcaacgacatacagcacagtaggcaagcaagcaaatagccgtacgatgtaagatcgaacaagaaagcataaatttaaattttagcataaaatttattttaaaggagaagcaaaaacacctaaagtaaacgagaaattataaatcttactttactaaattaaataactacatatagatatatatatatatattcaaatatatatgcatatgaaaacacagataactataactgatcagcatccacaagcagagatgtagttgagtgcgtgttgttggaaagttggcaaagcaaagcattaacgaaacaaaccaaaataaattgtatttagtagttaaatccccctctctccaaactgatatgaacagcagcagcagcgccagcgcaatggaggtgtggtcaggtggtgagggagatttgtatacagccagcgccagcacatccatttgcaatgtctatcgtatgagatcgtatgagttaacagatcctgtgaagttggctgctggcccagaatgtttgtgcaatactttcgtgtcgatatttaaataacaattgcaaaagggtgtatttagttctaaagcctagacttaaccatttttacgatccttctcaccattgagatggattttctgccaattgtactatcactatcacgatacagcgctgttttcacttgacaatttcattaaataattcttatcgcgaaagcattttatgaaagtttctattgcaagcagtgctgtaaatagatgtttttaattttaaaatttaaactattcccacagcagtaaaatgtttttttttccattaggattgcttctgttttttgtgtaattgcgattgttttctgaatatcaaccagattgccagggccaacttgacgaagtttgttagccggccccttgagttaaatgcagataacacttgaacccaatgaaccttgtatataatttagtcactctcaatgcgcgattagttgataactgcccttgcaccactgacgccgacattaaacgcatatatttgcacttggagatatcgaaatctttgcacattatcgtgctgttcgaaatccagagtcttgagatgtgttgtctgtgtaattgactgtgtaattacaaacaattgttgcgctatccttgcattattgaaacacacaaacaaaaacacaacacacatcaataaattattaatgataatgataacaaataggacgtaaagttaaactaatgtggggcaaacagacatcagcaagcagagataacaataaaataaagtcttaagtaaaatagtcttcttgagttttcgagtaagtttttttcgtatttaactataatattaatttgtatttaacgaatgtagtagggctcacttggaaccaatccaatccaattcaatccacactcata

SEQ ID NO: 42035 - DNA, 3843 bp, DROSOPHILA
caacgctctagcgtcggtccgcggaaaatagcgaaaattacaattatccgggaagatatattggtcgaaaactaactcgtgatcccccaataaatatgcgcaagagaaaattgtatataaactgatcgaatgcagccagcgtgctaagcactaaaagcgaaaaacgccagaaacagaaacaaggaattgcagctgcagtctcgtcgtgcgcccatcccaatcccatcagaccccacccggcgttggagtgcaagaataacatggatatagaagtcaagcataaagattagccgaatcctttgaattttaaattcaagatcctaatttaaattagctaagtagcatagcctagccaatagtccctagccagaggaacggttccaagccgcaagcactcgcgttcatagtcccgatcgaaattcaaacgaatcccaagggcaccaacagcgtgtagaaccgcagaagcacagcaaggaggaacatcatcatgacgactgacacccgccgacgcgtcaagctgtacgcgctgaatgcggaacggcaatgggatgatcgtggcactggccacgtgtcatccacctatgtggaaagactaaaaggcatctcgcttttggtgcgagccgaatccgatggatctctacttttggagagcaagatacaaccggacaccgcataccagaagcaacaggatacgctgatcgtgtggtccgagggggataactttgatctggccctgagtttccaggaaaaggcgggctgcgacgaaatatgggaaaagatatgtcaggtgcaaggcaaggatccatctgtagaaataactcaagacatcgtcgaagagtctgaggatgagcggtttgaggacatctgtctctccacgccgctgcgaaaggaaaagttgtcgatggctctggagtcggagagctatatcaagaagctgctgaacttgttccacgtgtgtgaggacctggacaataccgagggcctgcatcacctttttgagatcttcaagaacatcttcttgctaaataagaacgcgctctttgagattatgtttgcggatgataccatctttgatgtggtcgggtgcctggagtacgatccgagtgtgtctcagcccaaaaagcatcgacagtatctgaagcagttagccaagttccgcgaggcagtgccgattaaaaacctggacctgctggctaagattcaccagacgttccgggtgcagtacatccaggacattatcctgcccacaccatcggtctttgtcgaagacaacatgctgaacaccctgtccagcttcatcttcttcaacaaggtggagattgtcacgatgatccaggacgacgagcggtatctcctggatgtgtttgctgttctcaccgatcccaccaccggagacgcgaaacgccgcgacacagttctcttcctcaaggagttctgcaactatgcccagaacctgcagccgcagggcaaggactcgttctacaaaactctcacctgcctaggcattctgcaggcgctggaactcactctcgtgatgaacgacaagaagaccaaatcggcctccatcgacatcctcacggccatcgtagagttctcgcctctggtagtgcgcaattacacgctcaaccaggccaatcggccagaagtggagcgtatgctactgaacattgccatcgaacaaatgctgaatgactcggagccggagcttggaattgcggtgcagctaatgggtatcgtcaagattctgttggagccggaaaacatgctcaccgagaagggcgattttctcaacttcttttacaaatacagtgtgcaaacgttagtggccccggtgatacttaacacgataggcgaccgtccgcaaaacgaggactatcagacggcccagctgctgggaatcgtcctggacattctttcgttctgcgtggaacaccacagttatcacattaaaaactttttgttgcaaaaggatctcctcaagcgaatactggtgctaatgaagagcacacatacgttccttgtcctcggcgctctgcgattactgcgcaagataattgcacttaaagatgagttttacaatagacacattgtcaagtgcaatctgtttgcgccggtggtagatgccttcattcgcaacaacggccgatacaaccttctggagtcagcaattctggagctgtttgagtttataaaactcgaggatatccgcactctgtgcgtttacttcgtggagaacttcagcaagatatttgatgaaatcgaatacgtgcagacatttaagtacttgaagaatcgctacgatcagtaccaggatcggcttaaggaccgcgacaagatggaaaaccgaactgacggtggcctgcccatcatccgtagcggtggccggtttcgtcgggatcagcggcaaatggaggaggaagaggaaatgtggtttaacgaggaggacgatttcaccgaggaaatcgacacatacaacaatgtcatgaaatccgtcagcgaaaagaatggcccgcaaacgcaaaaccagcagaaatcctctccgccacacagcacgtcgccgcacagtggattgttgggaagcctgagcaccaccgcgtcatccactgccacatccgccacgtcaggtgcaccggtggccagcggcagcagtagccccgaggccatctccgccgacgagcagacgcaggcggcggtgcatttggctgccgctgcccttcagcaccaccagcaacagcaacagcagcagcagcagaacccattccagcaacagacacagcccgagatcgcggagctacaacagcagctgagcagcgtggaagcgcctcaaagccaggagttggagctgtcacaatcggccgccgccagtgcatcgcccacttcgtcatcctcgtctctggaagcctcgacgtcctcttcatcggcgtcatcgtcttcatcctcgtcgtcctcgtcctcgccgcccggctcatcggccgcagcatcgctatgcgattcggcgacagtagccgccgtggcagcatcacagtttctctcaacgatcgccacagccatggcggcctctgtgacggcggcggcggcaacaaacagctccccgagcatttcgccagctccagctgtgtccagtccggatatcgagaacgccgacgcccagttgccgcccagcgatgacgccagcagcccggccagtggggagcaagacgctaacagcacggaaggtaccagcagtgaggccgacaagacgacggccaaaaagggtctggtggactatgagagtgattctggcgaagatgactacgaggaggatgagtactccgaggggccacaagcacaaaagcgcgcgcgtcaggcatagttggccgatgacgagcacagcggcatcaattataaattagtacacacataacagaatacaagaaaccacggcaaacaacaagcaacaaacaacacacagaccccacacaccaacaccaacgaatgttaggattgcattggcggcaacgacatacagcacagtaggcaagcaagcaaatagccgtacgatgtaagatcgaacaagaaagcataaatttaaattttagcataaaatttattttaaaggagaagcaaaaacacctaaagtaaacgagaaattataaatcttactttactaaattaaataactacatatagatatatatatatatattcaaatatatatgcatatgaaaacacagataactataactgatcagcatccacaagcagagatgtagttgagtgcgtgttgttggaaagttggcaaagcaaagcattaacgaaacaaaccaaacagcgccagcgcaatggaggtgtggtcaggtggtg

SEQ ID NO: 42036 - protein, 954 aa, DROSOPHILA
MTTDTRRRVKLYALNAERQWDDRGTGHVSSTYVERLKGISLLVRAESDGSLLLESKIQPDTAYQKQQDTLIVWSEGDNFDLALSFQEKAGCDEIWEKICQVQGKDPSVEITQDIVEESEDERFEDICLSTPLRKEKLSMALESESYIKKLLNLFHVCEDLDNTEGLHHLFEIFKNIFLLNKNALFEIMFADDTIFDVVGCLEYDPSVSQPKKHRQYLKQLAKFREAVPIKNLDLLAKIHQTFRVQYIQDIILPTPSVFVEDNMLNTLSSFIFFNKVEIVTMIQDDERYLLDVFAVLTDPTTGDAKRRDTVLFLKEFCNYAQNLQPQGKDSFYKTLTCLGILQALELTLVMNDKKTKSASIDILTAIVEFSPLVVRNYTLNQANRPEVERMLLNIAIEQMLNDSEPELGIAVQLMGIVKILLEPENMLTEKGDFLNFFYKYSVQTLVAPVILNTIGDRPQNEDYQTAQLLGIVLDILSFCVEHHSYHIKNFLLQKDLLKRILVLMKSTHTFLVLGALRLLRKIIALKDEFYNRHIVKCNLFAPVVDAFIRNNGRYNLLESAILELFEFIKLEDIRTLCVYFVENFSKIFDEIEYVQTFKYLKNRYDQYQDRLKDRDKMENRTDGGLPIIRSGGRFRRDQRQMEEEEEMWFNEEDDFTEEIDTYNNVMKSVSEKNGPQTQNQQKSSPPHSTSPHSGLLGSLSTTASSTATSATSGAPVASGSSSPEAISADEQTQAAVHLAAAALQHHQQQQQQQQQNPFQQQTQPEIAELQQQLSSVEAPQSQELELSQSAAASASPTSSSSSLEASTSSSSASSSSSSSSSSSPPGSSAAASLCDSATVAAVAASQFLSTIATAMAASVTAAAATNSSPSISPAPAVSSPDIENADAQLPPSDDASSPASGEQDANSTEGTSSEADKTTAKKGLVDYESDSGEDDYEEDEYSEGPQAQKRARQA

SEQ ID NO: 42037 - DNA, 4697 bp, DROSOPHILA
cttaaatggtaaagatggcccatctcaatgctgtgatcttcgcttgtttactacattcactcacagctctttcggcgggcgaatcgggactgaccagattgaccaccacgatggcgcgtgcaggagcaagatccgtgatattagcgccaccgggtgaacggtcgctgtccaggtccaaagcggaggcgcggttcaccagctccggatctgtggtggcaatctcgctgtgatattggttgagcagcgtctggatctggttcatcagctccttgtggtcgttctgcaggcagatgatcgtctgtcgcgccaggcgcacctggtaaacgtcgatgtcgttgcgcggaaaaccctcggcgtccaccagtggtccactcatgcccacattgtcgttctggaaggaagatatcattatcaatgctatacagcataaacaaaagaatgtactcaaaatacaattgtgtatataccctacaccaaagcataggataatgctgtaatgcttgcccaagtggacataccctaaccaacagtagggtattgaatatatcaacatttggcttggcggtccgtccaagttgaagaacctgcgatcatgaatatccacggtggtgcgtcaccaacagcttgccacagtgtgcataccctatcccggatgcagggtatccccggatgagcaagcgaatttacttacggcggccaggatctgtccgtttctgttgatctgcgcctccagctgctttttagcgttaatcagacgctccaggcgctccttggtcgtcgtcccagcggccatgacttccacttcgattcgagttattccagcgttcgtcccgaaaaatacaaatttattatttttcgttaatgtttttttttttcagcagcgacagtagcaacaacaaccagtgctcgtgcagccctggttgcccgcgaccagtgtgaccgtattgcggcgaacttactttggccaaaaactaattgttaaacaatttttcggaaggggaaaagaacaaattgaacggcgagagtaaacacaggaattcacaaatttctatgagaaacagatcgcacgacggtgaaacgaaaggggggaacgcctttccagcggacatcgcagaatagacgacgggcgacgagggacctcgaaaaatcgcacggcaatcaattcgagtgtgtgcgaattgattacaaaaataaaggtatttcgagaggtgagcgataaaagcgcgtgtgtgcctggtgaggattaggtgtagccatgaactaaccaaacgttttgcagccacaggcaacacagggaccacaccgtccactcccatccgccggagtggggctgccacctgcgatatgtgatcattggggctccgcggaggtttatgcaatgttctagctctcggccagtcggaggtaaagcagccggtggagcagaagcaggaggggcaggagcaacaggccagatgactgtgaccaccatggaggcacaggtcaaggcagcacaccatcatcatctacatcatcccacgggcggaggggcccagcacaaggtggaggaggaggagccggatcctgttgaggacgagatgaccgtactgctggccaataagaactttcactatgacgtcgcctccgatctggacgacgacgcttttgtggagctcaaagaagacaccgcccaagcggatgatgcgggcgcgggcgttggcttctacaatccggatgaactgctgctcgatgaccagccacatccgcaagtcacgtggctggacgacgacgagatcgagacgctcgatcgcgtgacgctggacatgggtaatatgttcttcaatcgcgtcgacagccaggacatcatctatcagcagaaaaagaagagcattaagatggtgggcaagtacataatgggcgatgttctcggcgagggatcgtacggcaaggtgaaggaggccatgaactcggagaacctgtgccgcctggccgtcaagatcctgactaagcggaagttgcgccggattcccaacggcgaacagaacgtaacgcgcgagatcgccttgctgaagcagctgaagcatcgacatgtcgtggagctggtcgatgttttgtacaacgaggagaagcagaaaatgtacttggtcatggagtactgtgtcggcgggctgcaggagatgattgactatcagccagacaagcggatgccgctgtttcaggcgcacggttacttcaaacagctagtcgacggcctggagtacttgcacagctgccgggtcatccacaaggatatcaagccaggcaacctgctgctctccctggatcaaacgctgaagatatccgacttcggtgtggcggagcaactggatctgttcgcacctgacgacacatgcacgacgggccaaggttctccggccttccagccaccggagattgccaacggacacgagacgttcgccggcttcaaggtggacatctggtccagcggagtgactctgtaagccttccttgtataatatcatgtattaaatgtatatactgtactaatctaacggatttgcagctacaatttggccactggacagtatcccttcgagggcgacaatatctaccgactgctggagaacatcgggcgaggtcagtgggaggcgcccgcgtggctatacgaaatggacgcggactttgccaacctgattctcggcatgcttcaggctgatcccagtaaacgcctctctctgcaggaaatacgccacgacacgtaagtaggaatattccttgattgcacttcatgataactgattgttataatctgcttttagttggttccgatccgcaccggttaagaccggcccaccgatacccattccccccctgaagggtgacaaataccgcaactccacggtgataccttacttggaagcttaccactacggcacccaggaggaggatgtctactttacagaacacgacgtaaatcgtacgtaccaacatcaatctaatgccgagtgaactactttcatggttacctttacagaggagctcgcccgccaagcggcagctgctgcctccgaaattcgggccaaacagtcggcggcagccctagccgcctgccacacctacgaaccgccctccacaagtgccgcagccgccagcaattcgctgggcaacggtagcagagaggaggcgcccgtcaagaagaagggatcggcactgaagaggcgcgccaagaagctgacgtcctgcatctccgtgcgcaagctgagccactgccgaacttcgtaggcgccttagatgcctccactaaacatagatgctaagatttatcgaaaggaataactttgttaacaaattgtgagcaactttttggttttgttttcccgtttttattctgttgtcctacattcgccaagtatttgtaaccatagaatcatgtaggaaattcaggcgcaacctcgtaccgcccgagcagcaggagcagcagcggtcgcatcaacagcagcaacagcccgcatcagcggagttggctgtggaattggggagctatgggagcgacacgaaagctatatatccatgtgacaatactgtgtattatatgaaacaaatgaatgcgtaaattagtcgttaatatattatgatgtactgaaggcagccgaggattgccggaggagacggtgcccattggtgcgtcgcacacataaagaaatatgttcaagtgaaattgtttgttggcttcgttatattctaaactacacacgacgaatgatgcgattttcaggcgccgtcggtacaataactgctggacagtatttgcaaggcctaggttgagattttaatttttacaaaccaatgaaacgaaaataaaagaacccattgaatatcaaaatacaaacactgcatttagttcgcacatttcgcacattccaaattccacactcaacactcgcagacgctccattattccatgcacacacgctcatgctcacactacaacattaggctagctaactacgtttgcttaatctatttcaacgatctgcagccgggccgtcggatctggctctgagtcgccctccatcagctcgcccatgatgaacatctgatggtagtgggggcccagggtggacagcttacgctgcattaggtggcgcaacgggtccacatattgcggcggcaccttggccagctgtgtattcgtgttgcgccagtgcagcccgttgttgtccacgtgaaacagcgccggcgagggcacgtgatctttaagatagttccagatgcactcgcgcagcagcagggcaatctggaaatgtcatacattagttggtgctactacacagtttgggcaaataatggatctacctctgccgattcaaagtgctcgatgatgagatgcagattggtgagtggaggtggaattagttggctcatagccagcagttgcagcatcttcttggtgcacagcatcagctcatcgttcgcagcagtgggctggaatcgattgactgcaaacgtataatatgattaggcacctttatagaaaataagcaagtaaagtgacaagctcaccattcttgccccgccagtgatgcaagcaggtggcgcacagtgcgcgcagtagcacggaggaatagcaaagcgccggcctatgaccggcgatcagtcccaaaacagcccacagcactggggagttgatgaacgctctcctgattagcatgtcccgc

SEQ ID NO: 42038 - DNA, 2442 bp, DROSOPHILA
aaaagaacaaattgaacggcgagagtaaacacaggaattcacaaatttctatgagaaacagatcgcacgacggtgaaacgaaaggggggaacgcctttccagcggacatcgcagaatagacgacgggcgacgagggacctcgaaaaatcgcacggcaatcaattcgagtgtgtgcgaattgattacaaaaataaaggtatttcgagagccacaggcaacacagggaccacaccgtccactcccatccgccggagtggggctgccacctgcgatatgtgatcattggggctccgcggaggtttatgcaatgttctagctctcggccagtcggaggtaaagcagccggtggagcagaagcaggaggggcaggagcaacaggccagatgactgtgaccaccatggaggcacaggtcaaggcagcacaccatcatcatctacatcatcccacgggcggaggggcccagcacaaggtggaggaggaggagccggatcctgttgaggacgagatgaccgtactgctggccaataagaactttcactatgacgtcgcctccgatctggacgacgacgcttttgtggagctcaaagaagacaccgcccaagcggatgatgcgggcgcgggcgttggcttctacaatccggatgaactgctgctcgatgaccagccacatccgcaagtcacgtggctggacgacgacgagatcgagacgctcgatcgcgtgacgctggacatgggtaatatgttcttcaatcgcgtcgacagccaggacatcatctatcagcagaaaaagaagagcattaagatggtgggcaagtacataatgggcgatgttctcggcgagggatcgtacggcaaggtgaaggaggccatgaactcggagaacctgtgccgcctggccgtcaagatcctgactaagcggaagttgcgccggattcccaacggcgaacagaacgtaacgcgcgagatcgccttgctgaagcagctgaagcatcgacatgtcgtggagctggtcgatgttttgtacaacgaggagaagcagaaaatgtacttggtcatggagtactgtgtcggcgggctgcaggagatgattgactatcagccagacaagcggatgccgctgtttcaggcgcacggttacttcaaacagctagtcgacggcctggagtacttgcacagctgccgggtcatccacaaggatatcaagccaggcaacctgctgctctccctggatcaaacgctgaagatatccgacttcggtgtggcggagcaactggatctgttcgcacctgacgacacatgcacgacgggccaaggttctccggccttccagccaccggagattgccaacggacacgagacgttcgccggcttcaaggtggacatctggtccagcggagtgactctctacaatttggccactggacagtatcccttcgagggcgacaatatctaccgactgctggagaacatcgggcgaggtcagtgggaggcgcccgcgtggctatacgaaatggacgcggactttgccaacctgattctcggcatgcttcaggctgatcccagtaaacgcctctctctgcaggaaatacgccacgacacttggttccgatccgcaccggttaagaccggcccaccgatacccattccccccctgaagggtgacaaataccgcaactccacggtgataccttacttggaagcttaccactacggcacccaggaggaggatgtctactttacagaacacgacgtaaatcaggagctcgcccgccaagcggcagctgctgcctccgaaattcgggccaaacagtcggcggcagccctagccgcctgccacacctacgaaccgccctccacaagtgccgcagccgccagcaattcgctgggcaacggtagcagagaggaggcgcccgtcaagaagaagggatcggcactgaagaggcgcgccaagaagctgacgtcctgcatctccgtgcgcaagctgagccactgccgaacttcgtaggcgccttagatgcctccactaaacatagatgctaagatttatcgaaaggaataactttgttaacaaattgtgagcaactttttggttttgttttcccgtttttattctgttgtcctacattcgccaagtatttgtaaccatagaatcatgtaggaaattcaggcgcaacctcgtaccgcccgagcagcaggagcagcagcggtcgcatcaacagcagcaacagcccgcatcagcggagttggctgtggaattggggagctatgggagcgacacgaaagctatatatccatgtgacaatactgtgtattatatgaaacaaatgaatgcgtaaattagtcgttaatatattatgatgtactgaaggcagccgaggattgccggaggagacggtgcccattggtgcgtcgcacacataaagaaatatgttcaagtgaaa

SEQ ID NO: 42039 - protein, 540 aa, DROSOPHILA
MTVTTMEAQVKAAHHHHLHHPTGGGAQHKVEEEEPDPVEDEMTVLLANKNFHYDVASDLDDDAFVELKEDTAQADDAGAGVGFYNPDELLLDDQPHPQVTWLDDDEIETLDRVTLDMGNMFFNRVDSQDIIYQQKKKSIKMVGKYIMGDVLGEGSYGKVKEAMNSENLCRLAVKILTKRKLRRIPNGEQNVTREIALLKQLKHRHVVELVDVLYNEEKQKMYLVMEYCVGGLQEMIDYQPDKRMPLFQAHGYFKQLVDGLEYLHSCRVIHKDIKPGNLLLSLDQTLKISDFGVAEQLDLFAPDDTCTTGQGSPAFQPPEIANGHETFAGFKVDIWSSGVTLYNLATGQYPFEGDNIYRLLENIGRGQWEAPAWLYEMDADFANLILGMLQADPSKRLSLQEIRHDTWFRSAPVKTGPPIPIPPLKGDKYRNSTVIPYLEAYHYGTQEEDVYFTEHDVNQELARQAAAAASEIRAKQSAAALAACHTYEPPSTSAAAASNSLGNGSREEAPVKKKGSALKRRAKKLTSCISVRKLSHCRTS

SEQ ID NO: 42040 - DNA, 3327 bp, DROSOPHILA; identical to SEQ ID NO: 19924

SEQ ID NO: 42041 - DNA, 667 bp, DROSOPHILA
aaagagctctgctcagcactccttgtagatacccatcgcaggacaaaggcaaagctcgaaacgcttctggcagcattttcaaaggataaaaaggaattctcacaaaaacccaggaaagatgcatgccagatttgcggatcccgagccagcgtctccggacagcgttgatggaatcgaaacggagtcactggaggcgcggattgaggccttcaagcaaaatccccagaacatggccgcgttgcgggaggcgctcgacgatgtgctcctgcgggctgagacggaggcgaacaggcgggcagttgagagccagaaatcgcaacagggcaaggaaaaacgaccgagtttcgccataccagattttaagaacggcaaggtggtgaatcgcgctcgaggattcgtggtgcggatcttcgatgccatatgcaattgcgccaacaacaatgcggcggcggccacgacgcgtttcaagctgagaagcaacagcggcggagggggaggcggcggaggtggtggtggcggagccagcggaaatggcaagcgtcagcagtcgcagaatgagccggaaaccctagtcctgaccaagaagaagcccgccggcgaaggcaagaaaaagaagggagtcagcatggccgatgacgttcaagccggcgttcgactgatggactaa

SEQ ID NO: 42042 - protein, 182 aa, DROSOPHILA
MHARFADPEPASPDSVDGIETESLEARIEAFKQNPQNMAALREALDDVLLRAETEANRRAVESQKSQQGKEKRPSFAIPDFKNGKVVNRARGFVVRIFDAICNCANNNAAAATTRFKLRSNSGGGGGGGGGGGGASGNGKRQQSQNEPETLVLTKKKPAGEGKKKKGVSMADDVQAGVRLMD

SEQ ID NO: 42043 - DNA, 13103 bp, DROSOPHILA
ttcaatgtagagcaaaaaacttcgcacataatacgcatgtatctatggatcaattcaacgctgattgttcgaaaactgtttgataacgagggccctttggattacattgcgaatagaccgatgagtgtctgttctgtaggagaaacatattcatgcaacccagtatttggggccaaggcaataaagtgagccggtttgtgtactgaaagaaacataaaaaaaacttgtgcatttttttgtcacgaggggggtgcaatgaaactcagtggcgatttgaattgttttatctatttattgtttgttgcctttgtaacggttgcctatacacaatgttcttttctaatatacaaaaagccatttaacagctatctcttttaactatttacaaattttattactcttttttttacaagtagcaaactaaaaagctacaaaaattacgtactaccttgtttttttttatatttaatttacacgttgcggttaccatttaaaatgtctgtcctacgattggtaagcttaaattggggcgcttggaggtctttgaatacacaatttgtaatttgtaattgaattgcaatatctacaaaaatgttgattttcattagcatgtaatcaggcactagctagacaatattttcctttaattgcagctatttgcagctatcctgttctctttaagataaaaatgtcttaaaatgcaatttgaaaagattattgttccaagttatcttataacacttttggacctgcattaatgttggtttatagtttttgtttaacttttctgtttaagcattttgaactttgcatcagtttaagttctttgattaattagttgtttaaagatctcgtttacttttgcaaatctattcaatttttaagtaccaatttttgtttctcacttctctagtagcagctgaaaaatgatcgcagaacatagctaatcattagatattatctggcaattataactataatgtctattatgtcagtgttctttttttttttatcaatgtttatgttatgttgcacaattattgccctgattatttggcacttttcattaggcgactgctggcaaaacattcgccaaagaagcgatccaatgaatgatacaaatggggtcgcacattggacagtccatgatcctcgtcagcgtagctctaaaagattacaaaattgtaacgaaaaatccttttgagactagctctttagtcttatactcacaatctgcttgaagagaatatcttgacgctccagattcttggccaatatcatggcctgctggtagtgcacattatcatccagtgtgccatgtaccagaaggtacttcttacccctcagcttcacggccattgtgctcagtctagagttggcatagcccagctcattcgtgttgggaagacccatatagcgctctgtgtaaatggagtctgttgagaaagtatacacttttagttaagtcaaatgtttaagggttgcgttagacccaccatagtaagcccaatccgtgactggagctatcgaggctgcacacttgaacaccttggcttcatcattggccagagccatggcagccgcgtagccaccatatgaccagccccaaatgccaacgtgatcgggatcaatgtagttaaacagcgtagagagttttctaaaaaaaaaggtggcaagttcaaataataattagtctttttgttaaaggttttttttttttgcattttccaattacttactgagttacgttgatctgatcgctgatctccacggtgcccaactttaagtagatggcatggagtagactctctccacggagtccggagccacgaccatcgatcttggcatagatcacagactgattggagctcaaatatgtgccccagtccaccatccatttgttggtaacctaaaatatttttaattttttaatgctagcaaacttcttagaactctagctgaacttacagaataggaatctgggccaccatagacatccacgagcatgggatacttggttgcgccacttgtgtccaagttgggcggcagctggaggagcacctttgcctgaaagccgccgtcaatgtctacggttagaattttgtgggaaggtagagccacgcccttcagtttggcacgcaggctttcattggtttcccagtcgaggactttagagatgacaacttgagctaaacaacaagattaaatataaatattaaaaaataagaaataaattattattaaatgtagttttgtacttacagttctcatatttccactcgtatatatgggttgtgggtattccaggtcccagagaggtgatcacaatgtggttattgtcgttgaaagtggccgagaagtaggtctgttgcacatccccggacttgataaggttgcacgtgaggcacttgggactctgcttggccagtgcccgaatggcgtacagatgcagctgctcgggatgatcctctgtgttggccgtgtagaatatgatgtcgttctttccgtcccagtggaggatgctgtccaccacatacttgccctcggtcaggggctccagtgcttgtggctcggaactggccaccgtggagctcaggagctggacgtgcttatagttgttgtgcggcaggacgaaggccagacgggatccattgcggttacggaacggagcggtatagagatcaacccaaccggtcttcgattcggcactataaatctgcggagcaaaaaagatattattttaattaatttagactattatttacaatacttcaacattgtactatttactttatcagtaattatacttttttatattatataatactttacttaccactttcctgttgagtccgtcgaaggtgacgacataggcggcattttgaatgcggttcatccagatggacagaacgttgtcatcgtccacccaactgaccacggtgacaatgtagtccgtttccgtgttgagggccgacggaaccggcatcacggtcacgaaatctccaccagcaacggctctctttagatcgaccatcaccagttccacccgcggattcgaggaaccagcctttggataggcgatgacctgatgcagtggatactgatagcgcaaatcgccggcatctccgtagtaggggaaattgatcaggtgagtggacgaatcgtcgaacttgatgaaggccaattgggtgcccgatgggttgaaccaggtggccacattggagctgaatacctcttcctcgtacacccaatcgggaatgccattcagtatacccgcttgttcatcgctagtgagggcaatctcctgcgccaatgcactctccttgtagtacagattccgatcgtaattgatcacaagggcatttcccaccggtgaccattggaccatgctcaggtagtgctgctcgttttggatggtcaactggatgaattcttttgtgttcagattgtacagatcgtactcagctagaaagctgtaccggaagttcttcttgtagttctttgccagcaaaaggaactccccatcggcggacttttcgtacaggacataatgttgcgcatcttccagcaggatggaacgttcacccgtcttggcatcgaactccatgatggactgtatttaatattgagataataatatcaatgttatcacttatacaacttgtaccctttttaatgactgttcgaatgttaaacctaccgtattctccttgtaaatgagactgtttccattgctccagctgccgttgaatcgcttggcatatagttgaccacttagcacatcctccaaatcgatggcattgtttgagtttgagtcagagtcgtcggcatccttttcatccgtccggagaatgaaaaccagggccgtggccaatagagcaaccgctatgaccgtggttacaacagtcaggatgattcgcacccggcgcttcttctccttggtatgcattagattctatataaaacaaaaatattaaaattattaatatcatatttatcagaaggtggtattattcaaaattataatttataataataattataatttctcaaagggaacaagtaagtttcctgcttttggggatcgaatcataattgaatttacgttgaccctttccacaagttttaatcaacatccaagtttaacacaacaaatttgaaagtaacataattaaagtacatttacatacaaagggaatgcactttcgaaatgttaacccatgagttcgttaacccctttctccatgccgggaaattggatcctattttaaatggcccaccattcctcgttttccattcacatttctatgtaatcagccacatttcttctgcgctgaccaaaaagcgcaacttggccagcccagaaaatagggcttgaacgaaatgcgcactttggccaatttgggtacaatcttttgccaaatcagcggctccaggcacgtacatatatgcttatatacttcgcttgatgaggaaagtgacgttgcgcatgcgcaatgactttttctttctcattcatacccattcactcaacgtgtttccactcaaatcgctcgaaagcaaagcaaaatgcatacgatatgaaagaagatattggggatagagttatgtatatatatacattttatagggagagggacggcagccaaatgagtgcgcaaagtgtagagagaaaatgaaagtagttttttgttaaccagctttagactgggtcgacgataactggtttatgctctggtcagtatactgagtatatatataatatatacatatatacactcaggttggataggtgttaaaaggggggaaaggggatacccagtggctcgggcaattgctgcgtgacgtaagtgaaataaacccacttatggctttttttcgtatcgagtatattttgttggatttgtctgcggtgtttcgcctatttgtatcttttacataattttacattacgcgactaagtaattgctgttgtccacacccaaaaaaagacaaagaaattcagcgcttttgtttcagttttccacttacatattcagatagacttcgatgcgataattgagctgttgaaatgtattattagacgaaatgcttatgcattttatttatttatgttttccttttttttcgccgaatcatgtcaacagatttgcggtatgactgtttcttgtcatgacttaatgggatttattggttcgagctgaaggttggtgaatgacaaccatagttcaattgtgggtatgtattttgtcgttttgcttcattccctgcttattcaataaatatagtaccaactcaattcatataggtgaaataaaatcaataacaatactattcggaaatcgaaaaaaaagggggcttataaaatggatctgtaatttaatatatcattgtcatcatatctcagaaaactctaaaattcttaatataaatcgttttagatgaacattattattctaacctgcacagtagatgctagttgttggcgtggccaacactaataatagtatcatattgaacacagaaccagaattttggaaactccactcattatataacaagcacgactgcacctttggcattcacacattttcagatgtatatacgtacatatacactctgcatacatttaatacctgcactttgtggaagctttgcgaaaatccacgaccaaaatggcaaaagccaaaggatagagtcgaaattgttctcgttttttttcggaaatcaacgacacgtgtaggggattccccgctgaccacgtagccaatccccaaatctctgggataatatatagccctatggaggcacaactggcaacgtcaaagacatgttagttagaagtttgcagcattttatatgcttccgcatggcatacgtacatagaatttatggttcctcttggatttcattgcgatgggaatttgggtttgtgaatcagcaagtttattcaaattgcaagtggatttttgttatgccaattcgttaattagttttatttgttttgtctatgtgaagtttgtaaactagaagcactttgaaaagtatgcataataactaaggaaataaattaagtttacattacatatacatatacatatgtacttaacgtaagataaaatctggtgatacaacttaaaaaattcttaaataaataaatataaacttaactaattacaaataaaatatacacatatcgttatcattgtgaacgtaaatcaactagtgtatattcactcatcctaaaggattcccgagagatcacttcatcttcgacataaataaagacatcctgatacgcctggttccgttcataaaattgtatccatcggagcaacgcttggccaactccaatcatatcgatgaccaatccgaatttctttcggcttgattgtttggggatttcccattgaattcgatgcacaatgtggcgcaattagtttgctacctgtactcaactcacactccacttcccagacttcgtcgattcattaaataaatatgaaactaaaaggtttttgagagtacagttctcgcttgatcccttagcggaacactaatcgtttgctggacttccggcaattggttgcagtttttaccagccaagtgcaacgggggctttttcattcgtattgcaccacatgtcgtatacttgttaagcttcgctttttgtttagcctcttatattggcatgtttctgtcaggacataatcgccatgacgtgagaggcttgacaacaattcaaggactacattccaatccccttagacaggacaacacagaaaaaattgatgaccccttgtctggctgagtttttcctgccttttggtttgttgttcgtttggcttttcattaaactggcacaaaattaattaatttgccttgtcatgggtgtgttttagtcctttgggcttccgttttttcctactttttattctgctaattgtgcacacatttaagcgtgtttaactaatgagacacacatcgtaagttgaacttgggtgctaaacataattacttggttctagaagacattgaggttagttagtgattaaggcatgcgagagcggaaagtcatgtatttaatatagtagcattgaaaaggaataaatggatggaagctttataaaggttttcatagaagttaaaagattaattcaatttaaatttcctaagcagatcccttcaatgttgaacatatattattatgaatatacataattcacttgaaatttatgtcaatttgaattgaaattgctctgctatcatatgtactacacagcaccatattgtattgactaccatcagtctgtccttcattgaccacctgttgatggcaaaccacagagagatctcccactcccatcgaaccacaaacgctcccacagtttcgattgatgtattagctgctcatttctccattcatcttgtgtttatcagaatgggccattgtggtcaatcagcggctcattttcgcactcatgaacaaatcaatttaattactgagctcgctgggcattcaaacacatcgccaaatgttcgtccattgtcagtgctttgcgcttgtgtttgcgttagagttgacagtttggatgtataagctcaattgttggaatattttgttaaacaaatgctttagtttttagtaattgtagtttggtagtcactgggtgaaaactaatcaaaacaaccaagttgatgttggaaatgaagtagttcgaactataaataattatttatttttgagaaagattaaagacgtacttaactctttttcaaatatcaattctacaatattcaatgatcaaaatcttaaatgtttgttaataacaataaatacaactaattggatagatggtaaatgcccagctcacttagaacactttggagcagaaaccacaatttggtccacttttgtgcctcctttatgccttaccatgcgccaagagcattctgtgtcttggaaatctggtcatctctgtttccctgtcttaccttgaaccgcgacatgccctccccgaagctgccggcactggtcccgtcgtcgtcctccagactgctcccgccgcccagcatggattcgtgcagcttggcgctcgaacgtcgccccaccgcagccttgtagtagtagggcggatgctggtggcgtcccacgcctccgcccccagccacgcccacattggcggcggtattgctggcggtggcggtggcgatgactgagtcctcgtagcccatcagttcgatggacggatgttcgcatttgcagcggtgcggcggtgtgcgatgtccatgctggtggtgcggatgcggatgtggatggatgtgggagtgaagggagtgcggatgttgctggtgttgctgctgctgtctgttgctgccattgtggtggctgtgactgttgctgccactttgatggggcggttgtggtggcggcggtatgtctgcgggtgttatatagattttgccacccagattttcgccacccgtctgcttgctgggccaatggaactcatcgaattcgctggagctgttggtcagttgatgttgcagctgctgatgctgctgctgctcccattgcaattgtctttgctgctgtcgcaggcagctctgttgttgttggtggtgatgctgatgttgctgctgctgttgcttgtggaagcgataatattgatgatgtgcagctgcattggcagtggttggcagatgaaacttgttgtttttttgttttttttttattttttatttttcggcggggagaaaaggaacacacacataaaattggtttgtggacagcatcctgttaaatcgctttccccgcagggatactccatatggtggacatgggtggtcgtgtgcttgtgtgggtggttgtaaggctcaaagcaacggcaaaaacaaattgtggcggcaacaaaggggcaagcggtaactacaagacggaacacaacacaaaggatacaaaacaacgtggtagatttattttccaacctctgaactgcagcataatataaaagggattttaataggattgcaagtacgactccggagagttctaaaagcaatttttattttagaaaataaagtgaagtattgagttatcgtaaaaacaaaagaaacgctgagaagaaaaagcttatcagcaaatatttatgtaagcttctattaaaacgattttataagtggaacagacattgtagtatatttaacttcaaatcattgtgtcaacgtaataagaacaactacattacttttaacttaaaaaaagtttaacaaatttcataaaaatatttcttaggaatagtatacatgaaacaatgttttccataactatctaaaaataaatgttatacaatagttcttaaaaactagttaatatctcttctggtaaaacatgcaagaaagtaaaacttgtttttaatgcatgataataatcgttgaggacttggtacaactaaacttaggtagtgaacacaaagtttggccaactgctttggttcacccaacatttttacctcaacaaattagatcaacagcaattcttaaatcccccatcgggaaaaccacgaaaactaagttatgaaatgaaatttgcgccaaagtcgggttaaagtaaataacaaagtcaaacttgaacgagccaaaaactatggcagtgcggtccaaaaagaaataccataccaaaaatccatataaaacgaaatggagggaaaaaaaccaaaaaaaaaaaaccaaagaaaaatggaccgagtgagattttgcgccaaatacattagctcgatttggtttggcgagtcctgtgctcaccgcaattatttaattacactatagcgctacgtaaaccaacctatcgcccccgaaccaccccaccccgcatcatcctttcggttcctcggcaactcccgccggattttgggtttaatcaaagagccaaccaagtcaagctcaacacaaagaccggtccgaacggttgaacgaaacttttgttgcaacttttcggtgcagccaagcaaatcgaggcgcgacctctgaaccctgccatgcgggagggggttacggggatacgtgcaggatagtgtaagggttgaggtggccaggggacaatgaagaggagcccacatgcaggcgaccccactttacttacgctcagaccccgaccgattcgtatcactaatgatgatcaaataacgaccaaatgtcgaccgcctcgctctcaaacacatcgacacacagagaaattaagttaataagtacaaaaaaaaagtgtaacaatttataaataaagtgtttggaattagtttatatagttgtctttctttcaagaaactaaaaatgcttacaaatacagctctttggaaaacaattttaataaatatacaagtttattttcagaatcttctataaacggaaaagttatacgttggttggactttctttagtcggaatgttattagcttttctcgcagtgtatcttcccatagacgcagacaaagcggacacaaaatcgttagcccacttggcagggcaccagcaaaatttttgcacactcgccctttaactgtgtcacggcttctttcccattccccagttatctccagttggccagcctccgacctccggcccacaatcttccgatgtcgtctggcgtaatgagcagtctttgggttctctttccgggggcgaaagagttagaaaggggcaaaaaggaggggctgggatgtacacaaatgatatgtaaataccaaacaatttgccatgagctcgctggctggctggctggctgtatgctttgaggttcctatttgattagtgcttgatcagtgtgccaaaaagtaggcaacgatggcttgatttttggcagctcatctgaaggatactggaaacatggtaacgaatcatgttaattggcgctggcagcgccaaaaacttgtcataaccaatatgtaattgagttgccgacaaaagggacacaaggtcgtgaaatttttttgctcgtatccacgattcgttaaatacacatatatgtttgttcaaccaactaacaatattaataagttttatttaattaaaatttgattttaccattaaactcctttcataactccatacacggtttgtacaaatttaacgcatgctatttttaacagaacaatttaatgaaatataaataaagtaaataaacagattaaagatcttttacaaaaccttaaaaccagttaagctgactcaatttttttttctaaaaaccttcttgaattttatccattctcatttcccatgagaaatatataactcctttaagctggtcccatgaaaacattttcaactggaatactaaatctagaatgcgtagccataataaattatttttctttgacacaaaaacccacagcccatcaagtatgggcatgtgcgtacgtgtgccagacacctaaatgtaagcaataaaatttcaacaaaataaccaaatgcataaatatgttttaagtgctatgtgaataaagccctgaattgccttaaatatgcccataatgtatgcaaaaataagaaaaaaaaaaccaacgggcacacatagaaaaatcattgttggaaaaaaatgaatattcaaacagaacgggagtgtggtatcacctaaccacttatggtgccctcatccttcttgaaagggcaactataaaatatgcagcacaaacaatggtttttggaaaatatccggaacaaaatgcaaccgaaaatcggtctgcaaaaatcatagcaaatataaaccgtgccagcaatcaaacagtgaatatgtaaacaaaagttgatacttaaatggcgtgggatcaaagggtttcattaccattactgtattcatagcggtgatggctttaaatgcatgcaatatttttcgtataaataatgtgtggtggtattgtggctatttgtttggggaaacaatcttttttttgggggggcggtattatattaatgtagagataaaatatgccagagttgtgtagattacatacctgatcgctctgtgctgtttcagtcaccgaaacatcattaccagacattttatcggattttaattacttagcttcccgcgcttaactttgcagctgcatcaaaaaagggtataaagttgattttatttatatagaaatatatattgtttggtatttcattcagtttccagttcggcaattctcgttttgcattccacgtacatttcttcggaattttttctgacattttagcaatgatttattgcatacattttatttgcatttcacatgcttttccaaaatgttcccatctggatggaaacgttttcacttcgtcgtagatttttcggggcgttttaattgatgcctggatttattacaatacgttctttttcttcatatttttggttataacatacatatgtgttttagaaattattggtttaaatttgttgccaagctatttttgatttagttttacgagtgaaaatgttcatataacaggcagtttcgcttggtcaatatatttgatatgtttttcattcttttatgccacacgttcttcaagggcgcgagtaattttaatttaactgctgcctgtcacttaatgcaaattaaacaatttaaatgagcaaacaaacaaaccaagaaaatcgcaattgagaaaggaacgaagacacaccaagaagtttttgtggcagccacacagacagccaaacgtcgcattgcacataactcgtaactcatacgccccgttgtacaatgagaatggccgcgtttataaacgtttgtttgcctgtttgtttgtttgtttgtcggttggtttgtttgcccgcctgactgcggtttttcaattgtcagtgccaaagcgagccaagcgaacccaagagcccagagaatggaggaaaaagttgaaaaaagtaaaataaataagaaataccaaataaattgaattgcgtagccgactataaagagacagccaacgtaggtgagtggagcaaagccaactggaagcgaagataaaagcacagcatccccaatggcaaatggtaacgaaacgaacaaaaaaaaaaaacgagtcaacaaaaacagaacaggacacacagctaaacaaca

SEQ ID NO: 42044 - DNA, 2505 bp, DROSOPHILA
agctgcaaagttaagcgcgggaagctaagtaattaaaatccgataaaatgtctggtaatgatgtttcggtgactgaaacagcacagagcgatcagaatctaatgcataccaaggagaagaagcgccgggtgcgaatcatcctgactgttgtaaccacggtcatagcggttgctctattggccacggccctggttttcattctccggacggatgaaaaggatgccgacgactctgactcaaactcaaacaatgccatcgatttggaggatgtgctaagtggtcaactatatgccaagcgattcaacggcagctggagcaatggaaacagtctcatttacaaggagaatacgtccatcatggagttcgatgccaagacgggtgaacgttccatcctgctggaagatgcgcaacattatgtcctgtacgaaaagtccgccgatggggagttccttttgctggcaaagaactacaagaagaacttccggtacagctttctagctgagtacgatctgtacaatctgaacacaaaagaattcatccagttgaccatccaaaacgagcagcactacctgagcatggtccaatggtcaccggtgggaaatgcccttgtgatcaattacgatcggaatctgtactacaaggagagtgcattggcgcaggagattgccctcactagcgatgaacaagcgggtatactgaatggcattcccgattgggtgtacgaggaagaggtattcagctccaatgtggccacctggttcaacccatcgggcacccaattggccttcatcaagttcgacgattcgtccactcacctgatcaatttcccctactacggagatgccggcgatttgcgctatcagtatccactgcatcaggtcatcgcctatccaaaggctggttcctcgaatccgcgggtggaactggtgatggtcgatctaaagagagccgttgctggtggagatttcgtgaccgtgatgccggttccgtcggccctcaacacggaaacggactacattgtcaccgtggtcagttgggtggacgatgacaacgttctgtccatctggatgaaccgcattcaaaatgccgcctatgtcgtcaccttcgacggactcaacaggaaagtgatttatagtgccgaatcgaagaccggttgggttgatctctataccgctccgttccgtaaccgcaatggatcccgtctggccttcgtcctgccgcacaacaactataagcacgtccagctcctgagctccacggtggccagttccgagccacaagcactggagcccctgaccgagggcaagtatgtggtggacagcatcctccactgggacggaaagaacgacatcatattctacacggccaacacagaggatcatcccgagcagctgcatctgtacgccattcgggcactggccaagcagagtcccaagtgcctcacgtgcaaccttatcaagtccggggatgtgcaacagacctacttctcggccactttcaacgacaataaccacattgtgatcacctctctgggacctggaatacccacaacccatatatacgagtggaaatatgagaactctcaagttgtcatctctaaagtcctcgactgggaaaccaatgaaagcctgcgtgccaaactgaagggcgtggctctaccttcccacaaaattctaaccgtagacattgacggcggctttcaggcaaaggtgctcctccagctgccgcccaacttggacacaagtggcgcaaccaagtatcccatgctcgtggatgtctatggtggcccagattcctattctgttaccaacaaatggatggtggactggggcacatatttgagctccaatcagtctgtgatctatgccaagatcgatggtcgtggctccggactccgtggagagagtctactccatgccatctacttaaagttgggcaccgtggagatcagcgatcagatcaacgtaactcaaaaactctctacgctgtttaactacattgatcccgatcacgttggcatttggggctggtcatatggtggctacgcggctgccatggctctggccaatgatgaagccaaggtgttcaagtgtgcagcctcgatagctccagtcacggattgggcttactatgactccatttacacagagcgctatatgggtcttcccaacacgaatgagctgggctatgccaactctagactgagcacaatggccgtgaagctgaggggtaagaagtaccttctggtacatggcacactggatgataatgtgcactaccagcaggccatgatattggccaagaatctggagcgtcaagatattctcttcaagcagattagctacgctgacgaggatcatggactgtccaatgtgcgaccccatttgtatcattcattggatcgcttctttggcgaatgttttgccagcagtcgcctaatgaaaagtgccaaataatcagggcaataattgtgcaacataacataaacattgataaaaaaaaaaa

SEQ ID NO: 42045 - protein, 802 aa, DROSOPHILA
MSGNDVSVTETAQSDQNLMHTKEKKRRVRIILTVVTTVIAVALLATALVFILRTDEKDADDSDSNSNNAIDLEDVLSGQLYAKRFNGSWSNGNSLIYKENTSIMEFDAKTGERSILLEDAQHYVLYEKSADGEFLLLAKNYKKNFRYSFLAEYDLYNLNTKEFIQLTIQNEQHYLSMVQWSPVGNALVINYDRNLYYKESALAQEIALTSDEQAGILNGIPDWVYEEEVFSSNVATWFNPSGTQLAFIKFDDSSTHLINFPYYGDAGDLRYQYPLHQVIAYPKAGSSNPRVELVMVDLKRAVAGGDFVTVMPVPSALNTETDYIVTVVSWVDDDNVLSIWMNRIQNAAYVVTFDGLNRKVIYSAESKTGWVDLYTAPFRNRNGSRLAFVLPHNNYKHVQLLSSTVASSEPQALEPLTEGKYVVDSILHWDGKNDIIFYTANTEDHPEQLHLYAIRALAKQSPKCLTCNLIKSGDVQQTYFSATFNDNNHIVITSLGPGIPTTHIYEWKYENSQVVISKVLDWETNESLRAKLKGVALPSHKILTVDIDGGFQAKVLLQLPPNLDTSGATKYPMLVDVYGGPDSYSVTNKWMVDWGTYLSSNQSVIYAKIDGRGSGLRGESLLHAIYLKLGTVEISDQINVTQKLSTLFNYIDPDHVGIWGWSYGGYAAAMALANDEAKVFKCAASIAPVTDWAYYDSIYTERYMGLPNTNELGYANSRLSTMAVKLRGKKYLLVHGTLDDNVHYQQAMILAKNLERQDILFKQISYADEDHGLSNVRPHLYHSLDRFFGECFASSRLMKSAK

SEQ ID NO: 42046 - DNA, 4037 bp, DROSOPHILA
tgaccacattcctgggcaaacaaatctttagctcagatcgcatgtacgcaaccacaccggtgggtgtagtcatgggtctggcctggaccgccatgggtggttcatcgctttacatcgaaacctcaaggcgtcacattcgccagggggcaaaaacagatccgaacactgtcgccggatcgctgcacatcaccggaaatttgggagatgtcatgaaggagtcggcccaaatagccttaacggtggcgcgcaactttttatattcgctggaacccaataatctgttcttagagcaagagtaagttttttaatttgcgttttcttattttcgttaatctatatatgtggcccttacaggcacattcacctccatgttcctgaaggtgccacaccgaaagatggccccagtgcgggcatcaccattattacagctctcgtatcgttggccactggaaagccggtgcgccaagatatcgctatgacgggcgaagtatccctgaagggaaaagtgctacccgtgggtggtattaaggaaaagacgattgcagtaagtaaaacagaaataaatgatctatttgtgtgtaaatataaataaatcaccctcattcaggcacgtcgtagtggagtgaattgtcttattctgcctgtggataacaagaaagacttcgaggagttgcccacgtacattacagatggtctggaggttcactttgccaccacctacgaggatgtctacaagatagcgtttactgatgtaaccgaaacgacaaccaacaatgttgaagagcaggagccgctgcagaagctttccagtgcggccgctgccaaatcggagacgtggccttattcttagatttagcttgggggtgttgcgggtgttgataggttttataaatatctatcgttatcaggttaattagtttatttagaccatagcatttgttaattctaatgccaagtaaattgaatgtaccatcgaactgaagacagtactgcgtatatcctagacatctgcattagccaaaatccagtccaggtagcgatccacgcgagtgtagatacccgggcgaccccgctgtccgcagccgacgccccaggacacgatgccgatcgtgacccagcgttggttgggaagttgtaccaacagaggacctccgctatcgccttgacaggagtcctgacctccttccggaaatccagcgcacatggcagtgtccggaacgtgctgtacaaatgacgacctgcaatcggactgcttccaaaccggcaggttaacctgaagataggagtaatacatattttcttaatttaaaaaagctttctttgttatgttcagcttgagttactaaattgctgaaaccaatttgtttagatcaatataagaaattgaaagcttaagaacaaaataaaaacgctgtatataaaatgaaatatactttaatatgcgacccacctccatgaggatgttagaatgaggaccgccaaacttttgggtgccccaaccggtgacaatggcgtttctatccgaccaatcttcgttcacgggcggcatgcaaactggccagatgtaggtgttgaatatagtcgccctgtcgattctgacaattgcaatatcattgtcgtagttctgtggattataatcgatatggagcaccatgttggcaatccggaaatccctcgccctcgtctcattcagcatatgcgtgttgtactcgcccagacgcacgaagatgtcctccttgttcttcttgtagatgcagtgagcggcagttaggacatgacggtcggtgatcaggacaccaccgcaccaaacgaagggcagaccctcctgcagcagggccgccatccaaggccactcgtctggctcggctggccgtccaccggtgaggcggggaaactgcctggacgtgatcccacaacctcgctgctccggcttattaacgatgcgcggctcatcaccgtccgcactggtcacgacttgcggactaaatcggttgctcgtcgactggtcagtgcagcaaatgcctatggagctgaaagacaaattatttgtacatataatacaaggatgccaagccattaagaagaaaaattcatataccttttctcaatgatgcaaagctgggagaccagacgccagacatcattcttaagttctggcatgcgacagtagataatgtggcgacatcggccggattcacccaatggagtgctacatgctccataatccttgttctcctgcggttatcatttgtagttacctgatactggtatgtatgcataagacataaactcaccagcaattgcgaggtgggagcctgtcgcttgtttaggcgatgttgggacaggaaacttacgacgcggttttccccagtgcgattttcgtatacctgattctccgactccccccattgaaactcatcattatcgctgaagtcgagaagatctgggtggtagacgaaaatctttaggtttggtttacattagattcttggaatttgtcttagaaatatcaagtatttgggtgaaatgagttttaactttgataaataactttgctattaaatgcacctgcacaattttttatgttggtataaaaacgtgactcacctaaaaaatcagtggatacagtcttggcgattgtactctgcgggatatagcccagtaaaatcaccaatgcccaaagaaatgccttcattttgagttattttcgcgagtgcagtgggaattttaatcgcgtgtcgcttccgttgcccgctgaatcagttctgttttgacagttctccaaccagctaaagctacttctccgatatggagctgagctcagatcggctcaatttacatacgtcttgccttggatactgctgttgaacctgttcgatgcgtcgacactatggggttttcctggctattaaagcgtcttactccatgctcagttcccaggcgaaagcttaatgggattggaaccgctagcgatatagtaactattatataatacttgagttaatccgagcacttggcttatctgtagggcggaaagcgagccactgaaatgacgtcccctttaatgcctctgagcttagacccaatttggtgtattatctcaatgttgctggcaacagcttggcaacatgttgccaggggcgagtagtgcccatgatgatcagtttggattctccgaggcgaacgtgatgtgcatcgcaaatgatccggttcggtgggttttgattccatagaagtatcatctccgaaatactaaggaagattttatactcagttatattctctatttaattgccttttgacgcttgcacatcaaagtagtaataataaatcaattgcacggcacaaccggaatcgaagaaaacatttgcgatgcacggtttgattgtcactgcagaaatgattttaatgtcttaatttaaaacccaaccctttaacattttaacataatttaagtaatagtattgaatgatggaggcgaagaaaatggaatggggcgacttcagttggcagattatgttattatgtaataagacgaataccgaataagtgtactaaaaaataagtttaaaatagaaagcgtcaaacaaataattagtcaaaatatccttaaaaaatatttaaaatatattattttaatattattgcgaagaccatatttttattatttaacaatttttataggtagagcactggatttgaatttctgggaatattatatgatcacatatacatatgaatatacatatatgcggtgctataaactcatcgcttacccactttatcctgaaaattggtttaaaaattattatttattattttttaacaggtatctctaaaattcgactattgtcgtgtcattcaaatggtacaaatacaacttcctagtcaactcaaatggcgtgcgagtgtgttacttaattattaatccctgcgatttaattaccacctttccctgccaccatgatcacctataaaactctcctacgacatggttactcaacgtatttagctttccgccaccatgaagcattgga

SEQ ID NO: 42047 - DNA, 1569 bp, DROSOPHILA
ctttccgccctacagataagccaagtgctcggattaactcaagtattatataatagttactatatcgctagcggttccaatcccattaagctttcgcctgggaactgagcatggagtaagacgctttaatagccaggaaaaccccatagtgtcgacgcatcgaacaggttcaacagcagtatccaaggcaagacgtatgtaaattgagccgatctgagctcagctccatatcggagaagtagctttagctggttggagaactgtcaaaacagaactgattcagcgggcaacggaagcgacacgcgattaaaattcccactgcactcgcgaaaataactcaaaatgaaggcatttctttgggcattggtgattttactgggctatatcccgcagagtacaatcgccaagactgtatccactgattttttagatcttctcgacttcagcgataatgatgagtttcaatggggggagtcggagaatcaggtatacgaaaatcgcactggggaaaaccgcgtcgtaagtttcctgtcccaacatcgcctaaacaagcgacaggctcccacctcgcaattgctggagaacaaggattatggagcatgtagcactccattgggtgaatccggccgatgtcgccacattatctactgtcgcatgccagaacttaagaatgatgtctggcgtctggtctcccagctttgcatcattgagaaaagctccataggcatttgctgcactgaccagtcgacgagcaaccgatttagtccgcaagtcgtgaccagtgcggacggtgatgagccgcgcatcgttaataagccggagcagcgaggttgtgggatcacgtccaggcagtttccccgcctcaccggtggacggccagccgagccagacgagtggccttggatggcggccctgctgcaggagggtctgcccttcgtttggtgcggtggtgtcctgatcaccgaccgtcatgtcctaactgccgctcactgcatctacaagaagaacaaggaggacatcttcgtgcgtctgggcgagtacaacacgcatatgctgaatgagacgagggcgagggatttccggattgccaacatggtgctccatatcgattataatccacagaactacgacaatgatattgcaattgtcagaatcgacagggcgactatattcaacacctacatctggccagtttgcatgccgcccgtgaacgaagattggtcggatagaaacgccattgtcaccggttggggcacccaaaagtttggcggtcctcattctaacatcctcatggaggttaacctgccggtttggaagcagtccgattgcaggtcgtcatttgtacagcacgttccggacactgccatgtgcgctggatttccggaaggaggtcaggactcctgtcaaggcgatagcggaggtcctctgttggtacaacttcccaaccaacgctgggtcacgatcggcatcgtgtcctggggcgtcggctgcggacagcggggtcgcccgggtatctacactcgcgtggatcgctacctggactggattttggctaatgcagatgtctag

SEQ ID NO: 42048 - protein, 408 aa, DROSOPHILA
MKAFLWALVILLGYIPQSTIAKTVSTDFLDLLDFSDNDEFQWGESENQVYENRTGENRVVSFLSQHRLNKRQAPTSQLLENKDYGACSTPLGESGRCRHIIYCRMPELKNDVWRLVSQLCIIEKSSIGICCTDQSTSNRFSPQVVTSADGDEPRIVNKPEQRGCGITSRQFPRLTGGRPAEPDEWPWMAALLQEGLPFVWCGGVLITDRHVLTAAHCIYKKNKEDIFVRLGEYNTHMLNETRARDFRIANMVLHIDYNPQNYDNDIAIVRIDRATIFNTYIWPVCMPPVNEDWSDRNAIVTGWGTQKFGGPHSNILMEVNLPVWKQSDCRSSFVQHVPDTAMCAGFPEGGQDSCQGDSGGPLLVQLPNQRWVTIGIVSWGVGCGQRGRPGIYTRVDRYLDWILANADV

SEQ ID NO: 42049 - DNA, 2630 bp, DROSOPHILA
aaacattgcttcattcgcgactttcccatttaaagatcctgcctgcccagcacgctcagcaagtggagcagcacatgcctccgatacacgacccgcacagctttctcaccaacgaagagacggtgtatttcaataccaacatctccacggaagagttcaacgcaagtgtagctgactatgtaccgcacgccacattggtcctaagttggagcgccctagtagctagggaggaggggcagcgcttggcctgtggcctgcacttcataaagctttacaaactatttgagactggccactgtccagcggcgccaacagcttctttcctacgaagaagacattcctctgacgacaccttagataaccgacgggagtttccactacctgagggagcgctaaataatgaggatgcttggcagcccctggcggatgctgatgaagaagactactgggagcccaatgaaaactatgtgggccaacggtgtctactggaggatgagagctttgtaatggcagttaaagcttaagatgtttgtcaagtggtgtcattaaattatatgttatcgtctatcagttatgatatgctaaaaatggtattgtcatttcattgagtttaagtttaaaaaatttgtaagctttttgcccctctgcatgtgaaaatgtatatttcacgggcaaaagtaccctattccttgattaagaagctgcgcataaaacaaataagtcctgattgggaaagtaattaggtgttatggtttataagccgtctttggttaaattcataatttgttagtttattattgattgatttaaaaagaattcattaataatccacgctagtaatatgattaaacatgtaacattaaagtggtaattgctttttggtagttcctaagctgctgactagacgggatgatgacgtggttcttagtggatgagtggatttcagtggcagcgcaacgtaataatcttggtggcagaatgaagagttttattattagatttaagtgcgtttcttggtcatgtaaactcgagctgtggcgtagaggacatgcgtacaagcgtatatattgcccagagcgcttcccagcagtgctccgatcacgttgggaatgggataagcctgccagtcacgtccccagtctagtggagcgaccacgctcccggcccaagctcccagaataccgcccagtgcattgtacttgaacagattcagagccgtgtcctcgcacttggtcacaaagtccggtttctcgcagaagcacacttgtagtgctcctccgccaccgaggaggaaaaccgtgggtgacaccgtcaacaaggtcatcagtaaggccaagacgaaggtctgctcatagttgcccagcaccggggctcccaaaattatgcagataaaggcgtagaggagtgtacacaggaactgcagggtgaatcctccgaggagctcccgcggcgtaaagtacgagttctttttctggcgctgtttggcggttaggacgccatcctcaaccttcccgtagaagcgagccaaaacaacttttagcagctctccgaggaaaacaatagggacgacaagagaatcccagaagctgccgagatgtgcccaattccggcgatactgcatgtacgccatgcagatcaggatggtggcgaggctgagggacacgtggaagagctggtgcttggtcttttgttggtcgaatcgggaaaccatgattaaatgcagataaatacaattttggtaaatcttaaacttggacaatattttcctgcctttcgtttgtatttcgccgcctatcaacactgaatgtactgtgggcttaaaacacaaagcttcggaaattttaaatcaccgaatttacatataaaacaaaaaattaagatttattttataatggatgctttttacttacaaaattcaaaaaattaattccaaaattaaaaaaatgctctaaataagggacaacgttgtcgacgtcattgggttcatgcggtgtagaacaaaaaaaaaatttcaccggtaccactgtgcaacaatagaagaaatcgttttgcagcactgtcagccgctgtcatttcaccagccgtcacataatcactcaccacacatttggactgcaaattgtttttctaccatttctagttatttctaagtaaattgcgagtggatattgctttcaatatgttagcccgcgctatccgagtgcgccccatgatgcgtggcatcgcctcgtcgtcagtgtggaaccggaatcgtcccattcagagttccctgatgcaatactgccgggatcggtcgttgcgcctccagcggctccacggagccaatttgatggtgcagcgcttctacagccgcaagcgggatgattccaacggggatattattatgggacccgatcttatgtccgatcaagatacccatcttccggcaactgtggcggtgccggacgtgtggccacatgttccgttgttggccatgcgcaagaatcctctctttccccgctttatgaagatagtggaggtaaggtttcatttgactggatgaataactactcactatcatgaattgatttagtcagtaagcttttaatgagctagacttcttattagtgtttacaacatttaaaagtacg

SEQ ID NO: 42050 - DNA, 630 bp, DROSOPHILA
atggcgtacatgcagtatcgccggaattgggcacatctcggcagcttctgggattctcttgtcgtccctattgttttcctcggagagctgctaaaagttgttttggctcgcttctacgggaaggttgaggatggcgtcctaaccgccaaacagcgccagaaaaagaactcgtactttacgccgcgggagctcctcggaggattcaccctgcagttcctgtgtacactcctctacgcctttatctgcataattttgggagccccggtgctgggcaactatgagcagaccttcgtcttggccttactgatgaccttgttgacggtgtcacccacggttttcctcctcggtggcggaggagcactacaagtgtgcttctgcgagaaaccggactttgtgaccaagtgcgaggacacggctctgaatctgttcaagtacaatgcactgggcggtattctgggagcttgggccgggagcgtggtcgctccactagactggggacgtgactggcaggcttatcccattcccaacgtgatcggagcactgctgggaagcgctctgggcaatatatacgcttgtacgcatgtcctctacgccacagctcgagtttacatgaccaagaaacgcacttaa

SEQ ID NO: 42051 - protein, 209 aa, DROSOPHILA
MAYMQYRRNWAHLGSFWDSLVVPIVFLGELLKVVLARFYGKVEDGVLTAKQRQKKNSYFTPRELLGGFTLQFLCTLLYAFICIILGAPVLGNYEQTFVLALLMTLLTVSPTVFLLGGGGALQVCFCEKPDFVTKCEDTALNLFKYNALGGILGAWAGSVVAPLDWGRDWQAYPIPNVIGALLGSALGNIYACTHVLYATARVYMTKKRT

SEQ ID NO: 42052 - DNA, 5626 bp, DROSOPHILA
tacgataaattattaaagtaaaggaatacttttaacccattaatgtacagattaaacttaagtgtgcaacaaatgtgtaaatatttcttaattcttaattgatcgataagatttcagcgggttcgagattcttaatcacttagaattaaaaaaataaaaataaaaacaaaataaagtggaatgtgttcgggttaccgataaaatgaggttaacacttataactaaaggaaaataaaccaaaaaaagataatattcgaacaacataggaataccaagaaatagccttacatacatagcccacaacttgattccgataatctatgccaatatatatatatatattataccaccatgaaaaaatggaaggggcacttggagtacatatatcaaatccatatggttatgcgaaaaatatactgacagcttgggattaaacaagacttttgggagactgtagaccaatgatattgcccaggcttgtaacgcttaagttaaagaaaccaaaacgaattggttctggggatgtatggcaatataatcggtctacagccgtacttgagccttatagctaaggataatcacttaaagttaggagagcgagagagacgttcggggagattatttacacactgagataatcgagggtaaaagcatcattcgaaaaatatacacacagatgtacaattattgggttggtcgactcgcatctatggaaaaaccatgacaaagccgtgggagcaaaacgaattctttagcaaaaaattgaatcttttcaagagccatatcctcattattcctaaatgtttctcaagcaatttgattaagattacgttttgctaccacgactgcatctcagcgaaatcgacacaattccaacagatatagacaaattgtggatggggattagtatagacatttactggagagcgattagagggattaccaagactggttgcccctattcatcccagttttgccgctgccgttggcgatgcagcaatcagctgccccccacataccgtggctttgcggcattgtcctcggatttggaatcactgccccattcctgtagttcgatctcgctgagcagggcccaattctcgctgtcactgtggacgtgaaggcgcagctccttgatagcacctatcttggcatccagaaggccctccgccacgcccatgctatcaaatgaacccaccaccaaatagccgtccgtagtggtgttgtagctgctccaaacggacgaattttcgctaagcgtatccgccggcaggagctccaccgttgtgttgtagaacctgtcggacgggtgctccgagttgccgcttcggaagaggtagtgcctcagctgcgtgggtcgctcgaatatgatctgcaccagatctccaggctgcggtagcaagccccagaagtaggattctcctctgtaggcgcgctgcaacagatagtttttatacggcgcaatgttggacttcaccagagccggtggattgtgtgtatgggcataatactgcggcaccttactgccgaactgcttgtccttcagcttttgaacttttcctttcagcgacgaacttgtaccaatgtgttggaaaagggattttcgaaaatgctgccagtactttgccttctccgcattgcagtgcttttgatccttgtccgtgcgacaaaccttggactcgataaaatacgtaagtaaccagtccactggcttgtcattatagaacatttggaaataggtgatcaggtagggtagttccgcactcttgaacatcttgccaataaagccaagctggcaaaagtctagcacaaaccattctggttgatcgggtttcgtcaaagcgctcttgataagggcgaatttcttcatggtggttatgaactgccgcttggtcagtatatcgtcctccagttgaacgtaaaaggttccctttgaatgggcgtaggccatcaggtaggcaaagtccaaattctgcttactgcgccatttaacgcgctccaaaggatcattcagtgtgatgcgaagtcgttcgaaattcggatagtaactaggtgcaggtgctattatatcaatcagtccactctccacatgctgatcgaaactggactcgatttgacgggcaataagttgcacggactccatatccgtttctcctatatagactatgatcagtgtttcgttctgctcctcgtcgttcatgttctcgatgagattgtggagggttccaaggaggtacgattgcttctccctccgcacggtgggcacacccaggacaatgctcacatccgaacggcccttgctttgcaagtatgctggtcgcagggagccggcatcgtccagaagatgcggcaggaaatgataagcattcggtagccgtatattctggctcctggccatcgagccatttgcactgccacccttactgatatgcgacgcatttctcagcagttgcctagcctcgggactcagcccgtcgagcagattaaccacgggcaaaggtggcggcggcggtggtgcactggctcccgtcacattgacgatctgcaattggcccaggtactgggaaagcagcgccacgtcctcctggcgagcgcggtacatggactccaaatactgcagccgcatatggcattcggctaggcgctgagtcagcgactgttcggtggataactcgggtcccatcaccatcaggatcactatgcatggtgccagcaccagggccgtcactatcagcatgcagttccgctgcctaatcttgaacatcgttcgctctgcccaggattcctccgatggctgtgtcgtattaattagctaactgtttgccttggggctgctttgcttcctcttctgggttggcttttcgttctggctcggtcactggttcgttgtgctggtggcgttcccttgggccggctgtcatcctcattcctcctatgactaatgcaggcgctgcaacaaaaacaaggcatttagttttgtacactgtcaaaaattgggaagtaaatacatattcaaatcaagaatgatttgtatatgctagttctaacaaaaattaaactctaatatttaataattcaattaaaagaatgataagtaatcagttatattaaactcatttaaaacttgctaagtaattatttaaaatttcccagcttgttcagagtttaatttcaactttcaagatctttttcacattgtaatatgttaaatttatttgcatttagcccttcctgcttgccctattaaaacttttctaaacttttcctacatttaggtgggacttgtgttttcacatgtgtgctttcttctataaatccctagtgtagttgctaattttattggcttttttgaagagtgccgtggggtggcccatggggggctgcgtccgaaggtcgcaccgtttaacgcttctttgtagccgtatccgtcttttgccttacccgggttggattaacgacgtcgtcggtggtggcagctgtcgcaattctcgccacatgacctggccgtgagttagaataataataattgttatgtacatgtaatgtgcgcccaagacgttggcaggcaatagacctagacttaacttacatggccaagtgcccggaaagctatgttcttcctcctcgccgccaaaagttcgatcggtgggtctgaaagtggggagcaaatgctgtttactgattcgtctggtttgggtttggcagctcaaaaaagggggtattatttagcgggtcggttgtattgggcttgtcgcagatcccattgggatttacatattattcaccgaggatttcccgggacgagccaattaaatatagcgatttaaattaaaatttcgttatctctgaaaagttatttatgaactaactatttctgtaaacgaggaaggtttattgattaaactcttactaaccggaaacatcaatcaactgaattgattatgagaaaagtgcaagtctttgcttagttttaataaactgaaaactataaatgacttaatacatattaaaatacccatatacatatattatatatatatattatatatgcacataatatgcttatatttttggtaccctctgttttttaaccgggtatcagttattcgatataaacgatcggcactcggcattgtgtgaacattaacaatgtagagatataaattttcgcacttcgtttagcgcacgcaggcgaacgtaaacaatgggtcgaaagaataagtacatatgaaaaaagataaataggtaaataaacaggaacggcgaaaagttcgcacccacgcacatgcacacccatatttactcacacttgtttgcagatcaagtgggcgaatagatgaattaactaattaatcagcacttaaataggaacaaattgaacacagtggattttatttatccatctgggtattttgcaagcagctacttgtagccaattcgcagttttctccctttttcgatgctcttccaattttcgccattcgttgtcgttcgcacgcgtttctcgttgtcttcacatatttacgattgctcgccgagtgcgttatgtaaatgcaagtgatgtaaattattgcagcacttaatggctttgctattgtttaattttatatacaatacagcggggaattagtttcaacgcccccgaccaaaaacaacaacagaacaggctgtgctgccaagcaatcgttatcggcattgctgtgttgccagacagtcgctgacaaatgaggtggccacaccattctgttatgtttaacagtatggctgctggcttattggcatcggttaacatatgtatgttaagggaacaacaggtacctaaacttctcccatctctagccgcattttaataacaaaagatttttgcaaaaatgtatttaactctgctaaacggtactggcttcgttttcaacgtggatggttagtggcttaaagctcaataaaatatgcatttaataaaattcgcttactacccagattacatggaactgcggagcaaacatcgcataatgggtgctccagtgggcacagcgaacacaaaaggctggagtcctaatcaatccagtaagatatccatttctatagggtttctcccagctttggatttgtaaacaatgctaaaatacatttttactatttcttactttttagctctgcccgtggagctcagtaaatttgaaacccaattgcttttggatgagaatatagcaaagttagttgataaatccaaagatctaaaggctaaacccactgccgagaaacttgaggagtgcaaggcggattttgaatcccggttactgggacaggaggaagcattgaaaacggagaaactacgggaaactgaacgatacatggataagattctgacgggaaaacgcaagaagttgctcaagcagggcaaaaatgaattgggtaaaagaatattactagaaaataaatatcatatatgtatgtctaatatttggtataaataatatgtctagtaggctgtgggatttcatctacataaatgcaaaattacgtttctcctggcctaaacttcaaattttaaactgagctgtcagcgtacttaaatctaattttataaaatgtgcatgaaaaaagaattatcagataacttcacttt

SEQ ID NO: 42053 - DNA, 2390 bp, DROSOPHILA
ttccccgctgtattgtatataaaattaaacaatagcaaagccattaagtgctgcaataatttacatcacttgcatttacataacgcactcggcgagcaatcgtaaatatgtgaagacaacgagaaacgcgtgcgaacgacaacgaatggcgaaaattggaagagcatcgaaaaagggagaaaactgcgaattggctacaagtagctgcttgcaaaatacccagatggataaataaaatccactgtgttcaatttgttcctatttaagtgctgattaattagttaattcatctattcgcccacttgatctgcaaacaagtacccaccgatcgaacttttggcggcgaggaggaagaacatagctttccgggcacttggccatgtcatgtggcgagaattgcgacagctgccaccaccgacgacgtcgttaatccaacccggcgcctgcattagtcataggaggaatgaggatgacagccggcccaagggaacgccaccagcacaacgaaccagtgaccgagccagaacgaaaagccaacccagaagaggaagcaaagcagccccaaggcaaacagttagctaattaatacgacacagccatcggaggaatcctgggcagagcgaacgatgttcaagattaggcagcggaactgcatgctgatagtgacggccctggtgctggcaccatgcatagtgatcctgatggtgatgggacccgagttatccaccgaacagtcgctgactcagcgcctagccgaatgccatatgcggctgcagtatttggagtccatgtaccgcgctcgccaggaggacgtggcgctgctttcccagtacctgggccaattgcagatcgtcaatgtgacgggagccagtgcaccaccgccgccgccacctttgcccgtggttaatctgctcgacgggctgagtcccgaggctaggcaactgctgagaaatgcgtcgcatatcagtaagggtggcagtgcaaatggctcgatggccaggagccagaatatacggctaccgaatgcttatcatttcctgccgcatcttctggacgatgccggctccctgcgaccagcatacttgcaaagcaagggccgttcggatgtgagcattgtcctgggtgtgcccaccgtgcggagggagaagcaatcgtacctccttggaaccctccacaatctcatcgagaacatgaacgacgaggagcagaacgaaacactgatcatagtctatataggagaaacggatatggagtccgtgcaacttattgcccgtcaaatcgagtccagtttcgatcagcatgtggagagtggactgattgatataatagcacctgcacctagttactatccgaatttcgaacgacttcgcatcacactgaatgatcctttggagcgcgttaaatggcgcagtaagcagaatttggactttgcctacctgatggcctacgcccattcaaagggaaccttttacgttcaactggaggacgatatactgaccaagcggcagttcataaccaccatgaagaaattcgcccttatcaagagcgctttgacgaaacccgatcaaccagaatggtttgtgctagacttttgccagcttggctttattggcaagatgttcaagagtgcggaactaccctacctgatcacctatttccaaatgttctataatgacaagccagtggactggttacttacgtattttatcgagtccaaggtttgtcgcacggacaaggatcaaaagcactgcaatgcggagaaggcaaagtactggcagcattttcgaaaatcccttttccaacacattggtacaagttcgtcgctgaaaggaaaagttcaaaagctgaaggacaagcagttcggcagtaaggtgccgcagtattatgcccatacacacaatccaccggctctggtgaagtccaacattgcgccgtataaaaactatctgttgcagcgcgcctacagaggagaatcctacttctggggcttgctaccgcagcctggagatctggtgcagatcatattcgagcgacccacgcagctgaggcactacctcttccgaagcggcaactcggagcacccgtccgacaggttctacaacacaacggtggagctcctgccggcggatacgcttagcgaaaattcgtccgtttggagcagctacaacaccactacggacggctatttggtggtgggttcatttgatagcatgggcgtggcggagggccttctggatgccaagataggtgctatcaaggagctgcgccttcacgtccacagtgacagcgagaattgggccctgctcagcgagatcgaactacaggaatggggcagtgattccaaatccgaggacaatgccgcaaagccacggtatgtggggggcagctga

SEQ ID NO: 42054 - protein, 578 aa, DROSOPHILA
MLIVTALVLAPCIVILMVMGPELSTEQSLTQRLAECHMRLQYLESMYRARQEDVALLSQYLGQLQIVNVTGASAPPPPPPLPVVNLLDGLSPEARQLLRNASHISKGGSANGSMARSQNIRLPNAYHFLPHLLDDAGSLRPAYLQSKGRSDVSIVLGVPTVRREKQSYLLGTLHNLIENMNDEEQNETLIIVYIGETDMESVQLIARQIESSFDQHVESGLIDIIAPAPSYYPNFERLRITLNDPLERVKWRSKQNLDFAYLMAYAHSKGTFYVQLEDDILTKRQFITTMKKFALIKSALTKPDQPEWFVLDFCQLGFIGKMFKSAELPYLITYFQMFYNDKPVDWLLTYFIESKVCRTDKDQKHCNAEKAKYWQHFRKSLFQHIGTSSSLKGKVQKLKDKQFGSKVPQYYAHTHNPPALVKSNIAPYKNYLLQRAYRGESYFWGLLPQPGDLVQIIFERPTQLRHYLFRSGNSEHPSDRFYNTTVELLPADTLSENSSVWSSYNTTTDGYLVVGSFDSMGVAEGLLDAKIGAIKELRLHVHSDSENWALLSEIELQEWGSDSKSEDNAAKPRYVGGS

SEQ ID NO: 42055 - DNA, 4042 bp, DROSOPHILA
cgttccgggctacggcgtggttagcacctttcaaattctacttagctcgtaagcctaagcgtgtgcgtaagtaagtgactggatggtttccgatcccagttatatatcgtctatatgattttgtgtacttgcctgttcatcgtagttgacatgctcaccacgcacacattttccagttcttttgtttcttcgttgtagtcgtagtttaagttctcgctaattcgttgtgatacaaatttaattatatcttacttatgtatgtatttttagtagaattgatatgagacaaaatatatacacgattccaattgtcgccacaatttacacagatcacctttttttagttgtatcttttttttgtagtgtttctttcacaccttttcagatctgaggagatgcgcacgtaagttcggaaaccataggggatatcggtttcttccccgtcccattagcccataagtttgagaacgatacatatctgtgtggcattatgcttgccacattcctacatacgatctacatgttaaagagaaccacgcggatatactatatacactatatatatatatatgttataaggtcagaagacttactgcaacgaaacatatcattgaagttactgctgcaagcctatggatattatagaagcttttattgttagagatcgttatcttgaggggagatcggctagaaagtaatggatatcttggattggctgattaggggcagcggtgcccagtctgaatgtaaaaagattgttagttatacagcgatggcgaacgaaagattgcaatttacatatctataaatatatatatatatatttctgtatatgaacatatgtgtataataaagtttattgttttaatgtgtttgaacctgcaagtgcaacgactatattttatagttagaaattcgtatgaagtgtcagtcctgagaattaagatcgcactagccgagcatgatacttccttgtgaatcagtcaactctcggcctttgtcacacttgttttgctgaatttaggctcggtctttcaacaccttggtggcagtaacagatctttgtccgggttgttgtttggggctgtggacgagcaccaccagaatggtcgacgaaaagctaccaccaagcaaggaaccggctgaacggcctccagaccagaccacccccggaaacgcggctacccgattcggcttggaggatcacgaggccactcagcaggatgcccgggtgaacacactgcgccaagcagaagagcgacgtggttcaatggtgcctcccgacaagcgggcgatgtccatgaagatgtcgcaagcgcgcttacacaccataaatgatccgaatcgaactggcacacattctgctgaagcgacgacaccaccggccaagcctgcggtcaacatttcgtcgcggagttctttggtaagaggtgtggcgccagatcttccacccaagccgcagcgcccctccgatagcgaggccgatcttgaatcgtccgatgtggatagaccatcggcaaaaaggaaatcggagaaagctctagctgatgtgtcaacttcgtcatcggaggaatcagagaaacgcgtcccacctgctgctgcatcggcgcctcctccagcacaagctgagcctcagtggaaatcaattgattttgcagcatcggaagctgagcccattgccccgccggcgcctaggccggaggatgtaccattgcccccacccatgatgtcgtctttgccgacggatggaagccccgacgatgtgcagagcataaacagcaagttgaccaataccgacatcacttttcacccatccaaggtattcgcctcgaaggcaactaacacttcgggcatgctctactccgacgaggaaaatgagccggaggaagaggaatttccaaagcttccggatcagttttccgccagcgatctggacactttgttcctgctggcttgtcgggaggtgaagaaggctggtgctatcgctcttgcggaaaacaaaaagaaccaggagtacaccaccaagaagcacacgaatgatatcgtcactcccaccgacaacattgtcgaggagtctttcattaaggccatcagctcacggtatcccaatcaccagtaagtaaggggttaattaagggaacatttatgaaaactccctctttcaatgtggattgtatactataactcatgcagatttattgccgaagagagaatttcaaagtcggagactggtatggtgaccctgaccgatgaccccacctggataatcgatcccattgatggcaccatgaactttgtccaccactttccgtactactgcatctccgtggcctatttggtaaatcaggagacccagtttggtattatctataatccgcccatgaagaatatgtacacggcccaactgggcaagggtgctcaaatgaacggcgagatgataaggaccactggccaaaccaacctctccgcggccatggttctacaggagtacagctcgggcagcaatgaggcgcgtaaccaagtggccactgaaaattcccagcgactggtaaagaaaacccatgcgtgagtatttcaaatgtacagaatgtagtcggtttacccacataccaactacggcggattctttgtaggatgcgctctattggatcctccgccatgtgcttggcaatggtcgcctccggagtggcggatgccttctacaactttgggctgcacgtttgggatatggcagcaggcgctttgatagtcacggaggccggaggagtggtaatggatccggccggagaggagttggacattatgtcccgccgctgcctcgctgcctctactgactaccttgccctcgaattgggtaactgcctgcagcagaattatccatctccacgtgacgacgagccgcgttccgttaaccccaatgagtacgggcctgctccggagaccagggactttaccagccaaacggacttccccgattcggataccccagaaaccactgacaccgaaataggcggcgaaaaatcagcgacgccagctaactaattgaccaccagaaaggccagctttaaattgcattttaaaattttagttgtttaataaactgacaatgcatggtttttccatgttttgtttttacttgtaagatacctttttctaggcagctatgccttatcattctaatgatacgtttagatgtattttaaacacgctacacgtagaattttttatatcgaaatgggatccaatttgaatgctattttttccaaaattgtttcttgtaagtctttggtatgcggaagtcaatggttgtgtggtacaaatgggtatgttttagtatagatatgaaatttgattagatatagatatagatatgattacatgatggttaaagccattccaataatgcccaccttacaaatttttgatttaaaaacaaaagtatgaaattctacaataagaaaaaaatttttttttaactacaacccggtctattatccaatcagaaatatttggtattttattagtattttcccgagcttattggaataatttaacggtcgcgagctttggtcactttgcccatcatagtataatttaattaaaacttgcaacttttgatttgttagcggttcattgggagtccagaaatcacagaggcagcaccactgcaaaatgtcacacaacgtggacgtggaaaagtgcttagaggtggccagcaacctggtttccgaagccggaagggtaattagcagtggaaaataactcaatgagtgccttatggaagtttcctttttcccggtaactttcccagctcatcgctcgcaacaatgagcagcgacaggacttcgtttgcaagagcaatgacatcgacttggtgacccaaacagacaaggatgtggagcagctgctgatggacggcattcgtcgccactttccggagcacaagtaagattcgcgcagattttccggcttgcttttcaactttgcgagttgcaggttcatcggcgaggaggagagtagcggcgcggagggtgtcaagaag

SEQ ID NO: 42056 - DNA, 1896 bp, DROSOPHILA
tcacacttgttttgctgaatttaggctcggtctttcaacaccttggtggcagtaacagatctttgtccgggttgttgtttggggctgtggacgagcaccaccagaatggtcgacgaaaagctaccaccaagcaaggaaccggctgaacggcctccagaccagaccacccccggaaacgcggctacccgattcggcttggaggatcacgaggccactcagcaggatgcccgggtgaacacactgcgccaagcagaagagcgacgtggttcaatggtgcctcccgacaagcgggcgatgtccatgaagatgtcgcaagcgcgcttacacaccataaatgatccgaatcgaactggcacacattctgctgaagcgacgacaccaccggccaagcctgcggtcaacatttcgtcgcggagttctttggtaagaggtgtggcgccagatcttccacccaagccgcagcgcccctccgatagcgaggccgatcttgaatcgtccgatgtggatagaccatcggcaaaaaggaaatcggagaaagctctagctgatgtgtcaacttcgtcatcggaggaatcagagaaacgcgtcccacctgctgctgcatcggcgcctcctccagcacaagctgagcctcagtggaaatcaattgattttgcagcatcggaagctgagcccattgccccgccggcgcctaggccggaggatgtaccattgcccccacccatgatgtcgtctttgccgacggatggaagccccgacgatgtgcagagcataaacagcaagttgaccaataccgacatcacttttcacccatccaaggtattcgcctcgaaggcaactaacacttcgggcatgctctactccgacgaggaaaatgagccggaggaagaggaatttccaaagcttccggatcagttttccgccagcgatctggacactttgttcctgctggcttgtcgggaggtgaagaaggctggtgctatcgctcttgcggaaaacaaaaagaaccaggagtacaccaccaagaagcacacgaatgatatcgtcactcccaccgacaacattgtcgaggagtctttcattaaggccatcagctcacggtatcccaatcaccaatttattgccgaagagagaatttcaaagtcggagactggtatggtgaccctgaccgatgaccccacctggataatcgatcccattgatggcaccatgaactttgtccaccactttccgtactactgcatctccgtggcctatttggtaaatcaggagacccagtttggtattatctataatccgcccatgaagaatatgtacacggcccaactgggcaagggtgctcaaatgaacggcgagatgataaggaccactggccaaaccaacctctccgcggccatggttctacaggagtacagctcgggcagcaatgaggcgcgtaaccaagtggccactgaaaattcccagcgactggtaaagaaaacccatgcgatgcgctctattggatcctccgccatgtgcttggcaatggtcgcctccggagtggcggatgccttctacaactttgggctgcacgtttgggatatggcagcaggcgctttgatagtcacggaggccggaggagtggtaatggatccggccggagaggagttggacattatgtcccgccgctgcctcgctgcctctactgactaccttgccctcgaattgggtaactgcctgcagcagaattatccatctccacgtgacgacgagccgcgttccgttaaccccaatgagtacgggcctgctccggagaccagggactttaccagccaaacggacttccccgattcggataccccagaaaccactgacaccgaaataggcggcgaaaaatcagcgacgccagctaactaa

SEQ ID NO: 42057 - protein, 596 aa, DROSOPHILA
MVDEKLPPSKEPAERPPDQTTPGNAATRFGLEDHEATQQDARVNTLRQAEERRGSMVPPDKRAMSMKMSQARLHTINDPNRTGTHSAEATTPPAKPAVNISSRSSLVRGVAPDLPPKPQRPSDSEADLESSDVDRPSAKRKSEKALADVSTSSSEESEKRVPPAAASAPPPAQAEPQWKSIDFAASEAEPIAPPAPRPEDVPLPPPMMSSLPTDGSPDDVQSINSKLTNTDITFHPSKVFASKATNTSGMLYSDEENEPEEEEFPKLPDQFSASDLDTLFLLACREVKKAGAIALAENKKNQEYTTKKHTNDIVTPTDNIVEESFIKAISSRYPNHQFIAEERISKSETGMVTLTDDPTWIIDPIDGTMNFVHHFPYYCISVAYLVNQETQFGIIYNPPMKNMYTAQLGKGAQMNGEMIRTTGQTNLSAAMVLQEYSSGSNEARNQVATENSQRLVKKTHAMRSIGSSAMCLAMVASGVADAFYNFGLHVWDMAAGALIVTEAGGVVMDPAGEELDIMSRRCLAASTDYLALELGNCLQQNYPSPRDDEPRSVNPNEYGPAPETRDFTSQTDFPDSDTPETTDTEIGGEKSATPAN

SEQ ID NO: 42058 - DNA, 3510 bp, DROSOPHILA
cgtcaaggacgaaaaaaacccgtctacgccgccagatgagcaggtgacccactcgggtgagaagaagacagtagcggctggacttgaagaaactctgtaaaattgtccctagatttttgatgatatgcggcggctgctggtccaggggctttgatcctacccctagatagcggggttccaatgccaaagtaaaggtgtggccttctaggttgaaatttctcttgatccgcttctcttcgttggtgtagatctccggctccagtagtttgtgttcgtcggggtcgtcgtgcccttgattcacatccgagctggcccgaaataaatccgtgccctcctccagcagcatgtcgatcttctctgccgtccagtccgtttcgggcaggacataaatcaaggcgaatgccttcagataggtggcgaagttaagaacattcgcctcctgctgcttgggagaacatccgcagggattgtttacagtggcatttgagcagacgaggcccacaggacagcccaatgagtcggcctccacgtctgagcgattgggcaccttttcgcagaacttccagtgatcgcagctaggttccgtcctcagggatcctccgccgcaaaacttgctgcccagatctagatccgaatagctgagatacctaaggacgatcaggaggatggatcagtttaagcatttcacaaattctggagtactctccacgtattgctcgagttgctcatgctgatccgagggcaactgcccggggcgctggcaaaacgggcaagatcgtgttggctgataggcatcctaagatgtctgttacttaaattttgtacagcaaagatttgagatttgagtttttttctgtttttgttctaatgtaattgttgctgaatattgcacaaaggaagaattgatccagtattatttgatttaacggaatttcaagaaaatgtgtagtcaaagattatattaaaaaaaaataatataaaaaattataataaaacaaagtttcaggtttatgaatatttttagatataattaaatataataaaatgccgtcctgataatattaaatttctcttccaatctgatgtgaatttttcccattttttacttaacttgtttttaaacaacaaaaaaatcatataaatcatttagacaaaaaatcagttctgtacaaaattcaattattgaaaacggagtttctttcaagaatatgcttattatttctatttaggcattaatgctgtacaagtgcaataattgataatagagtttcttaataaaaaaaagggtatcatttctattgaacacggccaactgaactttgccatgaacgtattagtcattcttcaaacacaaataagtgcgcacagaaaagtcaaatatagctaagaaaatgcatgttttgtgaaataatttaatgtatacatatatttttgctttaatcttagttacttagaagtaaaaagagggacgaggaccaggagtgctaagttatccattgttgcccatgttggtttaagtgagagacagtgtgttagtgtggtcattgttcggactgccggcagctctcaacattccatggccagtgagttggagttctcgttcaaggccttgattccgttctccattggcatggccaaactattatcatcttcgggatggataactgctgaagccgcctccgatgtggacggtccatcggtggccatctcatcttgatggccgttctccacgccatttccattcccgttgatgtgcccgtagtcccaattgattttgaatcgggtgacgcgcggcttgctggccaggatgtttcgcgtcagcttctcgaaaagaggctttgttggcgggttctcgcgcatctccgggtcagcgtagtcgttattcacatagtagcccacgcggacgaactcctggccgcggtaggagcaggtaagcagaacaatggtaacgcccaccgcatccggttccgggatcttgctgacgtctggcggatccgcctggaagacaaagatgtgtcgcccctcaggcacaggtcccacgtatatggtgtccagcacctggtcgtgctcctcggactccgccgagcctacatagatcatcttccactctagatcctcttttagctcctcaatgcactcgaacgtgagttcgaactgaaaggggttgaagaagctgctcgggttgtccagcaccaccacgttggtgatgtgcaccttggccatgactgtacctcggagattgcagagcgtagaccgatattttaaagactccttcgactgcgcgctttttttagaggttctgcttttgtccgactagggaattgctttgcgaaattcacctgcaaaacgctcagcaaatacttgatatatgtactgtaatgctagtagtttgttttggttacaacatgaatcaggtttgtgcaattgtctgtcgctattctgcttttatttatcgcaattattccgcttgtcttcgcacaaatggtgacagctgacttctttcccgcgcttcagagggaccgttcggtgtcgcaagtggtggcgaaaaactcaccacgacaagtggcggaatgtcaaaacgcgacaatagttcgattggtgaacgagtttacaagatctaaaaaatactaataataatttcgtttcgttacaactggcctttacacgaattaacgataaaaaaaaacctagatgctgtagtttcagcggcattacggaatggtttacaaaaaatacacatatgacaaaataatgatcttcagaaaaaccaagtcaaataaaaattggaacatatattttctgattggaagagcgatcgatatctgcgcaaaaaacagctgtcgactttctgccagtaacgatagtttcgatacaaacttgcatcaagtgccatctccagctgctccctgcaattgttgtgtggtgttctgtattttctttgtaaatagttggagtaatgctgcacctgacgggccagagttacaatgctcgcgacatcatccggaacatcttctcgccgctgatcggcgtgctgtccagtccacaggcggacgagatttgccaccggaacaacctctccttcgtggaactcctgcagccgttcgcaaagttgccaaatgatggtgagtgaatgggatagtgaatggtttgtgtgtaagggggcgtgcgggtgaggtaaacaaggcatagacgcggctaagaaaataggtcttttctatggaactttcaaccgattcgacatggttatttaacattttgcatacaaagtagttgtttaagggttgttatggtgtggatgacatgtttaaagctcagaagttggtaaacgttgattctaacattgttgataataaacttaaattgccaacaaattctaaatggccaaaaattaaatgcatttgtactcctttctttagcacactttcgcgacgtgtccggaacgagtgtatcggtgcgtggactccgtctcaatttctgtgatgtggactggcggccgccgcaaacaatttt

SEQ ID NO: 42059 - DNA, 1510 bp, DROSOPHILA
agcgcgggaaagaagtcagctgtcaccatttgtgcgaagacaagcggaataattgcgataaataaaagcagaatagcgacagacaattgcacaaacctgattcatgttgtaaccaaaacaaactactagcattacagtacatatatcaagtatttgctgagcgttttgcaggtgaatttcgcaaagcaattccctagtcggacaaaagcagaacctctaaaaaaagcgcgcagtcgaaggagtctttaaaatatcggtctacgctctgcaatctccgaggtacagtcatggccaaggtgcacatcaccaacgtggtggtgctggacaacccgagcagcttcttcaacccctttcagttcgaactcacgttcgagtgcattgaggagctaaaagaggatctagagtggaagatgatctatgtaggctcggcggagtccgaggagcacgaccaggtgctggacaccatatacgtgggacctgtgcctgaggggcgacacatctttgtcttccaggcggatccgccagacgtcagcaagatcccggaaccggatgcggtgggcgttaccattgttctgcttacctgctcctaccgcggccaggagttcgtccgcgtgggctactatgtgaataacgactacgctgacccggagatgcgcgagaacccgccaacaaagcctcttttcgagaagctgacgcgaaacatcctggccagcaagccgcgcgtcacccgattcaaaatcaattgggactacgggcacatcaacgggaatggaaatggcgtggagaacggccatcaagatgagatggccaccgatggaccgtccacatcggaggcggcttcagcagttatccatcccgaagatgataatagtttggccatgccaatggagaacggaatcaaggccttgaacgagaactccaactcactggccatggaatgttgagagctgccggcagtccgaacaatgaccacactaacacactgtctctcacttaaaccaacatgggcaacaatggataacttagcactcctggtcctcgtccctctttttacttctaagtaactaagattaaagcaaaaatatatgtatacattaaattatttcacaaaacatgcattttcttagctatatttgacttttctgtgcgcacttatttgtgtttgaagaatgactaatacgttcatggcaaagttcagttggccgtgttcaatagaaatgatacccttttttttattaagaaactctattatcaattattgcacttgtacagcattaatgcctaaatagaaataataagcatattcttgaaagaaactccgttttcaataattgaattttgtacagaactgattttttgtctaaatgatttatatgatttttttgttgtttaaaaacaagttaagtaaaaaatgggaaaaattcacatcagattggaagagaaatttaatattatcaggacggcattttattatatttaattatatctaaaaatattcataaacctgaaa

SEQ ID NO: 42060 - protein, 218 aa, DROSOPHILA
MAKVHITNVVVLDNPSSFFNPFQFELTFECIEELKEDLEWKMIYVGSAESEEHDQVLDTIYVGPVPEGRHIFVFQADPPDVSKIPEPDAVGVTIVLLTCSYRGQEFVRVGYYVNNDYADPEMRENPPTKPLFEKLTRNILASKPRVTRFKINWDYGHINGNGNGVENGHQDEMATDGPSTSEAASAVIHPEDDNSLAMPMENGIKALNENSNSLAMEC

SEQ ID NO: 42061 - DNA, 3532 bp, DROSOPHILA
agatttattgccgaagagagaatttcaaagtcggagactggtatggtgaccctgaccgatgaccccacctggataatcgatcccattgatggcaccatgaactttgtccaccactttccgtactactgcatctccgtggcctatttggtaaatcaggagacccagtttggtattatctataatccgcccatgaagaatatgtacacggcccaactgggcaagggtgctcaaatgaacggcgagatgataaggaccactggccaaaccaacctctccgcggccatggttctacaggagtacagctcgggcagcaatgaggcgcgtaaccaagtggccactgaaaattcccagcgactggtaaagaaaacccatgcgtgagtatttcaaatgtacagaatgtagtcggtttacccacataccaactacggcggattctttgtaggatgcgctctattggatcctccgccatgtgcttggcaatggtcgcctccggagtggcggatgccttctacaactttgggctgcacgtttgggatatggcagcaggcgctttgatagtcacggaggccggaggagtggtaatggatccggccggagaggagttggacattatgtcccgccgctgcctcgctgcctctactgactaccttgccctcgaattgggtaactgcctgcagcagaattatccatctccacgtgacgacgagccgcgttccgttaaccccaatgagtacgggcctgctccggagaccagggactttaccagccaaacggacttccccgattcggataccccagaaaccactgacaccgaaataggcggcgaaaaatcagcgacgccagctaactaattgaccaccagaaaggccagctttaaattgcattttaaaattttagttgtttaataaactgacaatgcatggtttttccatgttttgtttttacttgtaagatacctttttctaggcagctatgccttatcattctaatgatacgtttagatgtattttaaacacgctacacgtagaattttttatatcgaaatgggatccaatttgaatgctattttttccaaaattgtttcttgtaagtctttggtatgcggaagtcaatggttgtgtggtacaaatgggtatgttttagtatagatatgaaatttgattagatatagatatagatatgattacatgatggttaaagccattccaataatgcccaccttacaaatttttgatttaaaaacaaaagtatgaaattctacaataagaaaaaaatttttttttaactacaacccggtctattatccaatcagaaatatttggtattttattagtattttcccgagcttattggaataatttaacggtcgcgagctttggtcactttgcccatcatagtataatttaattaaaacttgcaacttttgatttgttagcggttcattgggagtccagaaatcacagaggcagcaccactgcaaaatgtcacacaacgtggacgtggaaaagtgcttagaggtggccagcaacctggtttccgaagccggaagggtaattagcagtggaaaataactcaatgagtgccttatggaagtttcctttttcccggtaactttcccagctcatcgctcgcaacaatgagcagcgacaggacttcgtttgcaagagcaatgacatcgacttggtgacccaaacagacaaggatgtggagcagctgctgatggacggcattcgtcgccactttccggagcacaagtaagattcgcgcagattttccggcttgcttttcaactttgcgagttgcaggttcatcggcgaggaggagagtagcggcgcggagggtgtcaagaagctgaccgatgagcccacctggatcattgatcccgtggacggcaccatgaactttgtgcacgcctttccgcactcttgcatctccgtgggtctgaaggtgaacaaggtcacggagctgggcttggtctacaatcccattctagagcaacgctttactgcgagacgagggcacggagccttctacaacgggcgcaggatccacgttagcggccagaaggaactgggcaaagcgctggttaccagtgaattcggtaccacccgggacgaggccaagatgaaggtcgtgcatgaaaacttcgagaagatggccaaaaaggcgcatgggtaagtcattactttatgctgtaatagatggaaatgtaactatttttttttaatactccagcctacgggtcctgggttcggcagctctcaatatgtcgatggttgctttgggagccgccgacgctaactatgaatttggaattcacgcctgggatgtgtgtgccggcgacttgattgtccgggaggccggaggcgtggtcatcgatcctgctggcggcgaattcgacatcatgtctcgaagggtcctggcggcagccacaccagagttggcccaagagatctccaaggtgctaacgcagtttaatccccttcctcgcgatgattaagagctggcacttgaacttcctatatatatatatgtatataagtcgaaatgggacttaactaaccaaaagcattttaaatataccgaccatgtacctaacaaacaaattgactacgcctagtcacggatattccaaataaacaaataacgattgtttcatgtattatatttgtgtttcaaaaacaaatttgcaaatcacctaagggacttctcgaagagcaattacctgcttatttcatatctcttgaaatagatccttacccgctgataagccgtaatacttttccattccattctatttccactttatcaaatcatacaaaggcgtttgtttgtttgtttgtttttctgtaattttattacaatctgcgtaagtatttcgctttctaattagtttttgcagtgttcttatcgtctttcgttatttatttttccagcgtagtgtaatgtatatggtgttccgttctattttttattttggctttaggtttttagtaaagcgagctggcctcgtatctaatatctatatgccctgtactacagaccatggatcctctatcaaataattttccgcagaacggggtattgctaggtcgagactgccgactcatcttcgatgtgtttagattgggtatgggtatggatcagtaaacaactaagcaatgtctcgcatattgatacatatatctggttggatctttgcactgtattcaagttgagcgattagtggacattagccattatatcgtaggaagtcggctgtaacttctgaacttctgtacttttgctgtagttgctgagtatattggactattagtaataccatttaaaatttgacacatcattgaaaaatgtaatcaaagctacggtaggttaaaaattgtatttatatatttattatatatatttatataatagttagttataagttaataatgtaattaaaaatctgttgctctttttattgtttttaatgctacattcacaaggttccattatgcgcactggtttacaaagttaacacagagatttc

SEQ ID NO: 42062 - DNA, 1047 bp, DROSOPHILA
gatgtattttaaacacgctacacgtagaattttttatatcgaaatgggatccaatttgaatgctattttttccaaaattgtttcttgtaagtctttggtatgcggaagtcaatggttgtgtggtacaaatggcggttcattgggagtccagaaatcacagaggcagcaccactgcaaaatgtcacacaacgtggacgtggaaaagtgcttagaggtggccagcaacctggtttccgaagccggaaggctcatcgctcgcaacaatgagcagcgacaggacttcgtttgcaagagcaatgacatcgacttggtgacccaaacagacaaggatgtggagcagctgctgatggacggcattcgtcgccactttccggagcacaagttcatcggcgaggaggagagtagcggcgcggagggtgtcaagaagctgaccgatgagcccacctggatcattgatcccgtggacggcaccatgaactttgtgcacgcctttccgcactcttgcatctccgtgggtctgaaggtgaacaaggtcacggagctgggcttggtctacaatcccattctagagcaacgctttactgcgagacgagggcacggagccttctacaacgggcgcaggatccacgttagcggccagaaggaactgggcaaagcgctggttaccagtgaattcggtaccacccgggacgaggccaagatgaaggtcgtgcatgaaaacttcgagaagatggccaaaaaggcgcatggcctacgggtcctgggttcggcagctctcaatatgtcgatggttgctttgggagccgccgacgctaactatgaatttggaattcacgcctgggatgtgtgtgccggcgacttgattgtccgggaggccggaggcgtggtcatcgatcctgctggcggcgaattcgacatcatgtctcgaagggtcctggcggcagccacaccagagttggcccaagagatctccaaggtgctaacgcagtttaatccccttcctcgcgatgattaagagctggcacttgaacttcctatatatatata

SEQ ID NO: 42063 - protein, 278 aa, DROSOPHILA
MSHNVDVEKCLEVASNLVSEAGRLIARNNEQRQDFVCKSNDIDLVTQTDKDVEQLLMDGIRRHFPEHKFIGEEESSGAEGVKKLTDEPTWIIDPVDGTMNFVHAFPHSCISVGLKVNKVTELGLVYNPILEQRFTARRGHGAFYNGRRIHVSGQKELGKALVTSEFGTTRDEAKMKVVHENFEKMAKKAHGLRVLGSAALNMSMVALGAADANYEFGIHAWDVCAGDLIVREAGGVVIDPAGGEFDIMSRRVLAAATPELAQEISKVLTQFNPLPRDD

SEQ ID NO: 42064 - DNA, 5004 bp, DROSOPHILA
aagatgtgtcgttcctttgtgggcgacgtttctctacattatgtaaatgtacttcatattaagtttaattttaacgactcatacgaattagcaataataataaaatgaaaacttgtaagaacgcttatgccctgggacttttattgaagatagtatcctcgtaagatataaacgttaaaatagggtctcattgatgaggcatataaaaataaacatatttttacaatcgaaatgaggattcgaaaattatatttgccatgaattccttctaatttcgtttagtttacttaaaatttcattctctacaagtgaatgtctaaaggcgatcatatcgagtgtcagcgagccaacagcctttgtatcctcttgtggggaggatcctccattccggagcgcagcatcttgagggccttctcctcccgcgaatcgataatgtggcacacaacctcggattgcttgcggaaagcgatcaatccagccgtgcccgtggacagatcgaggtggcggaagcgatcgatgtcgcaggtgcagccatcgaaaacatagaaccacgtggccgccgacctgttggtgggatgatgcctgaagaccacgtagtttccccacggcgtcatcgtgagcacccggttggccactttgaaggcggagctcagcacccggttcaggctctccacggttccactctcggatccggcgacggcgaggagatggggcgctcgactaaagccgggaaatttgaccggcattcgggacccgattccctccatggaatcctcctcggcatcgcgacagcaacagtttttgggatgttcgatagattgctctgcattccgaacattcatctttggataagggggtttttccttttggtctagttcgttaacaaagtttgaggccgccggtgtattcaggtgggctgcggccaaaggagctacgcccagactttttgacttatccacggattgctgcagtatgtgggtttgagtcgcctcctttttcgacggttcaatggcggtgtccgttttcatatttactttgcggagaagcattactcccttgctggcaattactccttttctgtcgcttgcttccttatttgctacctgtgtacgaatggcttctttggtgattgataagtcgagggcggggtttgctcccttggaatcatctactttgggtgccatcttccttgatggagttccgcgtggggaaaacttaccaggtgacctgtttctagacttggaacgtaaatgggactttatgggtgagccactgtccttagtattttctgattttatcataatctttccaggtgtaacatcttccttggatctgtatcgtagtgaggacacatccggaggaggactgcaaactgtgccaccagtttgtctggatgatttcacaatcttttttatagttctatcaggagaagacccttctctaggtttgcaacgttcgggggaagtggaaagaggatctctagaacacatgcctccagcctgccttttgaactgcattttttttgttgtaatcctctcaggaaatggctcttctctagatctagaacgtccaagagtgttgttctgagaacgattagacgatctgccaccaacttccctggtcttaatagtgcttctcacaatccttccagaaggtggtgctacgttaggtgtggtctttacaggagcctttgatggaggaaaatgggtcccgagttcagtttgcttagaggggagcacacttctttttgcaatcctatttgatgtattttctctagatttggtaagtccaggtgactttgtggatgaggatctgccacctgcttgcctgtttgcagacctactctttttatccaatcttggagagtctttatcatttggtgtcctactggcagtaggtaacattttgccggaggtgtcctttatgtcttgctctcttttggaaaggcccactctgcttttcgaattagtatttttgccctttggtcgtctctttaagggttccgtgcggaactcttcctcacaaaactcgcactctgcccctccattctgttgctcatccaggacttgaaagtgatcaatgtcggatttatctgtaagaagactaaccacatcctcctcatagtcgctgatctccgccagggatttgttacacactctgacgcattgctgctcattgaagaatatggtctcgttcaaggacttcacttcgcagctgtccttcccatcgggcatcggcaatagggcgtatccctctggacactcggcgagattacgtatacgcaccacgtggacatagtaggcagactgccggttggactccttcagcagctggtggaacacgctgagcatggtcagctggtcgcgaaacatgcgcaccgtggcccacttggcgccctcagccttgtcttccgccacatgggtgcccacgatggtgtgtcgatagggatcgacgaggtaatagaatccatccttaagccaaatggcatacatctgattgttgatctggaacaccacgttgccaagctccttgagagcctgcgagacgtgagcttcgaaatcggtaccaatgatgcggacgccacacctccagtgacccgttctcacattcggaattagctttagctccaacacaaactgtcccattcgaagttgggtcggaaaggtgtccaggtcaatgggtcgtcgatccctcaagcaatccgaccagcaacttctgcacaattccactccatagctgattaaacgatccagcatattagtgtcccagttggccgggtgatcgattttgctggccaggaccgagcccacggccaccatcaggctactgcgattcctcaccggatcgtctttgtttaacgataggtgcagagtgcccttcagataggcataactcttgtttaccaccttgaattcgatggatcgatggctggtgtcgcgcatatagatgcgtccatccggggtctctaggcgcacaaccaccagttcccggatgctgaactcatctcgcggagagattccgctcaagttactggccagatggacaacattatcaatggacttcaggcataccagcattgccactccgttatcctttacggttgccaggtcgtcctttgctctgcccttaacgtcaaggacgaaaaaaacccgtctacgccgccagatgagcaggtgacccactcgggtgagaagaagacagtagcggctggacttgaagaaactctgtaaaattgtccctagatttttgatgatatgcggcggctgctggtccaggggctttgatcctacccctagatagcggggttccaatgccaaagtaaaggtgtggccttctaggttgaaatttctcttgatccgcttctcttcgttggtgtagatctccggctccagtagtttgtgttcgtcggggtcgtcgtgcccttgattcacatccgagctggcccgaaataaatccgtgccctcctccagcagcatgtcgatcttctctgccgtccagtccgtttcgggcaggacataaatcaaggcgaatgccttcagataggtggcgaagttaagaacattcgcctcctgctgcttgggagaacatccgcagggattgtttacagtggcatttgagcagacgaggcccacaggacagcccaatgagtcggcctccacgtctgagcgattgggcaccttttcgcagaacttccagtgatcgcagctaggttccgtcctcagggatcctccgccgcaaaacttgctgcccagatctagatccgaatagctgagatacctaaggacgatcaggaggatggatcagtttaagcatttcacaaattctggagtactctccacgtattgctcgagttgctcatgctgatccgagggcaactgcccggggcgctggcaaaacgggcaagatcgtgttggctgataggcatcctaagatgtctgttacttaaattttgtacagcaaagatttgagatttgagtttttttctgtttttgttctaatgtaattgttgctgaatattgcacaaaggaagaattgatccagtattatttgatttaacggaatttcaagaaaatgtgtagtcaaagattatattaaaaaaaaataatataaaaaattataataaaacaaagtttcaggtttatgaatatttttagatataattaaatataataaaatgccgtcctgataatattaaatttctcttccaatctgatgtgaatttttcccattttttacttaacttgtttttaaacaacaaaaaaatcatataaatcatttagacaaaaaatcagttctgtacaaaattcaattattgaaaacggagtttctttcaagaatatgcttattatttctatttaggcattaatgctgtacaagtgcaataattgataatagagtttcttaataaaaaaaagggtatcatttctattgaacacggccaactgaactttgccatgaacgtattagtcattcttcaaacacaaataagtgcgcacagaaaagtcaaatatagctaagaaaatgcatgttttgtgaaataatttaatgtatacatatatttttgctttaatcttagttacttagaagtaaaaagagggacgaggaccaggagtgctaagttatccattgttgcccatgttggtttaagtgagagacagtgtgttagtgtggtcattgttcggactgccggcagctctcaacattccatggccagtgagttggagttctcgttcaaggccttgattccgttctccattggcatggccaaactattatcatcttcgggatggataactgctgaagccgcctccgatgtggacggtccatcggtggccatctcatcttgatggccgttctccacgccatttccattcccgttgatgtgcccgtagtcccaattgattttgaatcgggtgacgcgcggcttgctggccaggatgtttcgcgtcagcttctcgaaaagaggctttgttggcgggttctcgcgcatctccgggtcagcgt

SEQ ID NO: 42065 - DNA, 3604 bp, DROSOPHILA
attacattagaacaaaaacagaaaaaaactcaaatctcaaatctttgctgtacaaaatttaagtaacagacatcttaggatgcctatcagccaacacgatcttgcccgttttgccagcgccccgggcagttgccctcggatcagcatgagcaactcgagcaatacgtatctcagctattcggatctagatctgggcagcaagttttgcggcggaggatccctgaggacggaacctagctgcgatcactggaagttctgcgaaaaggtgcccaatcgctcagacgtggaggccgactcattgggctgtcctgtgggcctcgtctgctcaaatgccactgtaaacaatccctgcggatgttctcccaagcagcaggaggcgaatgttcttaacttcgccacctatctgaaggcattcgccttgatttatgtcctgcccgaaacggactggacggcagagaagatcgacatgctgctggaggagggcacggatttatttcgggccagctcggatgtgaatcaagggcacgacgaccccgacgaacacaaactactggagccggagatctacaccaacgaagagaagcggatcaagagaaatttcaacctagaaggccacacctttactttggcattggaaccccgctatctaggggtaggatcaaagcccctggaccagcagccgccgcatatcatcaaaaatctagggacaattttacagagtttcttcaagtccagccgctactgtcttcttctcacccgagtgggtcacctgctcatctggcggcgtagacgggtttttttcgtccttgacgttaagggcagagcaaaggacgacctggcaaccgtaaaggataacggagtggcaatgctggtatgcctgaagtccattgataatgttgtccatctggccagtaacttgagcggaatctctccgcgagatgagttcagcatccgggaactggtggttgtgcgcctagagaccccggatggacgcatctatatgcgcgacaccagccatcgatccatcgaattcaaggtggtaaacaagagttatgcctatctgaagggcactctgcacctatcgttaaacaaagacgatccggtgaggaatcgcagtagcctgatggtggccgtgggctcggtcctggccagcaaaatcgatcacccggccaactgggacactaatatgctggatcgtttaatcagctatggagtggaattgtgcagaagttgctggtcggattgcttgagggatcgacgacccattgacctggacacctttccgacccaacttcgaatgggacagtttgtgttggagctaaagctaattccgaatgtgagaacgggtcactggaggtgtggcgtccgcatcattggtaccgatttcgaagctcacgtctcgcaggctctcaaggagcttggcaacgtggtgttccagatcaacaatcagatgtatgccatttggcttaaggatggattctattacctcgtcgatccctatcgacacaccatcgtgggcacccatgtggcggaagacaaggctgagggcgccaagtgggccacggtgcgcatgtttcgcgaccagctgaccatgctcagcgtgttccaccagctgctgaaggagtccaaccggcagtctgcctactatgtccacgtggtgcgtatacgtaatctcgccgagtgtccagagggatacgccctattgccgatgcccgatgggaaggacagctgcgaagtgaagtccttgaacgagaccatattcttcaatgagcagcaatgcgtcagagtgtgtaacaaatccctggcggagatcagcgactatgaggaggatgtggttagtcttcttacagataaatccgacattgatcactttcaagtcctggatgagcaacagaatggaggggcagagtgcgagttttgtgaggaagagttccgcacggaacccttaaagagacgaccaaagggcaaaaatactaattcgaaaagcagagtgggcctttccaaaagagagcaagacataaaggacacctccggcaaaatgttacctactgccagtaggacaccaaatgataaagactctccaagattggataaaaagagtaggtctgcaaacaggcaagcaggtggcagatcctcatccacaaagtcacctggacttaccaaatctagagaaaatacatcaaataggattgcaaaaagaagtgtgctcccctctaagcaaactgaactcgggacccattttcctccatcaaaggctcctgtaaagaccacacctaacgtagcaccaccttctggaaggattgtgagaagcactattaagaccagggaagttggtggcagatcgtctaatcgttctcagaacaacactcttggacgttctagatctagagaagagccatttcctgagaggattacaacaaaaaaaatgcagttcaaaaggcaggctggaggcatgtgttctagagatcctctttccacttcccccgaacgttgcaaacctagagaagggtcttctcctgatagaactataaaaaagattgtgaaatcatccagacaaactggtggcacagtttgcagtcctcctccggatgtgtcctcactacgatacagatccaaggaagatgttacacctggaaagattatgataaaatcagaaaatactaaggacagtggctcacccataaagtcccatttacgttccaagtctagaaacaggtcacctggtaagttttccccacgcggaactccatcaaggaagatggcacccaaagtagatgattccaagggagcaaaccccgccctcgacttatcaatcaccaaagaagccattcgtacacaggtagcaaataaggaagcaagcgacagaaaaggagtaattgccagcaagggagtaatgcttctccgcaaagtaaatatgaaaacggacaccgccattgaaccgtcgaaaaaggaggcgactcaaacccacatactgcagcaatccgtggataagtcaaaaagtctgggcgtagctcctttggccgcagcccacctgaatacaccggcggcctcaaactttgttaacgaactagaccaaaaggaaaaacccccttatccaaagatgaatgttcggaatgcagagcaatctatcgaacatcccaaaaactgttgctgtcgcgatgccgaggaggattccatggagggaatcgggtcccgaatgccggtcaaatttcccggctttagtcgagcgccccatctcctcgccgtcgccggatccgagagtggaaccgtggagagcctgaaccgggtgctgagctccgccttcaaagtggccaaccgggtgctcacgatgacgccgtggggaaactacgtggtcttcaggcatcatcccaccaacaggtcggcggccacgtggttctatgttttcgatggctgcacctgcgacatcgatcgcttccgccacctcgatctgtccacgggcacggctggattgatcgctttccgcaagcaatccgaggttgtgtgccacattatcgattcgcgggaggagaaggccctcaagatgctgcgctccggaatggaggatcctccccacaagaggatacaaaggctgttggctcgctga

SEQ ID NO: 42066 - protein, 1174 aa, DROSOPHILA
MPISQHDLARFASAPGSCPRISMSNSSNTYLSYSDLDLGSKFCGGGSLRTEPSCDHWKFCEKVPNRSDVEADSLGCPVGLVCSNATVNNPCGCSPKQQEANVLNFATYLKAFALIYVLPETDWTAEKIDMLLEEGTDLFRASSDVNQGHDDPDEHKLLEPEIYTNEEKRIKRNFNLEGHTFTLALEPRYLGVGSKPLDQQPPHIIKNLGTILQSFFKSSRYCLLLTRVGHLLIWRRRRVFFVLDVKGRAKDDLATVKDNGVAMLVCLKSIDNVVHLASNLSGISPRDEFSIRELVVVRLETPDGRIYMRDTSHRSIEFKVVNKSYAYLKGTLHLSLNKDDPVRNRSSLMVAVGSVLASKIDHPANWDTNMLDRLISYGVELCRSCWSDCLRDRRPIDLDTFPTQLRMGQFVLELKLIPNVRTGHWRCGVRIIGTDFEAHVSQALKELGNVVFQINNQMYAIWLKDGFYYLVDPYRHTIVGTHVAEDKAEGAKWATVRMFRDQLTMLSVFHQLLKESNRQSAYYVHVVRIRNLAECPEGYALLPMPDGKDSCEVKSLNETIFFNEQQCVRVCNKSLAEISDYEEDVVSLLTDKSDIDHFQVLDEQQNGGAECEFCEEEFRTEPLKRRPKGKNTNSKSRVGLSKREQDIKDTSGKMLPTASRTPNDKDSPRLDKKSRSANRQAGGRSSSTKSPGLTKSRENTSNRIAKRSVLPSKQTELGTHFPPSKAPVKTTPNVAPPSGRIVRSTIKTREVGGRSSNRSQNNTLGRSRSREEPFPERITTKKMQFKRQAGGMCSRDPLSTSPERCKPREGSSPDRTIKKIVKSSRQTGGTVCSPPPDVSSLRYRSKEDVTPGKIMIKSENTKDSGSPIKSHLRSKSRNRSPGKFSPRGTPSRKMAPKVDDSKGANPALDLSITKEAIRTQVANKEASDRKGVIASKGVMLLRKVNMKTDTAIEPSKKEATQTHILQQSVDKSKSLGVAPLAAAHLNTPAASNFVNELDQKEKPPYPKMNVRNAEQSIEHPKNCCCRDAEEDSMEGIGSRMPVKFPGFSRAPHLLAVAGSESGTVESLNRVLSSAFKVANRVLTMTPWGNYVVFRHHPTNRSAATWFYVFDGCTCDIDRFRHLDLSTGTAGLIAFRKQSEVVCHIIDSREEKALKMLRSGMEDPPHKRIQRLLAR

SEQ ID NO: 42067 - DNA, 9105 bp, DROSOPHILA
aaatatatataataggtatataatctgaagttacaattaataaggataataatttatgtatttgagtgcgtgacaaattttcagttttaatgtttttgttaatatttttgttgatttttttcgtttgtttttgtttttgttttcaatagtcaactcctgtacaaaattgaaactttcaactgagaaattaaaggtagaaaacgaacgaaaggctcactaaaaatagaaaaaatttacaatacaaattttcttgaatattcttacatctaaagctaactatgcattttgcagtttatagttattacataattatttcatttttttgtgttttttatgtttgtttgtttttgttttttttttttcagtttttttcatgagttttttttgttttgttgctgtttgtaatgtttcaagagtctaatcgataaggttttcttgcataggcgtttcgattttcatttctgggctgctcagagcaacccgttggatgctgggagccacatgggcggcgcctgaggcgcccttgggggcgtggcagaggtgtaacaggtggagcgggggatggcgctgtttgtgggcaagggtcaggggtcaacgtcaacaaatccccgctgcggcatttgggcgagctttagtaaccactaaacattaactaaataggtaagtttgtatattattaattaattataataattcacacttttaacttaagactaccgtaattaataaaattatttgcaatttaaacgaaagcaaaaaattaggatagggacaactataattaagaagcagttctttttcgttttctcttccgtttttcccattgtctggggcattttttacgttttttttttgtgttcagctaagaattttgcaattttttttgttgttaattttcttcttttttttgttgttttgcttttccttttttgttgttgcttttagattatatgaccctttgatgccacagctggagatgtgctgccgccgtcaccgttcctcactgaaaatagttgtagaatccggtcgtggcctgtcccaactcccggatggccgcaaacggatccttctccagaagatcgttacgaccaaccgccggcgcgacttttccgcccgttcctgaaccagccacgcccgcctgcgcctgcgactgtcccggcgatggtcctgttccaacgcctccgccaaccaccgcctgtggtccctggctcagcacagccgcataggtggttgccgatgagccagaggactgctggtgatgattagctgcctccgagtgcggcacactgggcgccatcgcctggaacaggtccagttcgtggccgccgcccttcagcccattgaaattgttgtacagcaggccgtgcatatggtccgacgacttcaccgagtgatccaccaccgagttgtttgcctggaagagtgcctctatcaagttggcgccagcatccattccatgcatgttgttgtagtcaccatttccgcctccaatcccgtttccggtgtgcgcctggcggcgatacaagggcaccgagttgttgccattggtcagcattccattgttgttattactattgtgaccagcaactcctgcgccaccgatgttcaagcccacgttgttgtgcatgcccacgttgttgtagggcttgtcattgagcagagcatttccggctggtggggaataaatatattagtatggtaaatgacaaggctccctggcaacttatatttgatacttgacaatgggttgcaatcaaacccaatccttgtacactaattctcttaccgttgcccataaagttggtgtttccgacgccgctcagattacctccaccattgggcggcgcctggtgaagaccaggtccgcccagatgattgggataaagtggtccaggtcctagcggtggcttggcctgttgttgttgctgctgctgttgttgttgctgcatcattgcgaataggcggctttgctgctgctgctgttgttgctgctgctgctgctggagatcgactccgttcaaaccgttgctaagcggaggaccaggagcattgcccgtgccagctaccatgcccaggacatcgcgcagtatgggctgcgcaacatcattggctccattcataatcgaattgaaaacaagatcgatctgctggttgaagttctccagcggcggtgaagcatctacagattgctgtgggggctgctgctgctgttgctgttgaccctgtggatacatcatgggatactgtggtcgctgcacgtgcggattattgagcatcggattgttagccatcggtggctgcggtggcttatgttgctgctgctgctgttgcattgtggccatcacctggcgcagcatttccgcaaacttgttggcaccatcctgacccacggtttcaagcagtttaacgtaccacttgtattgctcgtctttcggattaaaagccatgtcatagatgcttacattgggtgggagtagctcgtgcgtcattggtccaaatctcatagagctcggagacggttgcttgccggcgtacataaacggattgggtggtggctgtggttgttgctgcggaggcggtggcggtgctcccggattgtagccactaccattgtgcctcagatagggaggtggcggcggtccgttctccatgggcgacatgggtccgttcggcacactgctgcccctctgcatacccatcggcggtgcctgcggctgttgctgcgatggaggcggcggtggtcctggtccgggtccataaagctgatgatgcggcaatgcctggccatggttgtacagcgacttcttggccaagtagcccagttcgctgggattccttagcaggtgagcagcagtcgaggcattcggcggcggtggcggcacactaccacctctcagtggaagagacgggtttgcattgagtggcggtggcaaaggacccggtccacgtccgggcgcgctaactggcggtggctgaggttgctgtggctgcttactgggcggcaacacactccacggattcgtttgcggcggcggaccccagagactggcattcggattttgtggcggctgctgtcctgggccttgattctgtccctgctgcggtggtcgccagtgctgcatggctggatattgtccgtatggtggcggtggacccccgccgccaccagctccgcctggctgctgtgtgggtggcggtccaccgggtggcattccacgcagatgcggcgccggtggcggtggtcctctcattcccatgtgtccgccaccaccaccgccgccgccgtagtgtggaggtgggcctggaccaggaccgggtcctccgccggttcctggtccagggccatttccagactttcctccgacggcagcggccatcatggccatgtgggtggagtacatgtgggctgtgagctgttgctgattggcagccatggcagcagccatttgattcatctggtgagcagcggccgcgggtccgggacccagcattccagctgcgttggcaaaatgagccggaggacccggcggtccatggccgccgtgtccgtgttgcggaccatttagatagagagcagcctgctcccgcagatatgcctccggttgaagggcacgcgggacgaactcgggagccagaggatttagcacatagccacgcttaagctccacgccatccagttgggagcgcaggttcgaccaagttaagccaaaaagacttttatgttcgtcgcagatttcgatgaaacgctcccacactttccggcagcgaccaatggaacaaagagccacgggatcaccaaccactgcaaccaacgactgggcacgagtaatagccgtgttcagcagcttggaattgctcaagaatccatagtctgcgtcggcatcgccaatgctggttgtggaagcggaaccaggggcacttccttggggcatgcaggtgcgtcgggttcgaactgtagagaggaataccgcccgaaactgtttaccctggacattgagcacacgttctacggatattccacccatgcgccgttttctcagctcggaacgaatgcgaaacacctgatccgagtagggagtcataatgccaatgctggtatcattcagtttaccccaagcactgggccaacgtttccgcagctcggaaaccctttccaccacctcataaacttcagcattattatagaaagcagttgagtttttatcctgaacatcctctccccgagtagtgaagaaggtcaagggataaaagcgatcgtgccgtggctgttttccggaggccaccagcttttgttcgtagaaaagctccgaagtgaaacggatgatggcctcgtgggcacggtagttctcgcacagcaggatcttgcaggggaagttggagggatagtggtcgtacagccgctccaacagcgaaatgtgcagcttgcgttccttggcaaaggctgagaacagttccggactcatttgcatgtgatctccagccaaaacgatccttgtagaatcattggccaaagcaagcggcataatggcctcgcattccattgcctgagcagcttcgtccagaaagatgtgagtgaacaatcccttgggcagacccaaagtggccaactccatgctgatactcagcgtaacaactacaattctatgacgcattatatcctccacagtgggccttaggaagttgccaactccatcggtgatgcagtatttttgcaccacaccgtttaccgtggctgaccatctcttatggtagtaaactcgcaacggtgtggcctccttcaaaccctcctcgatccacggatgcaggtattccttgatgtacaagtcagcggctgaattcgagtgcgtgcagatcagaattttggcctccggctgcgtgagcagttgtttgatagcttgggccagcgtgtaggtttttccagtgccaaagggtcctatcagcaggattggcggcaacttaatgctcagagctgtggtaatggcattcacggcctccctttgtttggcattcaacttcggttcacaggaatcggcccactgcttcttcggtgtccacggtatactcggttccagttccgtagccggaaagatcaaccggaaatctgtgatcttatccaccgcattgtgccactcacagtatggcattcggttcagctggaattgtatgtccacctccagttcggtatccgcctgcagagccattgcctccacacattttgcggatagtttcaagtaaatcacattcttgcctttgtcctcgatcaacgcttcgtaaactgcacgtttagttgggtctgctttcgaatcgggatcctcaggttttgagatatacacactgctgcagttcgagagaattaatctgccaggagacgtatcctccgaaatgtccttgcccaaacgcataagagcaaacagttcacctgccagggaatacttggccgtactggtggccattcccgcgggggtaagaatgtaattcgatgccactgtgagacgagtccttacattatacctcgctatctgctcatagcgggcaatctcctccactgacaacaactcgtggatgcgtgagcggtagttattctgcgtcaaccgcttctccacaatggtcgactgggtcagagtgaaagtggctgccctgggacagggatacctctccaatagctccctttcgtgttccaaatcgctgagatacgcttccgttttgagatgagtaccaatcgtcgtttcgaagcgtgtgagctgcgtattggcgacatcccatcgggtggcagaactgttaatgatgtcccgcttgatctcctcgattttctccgcatcgttcacgggcaacacatccacgcacagatgcctcacaagcaaaggctcctgacccacatcgaagcagatggcttgccgaaaggtgccgtagatctccgtgtgaaactcaactgtgatttcgtgaatcaaagtagcagagtcctcgttggaagtctccgattgcgatgaactgcctgccagccactcttggtctgatttgagttccatgctggactccgttggcttgcacatttttatggacttcagggcaaagtgatttcgatgggcatcctgcaagagggctaccgcttttagcggcttcttcgtctctaattggaagagccactcccgcttggaggtctttgagctaatgctagtcaccagctgctgctcacagcgtgcctccatgtccggcactcgctcgcacatcacccgctccggtgctgtcgcctgaatccaacgatccagcacttgctccgtgtacgacttgccgtagagctccttctcacaagccttctgcatccgcattcgccggtactcgaagcgctccttccactcgttcaactcatcctgtccatgggcctccacgcactgggctccataatgacagatgtgcgcctcgctgaacgtctcgcacagggaataggtgtccagtgtataaccacggggcggcggacgccacttccagtcacgacctaatcggaaagtaaaaacattatttagtttgaatgactggaaatttatgtatttagttattttttatatatataaaaatatatgtagccagaattcagttacgtgtgttgaatcatttagttagatagattttttatttataaaatatattgccatttaaatgttaatgttaattatgcaaacataaatggcaattttggcatttgcagaggcaaatgacctattaaacattggaggtgaatgaatgtataaacagtgcttcaatcttttcaaacaatgcatctctttacaccacattggcattctaattatagccatgtctatcaaatcataattctgacgctaaccagaaggttaaaatgtgcacagaaggctagaactgcacaactgcctttatccgatttcaatatgccctatttaaaatgctggctctgttttgagcactgaatgtttcgcctattacctcaaaatactcaccctcatcgctcatgatcaccttctggtgcgcctcggtctggcagtgctgtcgcagttcgttcctcgtctgaaaggtgatggtgcagtagctgcaggtggtcgatggagccgcctgatcgccctgatccgagccagatccgtcgccggagcccggctggtgttttcctgccgtgagcttcatggccgccagcagatcgttggtcttgtggagacttgtgctggaactggacatcgtgctgctgctgccagttgaggagctactgctgctgctcgcataactgccgattccattgccattctgctgctgttgttgctgctgctgttgctgctgctgctcccgcttcttcaagcccttgttgctgagcagcttgctgtacttgtccagcggcaggttgttggtggcccagtgatccagtttggtatccagtatagccatctcgtcctcgagacgggcgtgtgggatcttcagggcctgcgccttgtgctgcccgttcatgatcatctgaatgatggacttgtaccgctcaagggttttcgatatgtccgagtatatctgctggccgctcagctcgttgatccacttgctcaggaagatttcggcatcctgaaagaaagttggaaaagggtaatgattgcatagttccagtaaatttcagtatgtttggcacattgttacaatctcatacaaggctcattgaattttaaacttaagtcttggtaaatcatataagcatgtgcagtgaaatgaaaaaccttaaaaacaagagcagggataagctcttgtaaactccggattatacgtaccccgtacttgtgcatcttgaaaagagcgtggacgagccatcggcgtgccctggacacgctggccaggcactctgtttgctcggagagcagcgtgagcaccttgtaggcgtccgccagacaaccctcgaactttcccagctctaggaggcactcgcatcgtcccagtaggcaggcgatctgctggtccttctgggcccttgatcctgcactctggccaccgcttccctggccgggactgggcgcaatcagctggtcgtagagcgccacagcacgggcccaactccgtcgtcggaccatgtcgtgggcctgcatctccttctcggcggccatcgtttactggctggtgtttagtggctcctccgggtggtcagtcatgcatgtgtgaagttttcaggtccttgtcttgatcgctcgtctaagctctacggtaattctgtggggatagtttaaagttgtattcttgtattcttgatcattttattcagtgaatttatacttacacaatttaacagtttttgtgtggttaataataagaaatcgattatcgtttttacattaatgttttagatactttgcgggcattatgtttactgtaaagaaagatgtttggttttagtttttattttcatgttcgtatggcggatatacggcttatttatgtttttattgtgaattggttgagtgtaatgtttttagatttggttatgttattaatgttatgttatattatgttatatttttggttttatagagcacgtgttgttttctttcgtatttatgtttttaagtagttatttctcatgtagagtttactttcacttagttatttcaataaagcacatttattgtctttggtttataatagtactatacattaatgtatgttgtaatctttaatgtttataattaccgttgtgttcttgaaatttgcacacaatttcacatcttaagtattctagtcctgaattttcctattggcgatttcacattttagattactttaaagaccggcttgtttgtacggataattatttggatattgaagaattgattaaatcatcttcgttgactgccagtaatgttcgctaaatccaaaacagaaattgtttatatctcgcttcttatcggttcccaaacaattgtgtgtacttagtacaaatatacagacggatttatagagtgcgcctgcaactaagaatatatatgtatatatgtacatatgtatgataaacaatccaaagtgctgtgtctttatttttcgatttacacaattttcattctaattcggttacgcaaaatttcataagagcaattttcacactcgcaccgg

SEQ ID NO: 42068 - DNA, 6186 bp, DROSOPHILA
atggccgccgagaaggagatgcaggcccacgacatggtccgacgacggagttgggcccgtgctgtggcgctctacgaccagctgattgcgcccagtcccggccagggaagcggtggccagagtgcaggatcaagggcccagaaggaccagcagatcgcctgcctactgggacgatgcgagtgcctcctagagctgggaaagttcgagggttgtctggcggacgcctacaaggtgctcacgctgctctccgagcaaacagagtgcctggccagcgtgtccagggcacgccgatggctcgtccacgctcttttcaagatgcacaagtacggggatgccgaaatcttcctgagcaagtggatcaacgagctgagcggccagcagatatactcggacatatcgaaaacccttgagcggtacaagtccatcattcagatgatcatgaacgggcagcacaaggcgcaggccctgaagatcccacacgcccgtctcgaggacgagatggctatactggataccaaactggatcactgggccaccaacaacctgccgctggacaagtacagcaagctgctcagcaacaagggcttgaagaagcgggagcagcagcagcaacagcagcagcaacaacagcagcagaatggcaatggaatcggcagttatgcgagcagcagcagtagctcctcaactggcagcagcagcacgatgtccagttccagcacaagtctccacaagaccaacgatctgctggcggccatgaagctcacggcaggaaaacaccagccgggctccggcgacggatctggctcggatcagggcgatcaggcggctccatcgaccacctgcagctactgcaccatcacctttcagacgaggaacgaactgcgacagcactgccagaccgaggcgcaccagaaggtgatcatgagcgatgagggtcgtgactggaagtggcgtccgccgccccgtggttatacactggacacctattccctgtgcgagacgttcagcgaggcgcacatctgtcattatggagcccagtgcgtggaggcccatggacaggatgagttgaacgagtggaaggagcgcttcgagtaccggcgaatgcggatgcagaaggcttgtgagaaggagctctacggcaagtcgtacacggagcaagtgctggatcgttggattcaggcgacagcaccggagcgggtgatgtgcgagcgagtgccggacatggaggcacgctgtgagcagcagctggtgactagcattagctcaaagacctccaagcgggagtggctcttccaattagagacgaagaagccgctaaaagcggtagccctcttgcaggatgcccatcgaaatcactttgccctgaagtccataaaaatgtgcaagccaacggagtccagcatggaactcaaatcagaccaagagtggctggcaggcagttcatcgcaatcggagacttccaacgaggactctgctactttgattcacgaaatcacagttgagtttcacacggagatctacggcacctttcggcaagccatctgcttcgatgtgggtcaggagcctttgcttgtgaggcatctgtgcgtggatgtgttgcccgtgaacgatgcggagaaaatcgaggagatcaagcgggacatcattaacagttctgccacccgatgggatgtcgccaatacgcagctcacacgcttcgaaacgacgattggtactcatctcaaaacggaagcgtatctcagcgatttggaacacgaaagggagctattggagaggtatccctgtcccagggcagccactttcactctgacccagtcgaccattgtggagaagcggttgacgcagaataactaccgctcacgcatccacgagttgttgtcagtggaggagattgcccgctatgagcagatagcgaggtataatgtaaggactcgtctcacagtggcatcgaattacattcttacccccgcgggaatggccaccagtacggccaagtattccctggcaggtgaactgtttgctcttatgcgtttgggcaaggacatttcggaggatacgtctcctggcagattaattctctcgaactgcagcagtgtgtatatctcaaaacctgaggatcccgattcgaaagcagacccaactaaacgtgcagtttacgaagcgttgatcgaggacaaaggcaagaatgtgatttacttgaaactatccgcaaaatgtgtggaggcaatggctctgcaggcggataccgaactggaggtggacatacaattccagctgaaccgaatgccatactgtgagtggcacaatgcggtggataagatcacagatttccggttgatctttccggctacggaactggaaccgagtataccgtggacaccgaagaagcagtgggccgattcctgtgaaccgaagttgaatgccaaacaaagggaggccgtgaatgccattaccacagctctgagcattaagttgccgccaatcctgctgataggaccctttggcactggaaaaacctacacgctggcccaagctatcaaacaactgctcacgcagccggaggccaaaattctgatctgcacgcactcgaattcagccgctgacttgtacatcaaggaatacctgcatccgtggatcgaggagggtttgaaggaggccacaccgttgcgagtttactaccataagagatggtcagccacggtaaacggtgtggtgcaaaaatactgcatcaccgatggagttggcaacttcctaaggcccactgtggaggatataatgcgtcatagaattgtagttgttacgctgagtatcagcatggagttggccactttgggtctgcccaagggattgttcactcacatctttctggacgaagctgctcaggcaatggaatgcgaggccattatgccgcttgctttggccaatgattctacaaggatcatcctgctgtgcgagaactaccgtgcccacgaggccatcatccgtttcacttcggagcttttctacgaacaaaagctggtggcctccggaaaacagccacggcacgatcgcttttatcccttgaccttcttcactactcggggagaggatgttcaggataaaaactcaactgctttctataataatgctgaagtttatgaggtggtggaaagggtttccgagctgcggaaacgttggcccagtgcttggggtaaactgaatgataccagcattggcattatgactccctactcggatcaggtgtttcgcattcgttccgagctgagaaaacggcgcatgggtggaatatccgtagaacgtgtgctcaatgtccagggtaaacagtttcgggcggtattcctctctacagttcgaacccgacgcacctgcatgccccaaggaagtgcccctggttccgcttccacaaccagcattggcgatgccgacgcagactatggattcttgagcaattccaagctgctgaacacggctattactcgtgcccagtcgttggttgcagtggttggtgatcccgtggctctttgttccattggtcgctgccggaaagtgtgggagcgtttcatcgaaatctgcgacgaacataaaagtctttttggcttaacttggtcgaacctgcgctcccaactggatggcgtggagcttaagcgtggctatgtgctaaatcctctggctcccgagttcgtcccgcgtgcccttcaaccggaggcatatctgcgggagcaggctgctctctatctaaatggtccgcaacacggacacggcggccatggaccgccgggtcctccggctcattttgccaacgcagctggaatgctgggtcccggacccgcggccgctgctcaccagatgaatcaaatggctgctgccatggctgccaatcagcaacagctcacagcccacatgtactccacccacatggccatgatggccgctgccgtcggaggaaagtctggaaatggccctggaccaggaaccggcggaggacccggtcctggtccaggcccacctccacactacggcggcggcggtggtggtggcggacacatgggaatgagaggaccaccgccaccggcgccgcatctgcgtggaatgccacccggtggaccgccacccacacagcagccaggcggagctggtggcggcgggggtccaccgccaccatacggacaatatccagccatgcagcactggcgaccaccgcagcagggacagaatcaaggcccaggacagcagccgccacaaaatccgaatgccagtctctggggtccgccgccgcaaacgaatccgtggagtgtgttgccgcccagtaagcagccacagcaacctcagccaccgccagttagcgcgcccggacgtggaccgggtcctttgccaccgccactcaatgcaaacccgtctcttccactgagaggtggtagtgtgccgccaccgccgccgaatgcctcgactgctgctcacctgctaaggaatcccagcgaactgggctacttggccaagaagtcgctgtacaaccatggccaggcattgccgcatcatcagctttatggacccggaccaggaccaccgccgcctccatcgcagcaacagccgcaggcaccgccgatgggtatgcagaggggcagcagtgtgccgaacggacccatgtcgcccatggagaacggaccgccgccacctccctatctgaggcacaatggtagtggctacaatccgggagcaccgccaccgcctccgcagcaacaaccacagccaccacccaatccgtttatgtacgccggcaagcaaccgtctccgagctctatgagatttggaccaatgacgcacgagctactcccacccaatgtaagcatctatgacatggcttttaatccgaaagacgagcaatacaagtggtacgttaaactgcttgaaaccgtgggtcaggatggtgccaacaagtttgcggaaatgctgcgccaggtgatggccacaatgcaacagcagcagcagcaacataagccaccgcagccaccgatggctaacaatccgatgctcaataatccgcacgtgcagcgaccacagtatcccatgatgtatccacagggtcaacagcaacagcagcagcagcccccacagcaatctgtagatgcttcaccgccgctggagaacttcaaccagcagatcgatcttgttttcaattcgattatgaatggagccaatgatgttgcgcagcccatactgcgcgatgtcctgggcatggtagctggcacgggcaatgctcctggtcctccgcttagcaacggtttgaacggagtcgatctccagcagcagcagcagcaacaacagcagcagcagcaaagccgcctattcgcaatgatgcagcaacaacaacagcagcagcaacaacaacaggccaagccaccgctaggacctggaccactttatcccaatcatctgggcggacctggtcttcaccaggcgccgcccaatggtggaggtaatctgagcggcgtcggaaacaccaactttatgggcaacgccggaaatgctctgctcaatgacaagccctacaacaacgtgggcatgcacaacaacgtgggcttgaacatcggtggcgcaggagttgctggtcacaatagtaataacaacaatggaatgctgaccaatggcaacaactcggtgcccttgtatcgccgccaggcgcacaccggaaacgggattggaggcggaaatggtgactacaacaacatgcatggaatggatgctggcgccaacttgatagaggcactcttccaggcaaacaactcggtggtggatcactcggtgaagtcgtcggaccatatgcacggcctgctgtacaacaatttcaatgggctgaagggcggcggccacgaactggacctgttccaggcgatggcgcccagtgtgccgcactcggaggcagctaatcatcaccagcagtcctctggctcatcggcaaccacctatgcggctgtgctgagccagggaccacaggcggtggttggcggaggcgttggaacaggaccatcgccgggacagtcgcaggcgcaggcgggcgtggctggttcaggaacgggcggaaaagtcgcgccggcggttggtcgtaacgatcttctggagaaggatccgtttgcggccatccgggagttgggacaggccacgaccggattctacaactattttcagtga

SEQ ID NO: 42069 - protein, 2061 aa, DROSOPHILA
MAAEKEMQAHDMVRRRSWARAVALYDQLIAPSPGQGSGGQSAGSRAQKDQQIACLLGRCECLLELGKFEGCLADAYKVLTLLSEQTECLASVSRARRWLVHALFKMHKYGDAEIFLSKWINELSGQQIYSDISKTLERYKSIIQMIMNGQHKAQALKIPHARLEDEMAILDTKLDHWATNNLPLDKYSKLLSNKGLKKREQQQQQQQQQQQQNGNGIGSYASSSSSSSTGSSSTMSSSSTSLHKTNDLLAAMKLTAGKHQPGSGDGSGSDQGDQAAPSTTCSYCTITFQTRNELRQHCQTEAHQKVIMSDEGRDWKWRPPPRGYTLDTYSLCETFSEAHICHYGAQCVEAHGQDELNEWKERFEYRRMRMQKACEKELYGKSYTEQVLDRWIQATAPERVMCERVPDMEARCEQQLVTSISSKTSKREWLFQLETKKPLKAVALLQDAHRNHFALKSIKMCKPTESSMELKSDQEWLAGSSSQSETSNEDSATLIHEITVEFHTEIYGTFRQAICFDVGQEPLLVRHLCVDVLPVNDAEKIEEIKRDIINSSATRWDVANTQLTRFETTIGTHLKTEAYLSDLEHERELLERYPCPRAATFTLTQSTIVEKRLTQNNYRSRIHELLSVEEIARYEQIARYNVRTRLTVASNYILTPAGMATSTAKYSLAGELFALMRLGKDISEDTSPGRLILSNCSSVYISKPEDPDSKADPTKRAVYEALIEDKGKNVIYLKLSAKCVEAMALQADTELEVDIQFQLNRMPYCEWHNAVDKITDFRLIFPATELEPSIPWTPKKQWADSCEPKLNAKQREAVNAITTALSIKLPPILLIGPFGTGKTYTLAQAIKQLLTQPEAKILICTHSNSAADLYIKEYLHPWIEEGLKEATPLRVYYHKRWSATVNGVVQKYCITDGVGNFLRPTVEDIMRHRIVVVTLSISMELATLGLPKGLFTHIFLDEAAQAMECEAIMPLALANDSTRIILLCENYRAHEAIIRFTSELFYEQKLVASGKQPRHDRFYPLTFFTTRGEDVQDKNSTAFYNNAEVYEVVERVSELRKRWPSAWGKLNDTSIGIMTPYSDQVFRIRSELRKRRMGGISVERVLNVQGKQFRAVFLSTVRTRRTCMPQGSAPGSASTTSIGDADADYGFLSNSKLLNTAITRAQSLVAVVGDPVALCSIGRCRKVWERFIEICDEHKSLFGLTWSNLRSQLDGVELKRGYVLNPLAPEFVPRALQPEAYLREQAALYLNGPQHGHGGHGPPGPPAHFANAAGMLGPGPAAAAHQMNQMAAAMAANQQQLTAHMYSTHMAMMAAAVGGKSGNGPGPGTGGGPGPGPGPPPHYGGGGGGGGHMGMRGPPPPAPHLRGMPPGGPPPTQQPGGAGGGGGPPPPYGQYPAMQHWRPPQQGQNQGPGQQPPQNPNASLWGPPPQTNPWSVLPPSKQPQQPQPPPVSAPGRGPGPLPPPLNANPSLPLRGGSVPPPPPNASTAAHLLRNPSELGYLAKKSLYNHGQALPHHQLYGPGPGPPPPPSQQQPQAPPMGMQRGSSVPNGPMSPMENGPPPPPYLRHNGSGYNPGAPPPPPQQQPQPPPNPFMYAGKQPSPSSMRFGPMTHELLPPNVSIYDMAFNPKDEQYKWYVKLLETVGQDGANKFAEMLRQVMATMQQQQQQHKPPQPPMANNPMLNNPHVQRPQYPMMYPQGQQQQQQQPPQQSVDASPPLENFNQQIDLVFNSIMNGANDVAQPILRDVLGMVAGTGNAPGPPLSNGLNGVDLQQQQQQQQQQQQSRLFAMMQQQQQQQQQQQAKPPLGPGPLYPNHLGGPGLHQAPPNGGGNLSGVGNTNFMGNAGNALLNDKPYNNVGMHNNVGLNIGGAGVAGHNSNNNNGMLTNGNNSVPLYRRQAHTGNGIGGGNGDYNNMHGMDAGANLIEALFQANNSVVDHSVKSSDHMHGLLYNNFNGLKGGGHELDLFQAMAPSVPHSEAANHHQQSSGSSATTYAAVLSQGPQAVVGGGVGTGPSPGQSQAQAGVAGSGTGGKVAPAVGRNDLLEKDPFAAIRELGQATTGFYNYFQ

SEQ ID NO: 42070 - DNA, 6276 bp, DROSOPHILA
ctcacaaaaaagcaaaacaaattcaaacaaaagggcagtatgtaattataccagatggacattgtttttcgaaaacttccagtcttccaaaccgtaaatcagttgttttagccaagccccaaccaaagccaatatataattccggcaattaagcaacgagaatggatgatgcgaaattaacatattgccggatccagaagctaatcgatttatatccaaagtaatttacacacgcagtttcgatgacaaattcgttggtatttcgagttggcggcggcgctaagcatcaaaaaataagcaaacggcgcgaatccaaaagttcatataaattaaaagtcgcgaccgcgttttaaaacgcctcaatcgctgcggcgttgcgtcggtgtttggtttttcagcgcagtcaaacaagcatatgtttatatatattcgtacaaaagaccgcccgccacatacaatagcaaataacaaatggaataatagaagtaacaagagcgacggtgacgaaagcatttggcgataatggaacgataaaagagccatgccttttcgacttctgcaatgatatttcccgcagtctggccgatgatagtacacaaagacagtcgcgtgcgaccctcggaaaagtcgaatgccaaagtcccaatgcgagtatcgcatagtatttagtccacggcaaatagaagatagtgctggccctacactcggagaaaccagagctattggtttggggcacgaaacccgttcaccacccgcaaacctgtcgaataaacgaaaaattaacaaaaagtcaaagccaagagcgatctcaacgagttagtcttcgatctgtctcgagaccaacgcgactaccaacaaccaaatccgaagcttgtgaaaccagaaccagcccaaagttcagatacggagattcggtgactcggagaatcgcagatccgatcccctagcaattctacgcctataaagccgggccaacaaaatgccgcgttcgcatttcacccgacggcattgtctcgcgatgacgggcggactaattgcatcggcggtcataatctggtgcgtcgctcactcgacggtcgagtcgacggccaagctctacgatcccggcgctgataaatccacgctcgagctgctgcatgtggtaagtcagatcgataatcgcaagctataggagctaactattaaatgaaataaataagtaacagtagagtagattttagctaacctgcctctagatttaacacagggtatctaacactgaaaacatagaatttgaggtagagtttattaggcctatgccatatatctttttatagagcttttaatacattgtatatcttacgagtagtaaacctttccacatcaattaacgccactctgagtaattcagcgacggcaacatctttgccacacaaattcagctgataacacacattattgttgtcactcttaaattttgtttaccgcattgagaaattctggcattgacatttacgtgggcagtaaaaaccagcattttgttgataaagcatttgtttataatcgcgttaagcgaaagtgcaggcgctggcaaattttttttgtagtcgtgtgccagcccataattacgtttgtactacagtttagttttctgtcagcagataagacttagtccggttatttaatcggaaccatcagtacggaaagtgaactcgtttgataaagatatcacagagtagctggtggaatttccacgaatttccccttttttctactatagagctatcagctgcttagccatttatctgactgaattcattcagatactttgtacatataacagccgtgagatacactctgcgaagaacaatcgcacgaagtcaagcgtaaaagtatctttcgtatttcagttaatagctactcggtttgtacatacaagtttgtactagaaacctcagcgaaaccaattataaaacctcataaataattgtactgtattttagataatttatttattgtgatgcgcaattagattgccaattattttaagttatattaaaatgatcagaggcttagattaataggggctaaaaataaataggagtatataatttaaataaaaaaagtatagaaatataaaacgaacgacttgtggaatgcttattcgcctcgtcattatgtgtcttaattaacaagtccgcaaattatttaaaatgaacctgaataaaagcaaaaaaaaatcgcataaattatcagttcttccaaaataactcttactttaattaactcgattatacactctgctaactcattcgtctttcgaagacccacaaaagaaattaattacaaaacagcaatcaaaacaaaccaaaaacaaaaaacaggcttcccaaattactctttggccaaaaaccagtccgcagtcagtcgtaaaatattataaaataaagctgcgacgcacttttgatttttgtttgagctccgctcatccgcgattgattaactggaagcccacatatagtaggtagtccgatccagatccgagatctgaccttcaagtggggcgccttcttatcaacacgagggctagagcaatcaaacagaaaatacttccgcggaaatctgctctcgcacgaaccacagagtcttggattcacgtgataatcctcgtgaatcctcgtaatgctcgtcgatcgcttgataatgtaataaatgtatatacatatgttggtatatatgttggcgtatgtcgtgaatccgtttactaataaaaagtgtaattgccaaacttcaggtattccgacatggaccacgaacgccggcggatacgtatcccagggatccctatgtaaatgagacctactatccctttggctggggacaaataacaaatgtgagtggagaaaaagttgtgcagagcaaacttttgcctcgtcatccccattcccatctccatctctatacacatccccatccgcatccccatacccattcccgtatcccgcacccgaatccccttacccggcaaagcatttaaataaattgaaatgcaaatgtttttccggaagagggaagaggtggagggtgcggctgcattaacatatacacatgcatatgtttatgcaattgcaaaaatgcaaggcatttattattttataacacttctttccatctccgtctcggactcctcggataccccgactccctgcatcttggatccccacttcccgcgtcctctggtgttgtctcacgtgccatccgctcatgccatgcaataaatcaacgctgcagaatggcaaacgcgagctgttcaacattggtacttggctgcgtaagcgttatggcaaatttctggcgcccaactacagtcccgatgtgagtaagcagtcactaacgaaccgaaaaggcgcaacccttacacccctgcacagagagaaatttttgacagatttggaaattttgtataaatgaaggttcatttcagaggtgaagagagaatagaaatcgttcaccacaatcttccaatcgtaaatatagcgccgcaactaaaatagttatttaacagcaatcaagggaaacttttgttgatgcgcgttttatatttgattgaattatataacgagtgcaaaaacaataggtataatgtggattttacatccattacaagtaaattgatattaaatttatatatagtgtttcatatcattagaaaattaattatatataataatttaatttacaacaaaatatcaaaaagataaagataatttatattgcgagtaagagatttcactcgtgtataaaagaaagatcatcccttggagcaaagcagctgcaactagtttctctctgtgtactccaaccatattccccccatcacgtccgtggggttgctgcctgatagtgcggacgtttacaaattgcaaagctcaagcgcgcttggctcatcactcaattccttctctgctcttctcgttctgtttctgtttcttgcgttctgcttctccgctttctccgtaaccgtcaccctctccgcctcccttcccgccgacagtcggtccacgctcaggcgacgggagttccgcggacccacatgaccatgcagaccgttctggccgccttcttcccgccaaaaggcaccgacatggagtggaatagtcggtttaattggcagcccatacctgtcttctcccaggaactcaatgaggacacggtgcgtatacttaataactacgatgattaatcaatacaatcggctgcgcagagggtcaaaatgcggttggttatttgatgatgattaaatagctagtggttttttgacgcagtatatatctatgtattaaatgataaataaaaagcataggtttttaaagtaaatctgtgtgctgatttaagcccatcatttttggtaatatttttttatgcttttaatacgtggtttttgaatctgcatattttgattgtaagttcattggaagttaaaaggccgacattacaaatttaaatactaaaagctattgctataaaatatttaattctttcatttttacttaacactcttctaactattattaactcttattcagcttctgttggtgcggaaaccatgtccgcgatattttgaggccctcaacgaggtctacgagttgcccgaggtgaaagcggaaatcgaaccgtatctggagatgttcaaagagctggaagagcacacggggctgagctttaaggaacctgaggacgtgcagtccctctacttgactctgctcgccgaacaggagtggggtctggagttgccagaatggacgcacgcatacttcccggagaagcttcagttcctcgccgaacagagctacatctacaacgtgtacacgcccgagatgcagaagatcaagggcggaccttttctcaagaaaatgctcgatgagatgcagcagaagaagaacggcaccctgaaacccagtggcaggaagctcttcatctacgctggtcacgactcgacggtggtgaatgtactttccgccctgaagatctgggaacggcagatgcctcgctactcctcgatgatcctgtttgagctgcacaaaaacaaggagaccggcgactattgggtggagatctacttccgcaacgatcccaagggccaggctcagaagctcaccctgccaggatgcgagttccagtgccccctggacaaggtgctcgaattcgccaaggacgttgttcccacggaagcggatgacaagcggtgcgagtctcgcaatgaagccttcacagaaccacctctccgaggtccttaagaacgacaatatggtggatatagaaaatcgttgtggtgctacacttctcagggaatgggactgtacaaagtcctcgaacagcagtaatactttagttaggtccatagtttagcataggccgaataaaagtgcgtttaacatttgtctatgagaggtatttttttaagttttcaaggatacggtttgtcttaagtgtttagatactagattcgaaatgtaaggcctggaaacaaatgagagaaattgcagctagtgaaaatgcacttttttagcttacgggtacatactctttgacggatagtagatacttttaaaaataaaaagtacagatacaaatttacatatcgataacatacatgtttgaaagtttaataacttctctttttaatgaagggattgaaccttctccaactatgtgccagcaagcctagttctttaagttcatctgattggagttccgacttgccgttcgacgtttgcactcggatattgtcagccggcgtcttttgcgccccatgtggcagccaagttggctcatttccgccttgtggcgacagtcgaatgccgtcactgccattgcccaataggccgcttccgcttggcctttgccagcggcaaacgcaaacaacttccgcacttgtttagccagttggatgccccgcgccactccatcttgggttccatttctgtttcagttcctgctgccatctccacagctccacatttccacagccctacagcttcacatttccccgctgcccgctcatttttgctgggaggtgacatttttcgcattgcggtttaccataaactatttcattggggagtgttttccacctcgcccatttcattctggcccggctctaaccatctgctcgttcgccagttcgccattgtttactcgtgtgcgttgccatcgctcttccagttttcccgcttctcctctgcgcctgtgtgtgtgtcagtttttcctgctccgcgtgtgttggtgtgtgcatat

SEQ ID NO: 42071 - DNA, 1197 bp, DROSOPHILA
cgacggcattgtctcgcgatgacgggcggactaattgcatcggcggtcataatctggtgcgtcgctcactcgacggtcgagtcgacggccaagctctacgatcccggcgctgataaatccacgctcgagctgctgcatgtggtattccgacatggaccacgaacgccggcggatacgtatcccagggatccctatgtaaatgagacctactatccctttggctggggacaaataacaaataatggcaaacgcgagctgttcaacattggtacttggctgcgtaagcgttatggcaaatttctggcgcccaactacagtcccgattcggtccacgctcaggcgacgggagttccgcggacccacatgaccatgcagaccgttctggccgccttcttcccgccaaaaggcaccgacatggagtggaatagtcggtttaattggcagcccatacctgtcttctcccaggaactcaatgaggacacggtgcttctgttggtgcggaaaccatgtccgcgatattttgaggccctcaacgaggtctacgagttgcccgaggtgaaagcggaaatcgaaccgtatctggagatgttcaaagagctggaagagcacacggggctgagctttaaggaacctgaggacgtgcagtccctctacttgactctgctcgccgaacaggagtggggtctggagttgccagaatggacgcacgcatacttcccggagaagcttcagttcctcgccgaacagagctacatctacaacgtgtacacgcccgagatgcagaagatcaagggcggaccttttctcaagaaaatgctcgatgagatgcagcagaagaagaacggcaccctgaaacccagtggcaggaagctcttcatctacgctggtcacgactcgacggtggtgaatgtactttccgccctgaagatctgggaacggcagatgcctcgctactcctcgatgatcctgtttgagctgcacaaaaacaaggagaccggcgactattgggtggagatctacttccgcaacgatcccaagggccaggctcagaagctcaccctgccaggatgcgagttccagtgccccctggacaaggtgctcgaattcgccaaggacgttgttcccacggaagcggatgacaagcggtgcgagtctcgcaatgaagccttcacagaaccacctctccgaggtccttaa

SEQ ID NO: 42072 - protein, 392 aa, DROSOPHILA
MTGGLIASAVIIWCVAHSTVESTAKLYDPGADKSTLELLHVVFRHGPRTPADTYPRDPYVNETYYPFGWGQITNNGKRELFNIGTWLRKRYGKFLAPNYSPDSVHAQATGVPRTHMTMQTVLAAFFPPKGTDMEWNSRFNWQPIPVFSQELNEDTVLLLVRKPCPRYFEALNEVYELPEVKAEIEPYLEMFKELEEHTGLSFKEPEDVQSLYLTLLAEQEWGLELPEWTHAYFPEKLQFLAEQSYIYNVYTPEMQKIKGGPFLKKMLDEMQQKKNGTLKPSGRKLFIYAGHDSTVVNVLSALKIWERQMPRYSSMILFELHKNKETGDYWVEIYFRNDPKGQAQKLTLPGCEFQCPLDKVLEFAKDVVPTEADDKRCESRNEAFTEPPLRGP

SEQ ID NO: 42073 - DNA, 4429 bp, DROSOPHILA
acggttcgcggtgatggccattttcgagacgcatagggataaggaaaccggagagtactatgtggaggtaagaagacatgtagaagatggggaatctaataggtgcttgggtagagaaatcttctcgtcatcgaattcggtttaacagctagttggaaatatctcaaggttttcattgaaatcgcagctggggagaatctcacgattattatctttaattatattttatactataaattatgcgagtaacttaaaaatcttatttggggtctatcaaagcaagctatagcggaaaaaggcaacctgggatctgcatagtttaattattaataaatactataagtgaagttgcaaaacgaattttagtaataaccgaaaatataagtatgtttaaattcagtagcatctataatattttaatatagcaatcgtaactcatgcaaattaacatcctcattcccgatttccagatcttcctccgcaacgacgaggacggctgtctcgagcagctccagctgaaagactgcgaccgccggtgtccactggaccgcctcatcaagctgagtgccgatgtgctgcccacggagccggcggagcagagatgccggccacatgactcgaacttcgtggagccaccgccgcgcgtaatcgatcagaatggccgttagcgaaaagcgattgccatagcgaatttgcgcactcagtattacaaaggcgtcggcggggagtgagcggtgcaagaatgaaaaaaaaaaaaacataatattataaaaagcgtagtacaataaaaatccccaaaaaatacaggtcattgagttaattcttcggggggaaatcattttcgtgtgaaactaattagacgtgctgtttgtgaactgtttgctattgtagttgatgatttcgctgattgggcagctcgctcttcgccgctgtgagatgtgcggctgtgtgagtgcgggcacgagtatggcgaccacataatcgagacttaaaagcggtccgcgcttctattgatgcactcactcgacgcacaagccgcaagcaagccggtccacttaattcctaacgatccgctaatttaagtttgcgaaaatgcgaaagtttctcggtctgctgctcaccgtgagctgtgttctgatcgcccgcggcggcgtcatggagattgaagtgccgcaggaagtcacggaaggtcctggggatgtctctcaaagctcagcggaaataagccatgcgaaggacagtgttagcaactcaaccctgaagttggttcacgtggtgagtgagtggcgaacgtaaagaaagcgaaataattggcccaaaatatggctttttcgaaaaattaactcatgccgaattagggctcgttaaatatttggcaactatgccagtcagcagaccataaaattatccaaatgtgtcatagcttttaatcagagccattaacgtgtagtgacaaatgttataatggtgcgaaattaattggaataaagtgttctcttaagtaaaccacggctcacctgggttttccaatgagaaatcgctacaattctcttttagccaactactggccacagttcctaagccagtttgctgtttgtgtgacgtatacgtaatattgcatactgttccaagacctaaaaccggtttaatgaaacttaaactttacgatcacttaattattttatattcccatattgatttgcataatttgagctcaatatgagttgagtaagtaaatatcaagttaatgcataaatatttatttattgaaattaactgggggtcgagatttagtacaagcacagtatctggtgaaattttaattgtcttcgaaaaatcttcaaaaatgtgtaaattaacttttgctcttaaatattgaaacttaatcagaatttttgactcgcatatttccatatatgtactcacaagttatttgacaataagcttgtcgaatatttgtcacttagcaatacataaattaattaaaaacatgtgaaatgcgtacttaattcataaaagtacgtcaggctttcaaaatcaatgggatttgggtacagtcacaaatatgtatctcatttttattttccacagctttttcgtcatggtcctcgaactccagtgagcacttatcccaacgatccgtatatcaacgaaacctacgagcccttcggttggggagcactcaccaatgttagtacttatcaaacataaacaagactattatcgaagctaaaatgagattttaattttacagggtgctaaagtggagctgtataaaataggcaagcaactgcggcagcgctataaagatttcctcccggcgtattatcagcctgacgtacgataagatgagccatcccactgagctgtaaaatttatcgtagtgtttctatttcaggcgatccgtgcccaatcttcggagtcaccgcgcaccttgatgtctatgcaaatggtcctcgccggactctttccaccggagaacactcccatggagtggaaccagctgctcaattggcagcccatacccattgtgatggaaccagaggaaactgatgtggtaagagcagcagagctccactttaattagagttgaactatttatggattttctttttttttattcgcagcacattagaatgaaggcaccctgcccccgatacgatgagtctgttctggaggtaatagaacttcccgaggtcaaaaagctgcatgccgagagctcggatttactacgcgaactgaccactcacaccggactcaatattacccatgcccacgatgtcaccaatgtgttcatcaccctgctctgtgaacagactttcggcctgcagttgccctcgtggaccaatgactactttccggagaagatgctacccttggctgaaaagtcatatgtctacgatgcctatacgaccgagcagcgcaaaatgaaagggggtttcttcgtggagctgctgttgaagcaaatgcaggacaggatctccggagcattgaagccagccaatcgcaagatgttcctttcctgcggtcacgattggaccatcacaaatgtgctatccgccttgaatgtttgggaggctcagatgccccgcttctcgtcgttgattgcatttgagctgcatcaaaacccgcaaactggggagtatttcctggaaatctacttccaaaacgatccccacaaggagcctcagcagctgcagattcccggctgcgagaaacagtgtcccattggcaagttattggaacttaccaaggacataattcccgatgcgccttatgcagagttgtgcaaagcgaagggaactcaaggcggcgctaagataagctatcactagaatgctgattaatcatgattagtgatctagtatacagtattaatgttacttactaaatgaatatatgtaattgtgtaactgcttcgtgtaacttaatttcagtgtttggatgattggcacgtttgggatgtatcattaactaattaagtttggaagtgtgagtgcaactagttttataatgatactcggcgttaggaggcagatcataaagttattaatttaagcatttggctataaaataaatatttatcacactattttcttgctcaataaaacataataaaaagatccttttataatcgttaaagtaacacaatatttcttaccttattaaattaatggatttactttttgtttactacttaagcatcatagtttaggcagtgcatacttttgggctacggatattctaagaaaagttcttacgacaaatatatactcaaacaatatttgcacacttggtttcgatttaaagaacctcgctatatactatttcaaaaatgttacattttgatgtgaattaataattttcaagccgcatattttggaaagaaaacacctcagagagtttataaaatatgttatttataagtcaagtgagcatttatgaccagcatgagtgtaatgactgtaatgatatttctctggataattaacacatttatcatgaacatcttaatctaccctctcccttaagtccgcacatccatcatataaagttaattcgctctcattaaaattcaaacagttggcattcgaagctccactcacttgaatcggaagtaactcacaaaaaagcaaaacaaattcaaacaaaagggcagtatgtaattataccagatggacattgtttttcgaaaacttccagtcttccaaaccgtaaatcagttgttttagccaagccccaaccaaagccaatatataattccggcaattaagcaacgagaatggatgatgcgaaattaacatattgccggatccagaagctaatcgatttatatccaaagtaatttacacacgcagtttcgatgacaaattcgttggtatttcgagttggcggcggcgctaagcatcaaaaaataagcaaacggcgc

SEQ ID NO: 42074 - DNA, 1419 bp, DROSOPHILA
cgcgcttctattgatgcactcactcgacgcacaagccgcaagcaagccggtccacttaattcctaacgatccgctaatttaagtttgcgaaaatgcgaaagtttctcggtctgctgctcaccgtgagctgtgttctgatcgcccgcggcggcgtcatggagattgaagtgccgcaggaagtcacggaaggtcctggggatgtctctcaaagctcagcggaaataagccatgcgaaggacagtgttagcaactcaaccctgaagttggttcacgtgctttttcgtcatggtcctcgaactccagtgagcacttatcccaacgatccgtatatcaacgaaacctacgagcccttcggttggggagcactcaccaatggtgctaaagtggagctgtataaaataggcaagcaactgcggcagcgctataaagatttcctcccggcgtattatcagcctgacgcgatccgtgcccaatcttcggagtcaccgcgcaccttgatgtctatgcaaatggtcctcgccggactctttccaccggagaacactcccatggagtggaaccagctgctcaattggcagcccatacccattgtgatggaaccagaggaaactgatgtgcacattagaatgaaggcaccctgcccccgatacgatgagtctgttctggaggtaatagaacttcccgaggtcaaaaagctgcatgccgagagctcggatttactacgcgaactgaccactcacaccggactcaatattacccatgcccacgatgtcaccaatgtgttcatcaccctgctctgtgaacagactttcggcctgcagttgccctcgtggaccaatgactactttccggagaagatgctacccttggctgaaaagtcatatgtctacgatgcctatacgaccgagcagcgcaaaatgaaagggggtttcttcgtggagctgctgttgaagcaaatgcaggacaggatctccggagcattgaagccagccaatcgcaagatgttcctttcctgcggtcacgattggaccatcacaaatgtgctatccgccttgaatgtttgggaggctcagatgccccgcttctcgtcgttgattgcatttgagctgcatcaaaacccgcaaactggggagtatttcctggaaatctacttccaaaacgatccccacaaggagcctcagcagctgcagattcccggctgcgagaaacagtgtcccattggcaagttattggaacttaccaaggacataattcccgatgcgccttatgcagagttgtgcaaagcgaagggaactcaaggcggcgctaagataagctatcactagaatgctgattaatcatgattagtgatctagtatacagtattaatgttacttactaaatgaatatatgtaattgtgtaactgcttcgtgtaactt

SEQ ID NO: 42075 - protein, 410 aa, DROSOPHILA
MRKFLGLLLTVSCVLIARGGVMEIEVPQEVTEGPGDVSQSSAEISHAKDSVSNSTLKLVHVLFRHGPRTPVSTYPNDPYINETYEPFGWGALTNGAKVELYKIGKQLRQRYKDFLPAYYQPDAIRAQSSESPRTLMSMQMVLAGLFPPENTPMEWNQLLNWQPIPIVMEPEETDVHIRMKAPCPRYDESVLEVIELPEVKKLHAESSDLLRELTTHTGLNITHAHDVTNVFITLLCEQTFGLQLPSWTNDYFPEKMLPLAEKSYVYDAYTTEQRKMKGGFFVELLLKQMQDRISGALKPANRKMFLSCGHDWTITNVLSALNVWEAQMPRFSSLIAFELHQNPQTGEYFLEIYFQNDPHKEPQQLQIPGCEKQCPIGKLLELTKDIIPDAPYAELCKAKGTQGGAKISYH

SEQ ID NO: 42076 - DNA, 4717 bp, DROSOPHILA
cgattttattacttgttgtctttgccaagcactttcggttcgagatttagactttaataactctcgaatattagaataaatttagatataatcaaaggggccacgaacccttatctactcttcaccgtgttccagttatgcaagcgaagttagtgtgtaaaacttatttaaattgtaacagcctcacatagtttacacgcccctttgattactaacctaccacagtttaaatcgctttatatcagacctttagacatataccctcaaataacacgagctgcagcaatcttgtccgagattttatttaattaagccgtaatcaaagctgaatgtttgcatggcggttttcagttcagttatccgtatgtaaatttttttttatcacttttaactgaaagagttcattgcagacttgtgtagaaaaccattttcaactgaaaactagttatggataactattttttttttgtgcacttatacagatatagtgttgggggatgccccgaataatgcacaaaagtcgccagtaagcaaacttacccagtcatgagtcaggagataccgaaccactttgaatagtggccaggaactgaatcacccaaagtggaataatgaccatgcgagctgccaagaaaatttcgaactggaagacagtgggcggtacggtgctaaaaatagacccaaaatgggatgttggaactgtttttttgtgggcccgtgctactgcgttccgcaaatggtcgcacatgtcgtatacgtaattgcctggttcaatgagaaacgcccaattagctgggatttttttttcgattttttttttgtttcagcttggaagccagggcttgtaagctcggctcgaagccgagttcggtggaaagtggtcagcaacaaccacagcgatcacaacaacttgacacttgacgcaacaaaagccgaatagacgaacgttgatttatctctcttttaagttctccgtatcgagttgtcaacgctttattttagtttcagacgcgctgtgagttgcacgcgccttgcagctcgccccaaaattcgcatcaacaacaacggcaacaatcgattaaaaaaaatctggcagcaattaaacattgtaattatacaagcaaataagcaaagcgagcgccaaaaatcaatattacccaaatctcgtttttgcgcgattcggcatatcgactcttccggcttggtatcgatcggtataaaagggaatcaggcaccaaaatgatattcgctcggtggacgcgcaaacaaatgctcacaatgtttggcttgggagctgggctgctgggccttgtgattgtgatcggtgtgctcaacagcggcgtgtcctcgaaggacctcgactggaaggaggcgtccagatcgaagtgcttcaagacgcgtcccaacaccacgcactccaccttggaactggtgcacattgtgttcagacatggcattcgcaccccagtggacacttatcccaaggatccctacttaaacgacggcttcaagccaacgggctggggacatgtgactaacgtgagtgaattagcttagtgttctcagcaaaacatcattgaacggaagttatgccacttaactatgccatataaaccatatattaaaataaggcttgtttaaaaagtgttggtgcttacttgttttaacactattcaaaatatcttaaaccttcactttttgttctctttctgagtgttgatatagccataggcctagtctctcagttttaaagttatttgcaaaagtcttcttttagttatccaaaaatttacttaattgttgatatatatgacatataatttcggtttcaatttgataaaatcggactacaaaaacaatgaaaaattttaataaagaatagtttcgttgtttttcatcataaattgttttcattcggtattcatcagttttttttaagcataattactttcatctttgtcatttttccatttgcaaaaaagttaaatatgaatcaacacattttgaaaatattcttttgaaagatttcacttccgataagcgttaacaacctattctaagaaaagtaaaagaaacaatttacttttactaagttgttttgcttatcaatgcaaaaataaaatactatcattagggcattttaaaaggattatttggtacgtaaatttaagaagacacttccaaatcttaattcgtaataataatgtacataaacaactatttacctaacttgcagtcaggaaaacgggaactcttcgaaatgggtcgctggctgaatcgaagatacggcgagtttatgggtccttattacagaccggatgtaagttttttttaagtaccttttaattccgtatttaaaatgattccgttttctcagcgcctgcatgcccaagccactgcctctccgagggccatgatgtctttgcaaacaacactggccagcatgtttgagccgcggggaacccccatggagtggaataagcacctcaactggcagcccatcccaatcgtgtcggaacccctggatgaggactcggtgggtattcatctcccagttgcgtataaattaaattaaatgtgtgatttagctcctgctggtgcgcactccctgtccccgctactttgaagccttggaagaggtctttaagagaccggaagttatcgctgaaaccgagccctacgaacaaatgttccgcgagctgacaaatctgactggaaaggcgatccagagtgccgaggatatcaattccctatacataaccctcctcgccgaacaggaattcggctacaagttgcccgactgggccaaggactacttccccgatcgcatgcagtttctggccgagcagagttacgtctacaatgcgtacacccccgagatgcagaagatcaagggcggaccgtttctgaagaggatgtacaaggagatggtcgccaagagggcgggtagcctgaagcccaaggatcgcggtatgttcatatacaccggccacgactggaccgtcggcaatatcctgatggccttgggtgtgtggaagcgccagatgccacggttcgcggtgatggccattttcgagacgcatagggataaggaaaccggagagtactatgtggaggtaagaagacatgtagaagatggggaatctaataggtgcttgggtagagaaatcttctcgtcatcgaattcggtttaacagctagttggaaatatctcaaggttttcattgaaatcgcagctggggagaatctcacgattattatctttaattatattttatactataaattatgcgagtaacttaaaaatcttatttggggtctatcaaagcaagctatagcggaaaaaggcaacctgggatctgcatagtttaattattaataaatactataagtgaagttgcaaaacgaattttagtaataaccgaaaatataagtatgtttaaattcagtagcatctataatattttaatatagcaatcgtaactcatgcaaattaacatcctcattcccgatttccagatcttcctccgcaacgacgaggacggctgtctcgagcagctccagctgaaagactgcgaccgccggtgtccactggaccgcctcatcaagctgagtgccgatgtgctgcccacggagccggcggagcagagatgccggccacatgactcgaacttcgtggagccaccgccgcgcgtaatcgatcagaatggccgttagcgaaaagcgattgccatagcgaatttgcgcactcagtattacaaaggcgtcggcggggagtgagcggtgcaagaatgaaaaaaaaaaaaacataatattataaaaagcgtagtacaataaaaatccccaaaaaatacaggtcattgagttaattcttcggggggaaatcattttcgtgtgaaactaattagacgtgctgtttgtgaactgtttgctattgtagttgatgatttcgctgattgggcagctcgctcttcgccgctgtgagatgtgcggctgtgtgagtgcgggcacgagtatggcgaccacataatcgagacttaaaagcggtccgcgcttctattgatgcactcactcgacgcacaagccgcaagcaagccggtccacttaattcctaacgatccgctaatttaagtttgcgaaaatgcgaaagtttctcggtctgctgctcaccgtgagctgtgttctgatcgcccgcggcggcgtcatggagattgaagtgccgcaggaagtcacggaaggtcctggggatgtctctcaaagctcagcggaaataagccatgcgaaggacagtgttagcaactcaaccctgaagttggttcacgtggtgagtgagtggcgaacgtaaagaaagcgaaataattggcccaaaatatggctttttcgaaaaattaactcatgccgaattagggctcgttaaatatttggcaactatgccagtcagcagaccataaaattatccaaatgtgtcatagcttttaatcagagccattaacgtgtagtgacaaatgttataatggtgcgaaattaattggaataaagtgttctcttaagtaaaccacggctcacctgggttttccaatgagaaatcgctacaattctcttttagccaactactggccacagttcctaagccagtttgctgtttgtgtgacgtatacgtaatattgcatactgttccaagacctaaaaccggtttaatgaaacttaaactttacga

SEQ ID NO: 42077 - DNA, 1508 bp, DROSOPHILA
agtttcagacgcgctgtgagttgcacgcgccttgcagctcgccccaaaattcgcatcaacaacaacggcaacaatcgattaaaaaaaatctggcagcaattaaacattgtaattatacaagcaaataagcaaagcgagcgccaaaaatcaatattacccaaatctcgtttttgcgcgattcggcatatcgactcttccggcttggtatcgatcggtataaaagggaatcaggcaccaaaatgatattcgctcggtggacgcgcaaacaaatgctcacaatgtttggcttgggagctgggctgctgggccttgtgattgtgatcggtgtgctcaacagcggcgtgtcctcgaaggacctcgactggaaggaggcgtccagatcgaagtgcttcaagacgcgtcccaacaccacgcactccaccttggaactggtgcacattgtgttcagacatggcattcgcaccccagtggacacttatcccaaggatccctacttaaacgacggcttcaagccaacgggctggggacatgtgactaactcaggaaaacgggaactcttcgaaatgggtcgctggctgaatcgaagatacggcgagtttatgggtccttattacagaccggatcgcctgcatgcccaagccactgcctctccgagggccatgatgtctttgcaaacaacactggccagcatgtttgagccgcggggaacccccatggagtggaataagcacctcaactggcagcccatcccaatcgtgtcggaacccctggatgaggactcgctcctgctggtgcgcactccctgtccccgctactttgaagccttggaagaggtctttaagagaccggaagttatcgctgaaaccgagccctacgaacaaatgttccgcgagctgacaaatctgactggaaaggcgatccagagtgccgaggatatcaattccctatacataaccctcctcgccgaacaggaattcggctacaagttgcccgactgggccaaggactacttccccgatcgcatgcagtttctggccgagcagagttacgtctacaatgcgtacacccccgagatgcagaagatcaagggcggaccgtttctgaagaggatgtacaaggagatggtcgccaagagggcgggtagcctgaagcccaaggatcgcggtatgttcatatacaccggccacgactggaccgtcggcaatatcctgatggccttgggtgtgtggaagcgccagatgccacggttcgcggtgatggccattttcgagacgcatagggataaggaaaccggagagtactatgtggagatcttcctccgcaacgacgaggacggctgtctcgagcagctccagctgaaagactgcgaccgccggtgtccactggaccgcctcatcaagctgagtgccgatgtgctgcccacggagccggcggagcagagatgccggccacatgactcgaacttcgtggagccaccgccgcgcgtaatcgatcagaatggccgttag

SEQ ID NO: 42078 - protein, 412 aa, DROSOPHILA
MLTMFGLGAGLLGLVIVIGVLNSGVSSKDLDWKEASRSKCFKTRPNTTHSTLELVHIVFRHGIRTPVDTYPKDPYLNDGFKPTGWGHVTNSGKRELFEMGRWLNRRYGEFMGPYYRPDRLHAQATASPRAMMSLQTTLASMFEPRGTPMEWNKHLNWQPIPIVSEPLDEDSLLLVRTPCPRYFEALEEVFKRPEVIAETEPYEQMFRELTNLTGKAIQSAEDINSLYITLLAEQEFGYKLPDWAKDYFPDRMQFLAEQSYVYNAYTPEMQKIKGGPFLKRMYKEMVAKRAGSLKPKDRGMFIYTGHDWTVGNILMALGVWKRQMPRFAVMAIFETHRDKETGEYYVEIFLRNDEDGCLEQLQLKDCDRRCPLDRLIKLSADVLPTEPAEQRCRPHDSNFVEPPPRVIDQNGR

SEQ ID NO: 42079 - DNA, 4187 bp, DROSOPHILA
cagaaggcattgaccacttgagctgcaaagtgcatgctcagcattcccacgctccgcgatcgggcttatgtataagcgttagatcggtattactggggcgctggagtgcttacgtagtttttggtggtctttttgtatatttgtatatttatatttattatgacaaagtgtcacaatgtattgacgctatgttatacccaatcatctattgtattcttagggtagattagtccaatatgctacaggcgacatcaggttcaagttttcgaaccgaaagcaccagatccataatccaaatgtttaaatccgtaagttttgaatcttagctttctgccctatatacgaattgtattttattcacaggacgtccttgtcttggcctgaactgcttggtgcgccttggcctacattgctaacgtggcttactctcctcctctggtctgactgtcgtagtagctggtctctctccagttgtgaccgctgccagttgtcaggttaatgaatgaaatcgctcttgctcctgtgattgctcccgtggctgctcctctggctgtgtctctcttggccctgtacgcagccgctcctctggctgcgccatgacctactcctcgcctttggcttactccgcaccactgagctacgccgttccatctgcaccgctccttatttaaattactaagctgtgatcacctcggagacaacggaaataaatggatattcaattgtatattcctttttaaatacgcttcaaattaatatttatttcaatgaaataattgggagtccggggaaagctttgtaaacttaaatctgggactatgcaaattatacctaatagtatacataataatagtatgataataagttacgtagtatggacaggcactgtaatcaaatctaaagcatcccaaagaaccccatcctaaactgtcaagggagttttcactcattctatttgtatacaagcttatagaggctcaactaaagcttgataacagcaatggcgaagaagtttagtaacataatattctatctgaccctgataatcatagccatctgtgtggcctgtatctggatgttctcgggcttccgtcacgaatatggcaaattcaacatgatcctggttgccttcttggccgttactttacttcagatcctaatctttacgcccattaagttcacaattatgtcgctggatgccgccttctggccggcccaccaagcaccggagactcccgacgagaatgccaatgtggacacgttcatggacaatctcagactgcgcctccggacgctgcggagtgagctgatgatcacggagaggcatcggaacgagagggtcaacctgaagtatcgcctgattaccgaggaactttggctcacgggcaagctgttcctggtttacttcttcatggccttggctttcttcgatgagttgctgtactttaacacagaggccacggagttactgttccaatgtaatcatggggatgcgttcggactattgagtgtgggggatgtgccggatatatatttttttgtggtgtcctcgttagtgctggcctttacggatggcaagaacaccagtggcggagctccttggatccatgcggagggcactagactactgggcgtggtgagactgaggcagctgaggacagagagcaaccgattgggtctatcgcttcctgtgttcactgagcgggacttttcggagagctggacactgccctacgaaagggttccctatacggacaagtactggcccatctacacaccctggctgcccagtgtttctgttgctcgggacaacctacttatgggcattaaccacgtggggcacatgttcaactatccggaatcgaagggctacaaggtactgctctcggacacccgccacaaaagcctgaaaattattgattacttgatgaagaaaaactggctggatgcgaatacgaccgctttgttcatggatttcagcttgtacaacgcggatgccaacacctttaccgtgtgcaccttgtgggtggaaaagttcccttaccagtatcctgatggccacacgaggatcgagagtcacacctttgtggagcaactgcgagagtttacgaagttcggaatgctaatggtgtttgtctttgtcgtcacgtggctgcagttcaccaaggcgttcttcctgaaggtctggtacgatcctcgacagttgaagaccctgtgggtccaggtggatgcaatgatcgtggcactcagcctcgttgtggggatgatcatgtcggtgcgggataacttggttcaaaagatgatcaagagtgttgaaatcgccgttgtggtggactttctggactttcgggagccagcccagctcgcctaccttgaggatgtggtcacgggattggccgtggccttggtcactatgcgtttgtggaaagtgttgcagttttccgccaccttccaactgttcaccaagacaatcgctatggcgtgggacgcgttgctctgcaccttcgtaataaccgtgattttcatcattgcaattggcattgcgacggtaaccatcaatggcaactataccagcaacttcagggacttccccaagggcattgttacggtcacctgctttgcctttggctatacgaatttggtatacccaccggatatcttttacggcggagagtggctgggcatcttattgtataccataatgggattcgtggtcaagtacatgctgatcaacttgatcgtttccatgatgagggatcagatggccagtgtcaaggcggatagggataagaaagtgaggcagcgcataacattctggcaattcctgcgcgttgaatatgcccactttattaactacatcgtaaaagtgttccactgccaaaagggatatcagcgaaagaatcgcacagttgcacagaacatccaacgaaaactgaatagtaatgagcttaagcgacgaaagacgaagattagttcaatttattccgagacaatatatgtcatgccgatagacaaggatctggagcagatgaaatatagggagcggatcgagcgaaccttcactctggccgccatcctccacacccaaatggagctcatggagaggcttatgttcggtgacgaagaggggaacctgccaagtttggaccaggaagacgagcaggttccagagactgaggaggactgaagaacgacagcttaactgcagtttatacagtgcaagggatcatagggattctaagagattcatgtgaaatagaacttatggtagtaccttcatcaaggtaaaatgatgatgtgtacatacgtgatgtttggtaacattttctgcacagttgaaaccaaatctcggcaaaagtccctaatagttaaacactacttaggatagttttgcaggatccttccccatccgtgcagttttgtgattttttgtttatgtcacggctaaataattatgcgcaaacaggcaaaacttttgacttgaaaaggcttttagggcaatttggcgcttgctttgttcggcctgtttgccatccgaggattctggctgagctccaagtgcccgaaccaagtgacttataaaagggggagtggcacagccctcactattgttatgaagtaagcaaataaaaatttaatactgcaagcttttaggccgagccgcgactgcaaactattcgctattcgctgcgaaatctgagctaaatgccagctctaaaaaggactcggcaaacattgtcgagcacatcctgtaaactaaacaattgtcaaaagtttcgggtcctttttctatcagcatcagcccacagacagatagtctggcaagtgtttttctatatctttcctgtcgcacttacgtcactcgggggattggggaaaacttttataattattagcaacaaatgagcagtgacagagcgcttctgccgtgactgtaactttccaggattttcccacattcaggatccttcccttttatttgtgcagtgcccagacggcagaaatcacaaatgatccccgccctcaatttaaaagttttaactacctgactatttctccattttcctcggcgtaagggtgtaagggtatgtgtgtgtgtgttttagccgaagacaaacggtaaaagaaggagagtggccaaatcaaaagccgtgtgcattttcccctgccattgtgttagtgctcca

SEQ ID NO: 42080 - DNA, 2187 bp, DROSOPHILA
atggcgaagaagtttagtaacataatattctatctgaccctgataatcatagccatctgtgtggcctgtatctggatgttctcgggcttccgtcacgaatatggcaaattcaacatgatcctggttgccttcttggccgttactttacttcagatcctaatctttacgcccattaagttcacaattatgtcgctggatgccgccttctggccggcccaccaagcaccggagactcccgacgagaatgccaatgtggacacgttcatggacaatctcagactgcgcctccggacgctgcggagtgagctgatgatcacggagaggcatcggaacgagagggtcaacctgaagtatcgcctgattaccgaggaactttggctcacgggcaagctgttcctggtttacttcttcatggccttggctttcttcgatgagttgctgtactttaacacagaggccacggagttactgttccaatgtaatcatggggatgcgttcggactattgagtgtgggggatgtgccggatatatatttttttgtggtgtcctcgttagtgctggcctttacggatggcaagaacaccagtggcggagctccttggatccatgcggagggcactagactactgggcgtggtgagactgaggcagctgaggacagagagcaaccgattgggtctatcgcttcctgtgttcactgagcgggacttttcggagagctggacactgccctacgaaagggttccctatacggacaagtactggcccatctacacaccctggctgcccagtgtttctgttgctcgggacaacctacttatgggcattaaccacgtggggcacatgttcaactatccggaatcgaagggctacaaggtactgctctcggacacccgccacaaaagcctgaaaattattgattacttgatgaagaaaaactggctggatgcgaatacgaccgctttgttcatggatttcagcttgtacaacgcggatgccaacacctttaccgtgtgcaccttgtgggtggaaaagttcccttaccagtatcctgatggccacacgaggatcgagagtcacacctttgtggagcaactgcgagagtttacgaagttcggaatgctaatggtgtttgtctttgtcgtcacgtggctgcagttcaccaaggcgttcttcctgaaggtctggtacgatcctcgacagttgaagaccctgtgggtccaggtggatgcaatgatcgtggcactcagcctcgttgtggggatgatcatgtcggtgcgggataacttggttcaaaagatgatcaagagtgttgaaatcgccgttgtggtggactttctggactttcgggagccagcccagctcgcctaccttgaggatgtggtcacgggattggccgtggccttggtcactatgcgtttgtggaaagtgttgcagttttccgccaccttccaactgttcaccaagacaatcgctatggcgtgggacgcgttgctctgcaccttcgtaataaccgtgattttcatcattgcaattggcattgcgacggtaaccatcaatggcaactataccagcaacttcagggacttccccaagggcattgttacggtcacctgctttgcctttggctatacgaatttggtatacccaccggatatcttttacggcggagagtggctgggcatcttattgtataccataatgggattcgtggtcaagtacatgctgatcaacttgatcgtttccatgatgagggatcagatggccagtgtcaaggcggatagggataagaaagtgaggcagcgcataacattctggcaattcctgcgcgttgaatatgcccactttattaactacatcgtaaaagtgttccactgccaaaagggatatcagcgaaagaatcgcacagttgcacagaacatccaacgaaaactgaatagtaatgagcttaagcgacgaaagacgaagattagttcaatttattccgagacaatatatgtcatgccgatagacaaggatctggagcagatgaaatatagggagcggatcgagcgaaccttcactctggccgccatcctccacacccaaatggagctcatggagaggcttatgttcggtgacgaagaggggaacctgccaagtttggaccaggaagacgagcaggttccagagactgaggaggactga

SEQ ID NO: 42081 - protein, 728 aa, DROSOPHILA
MAKKFSNIIFYLTLIIIAICVACIWMFSGFRHEYGKFNMILVAFLAVTLLQILIFTPIKFTIMSLDAAFWPAHQAPETPDENANVDTFMDNLRLRLRTLRSELMITERHRNERVNLKYRLITEELWLTGKLFLVYFFMALAFFDELLYFNTEATELLFQCNHGDAFGLLSVGDVPDIYFFVVSSLVLAFTDGKNTSGGAPWIHAEGTRLLGVVRLRQLRTESNRLGLSLPVFTERDFSESWTLPYERVPYTDKYWPIYTPWLPSVSVARDNLLMGINHVGHMFNYPESKGYKVLLSDTRHKSLKIIDYLMKKNWLDANTTALFMDFSLYNADANTFTVCTLWVEKFPYQYPDGHTRIESHTFVEQLREFTKFGMLMVFVFVVTWLQFTKAFFLKVWYDPRQLKTLWVQVDAMIVALSLVVGMIMSVRDNLVQKMIKSVEIAVVVDFLDFREPAQLAYLEDVVTGLAVALVTMRLWKVLQFSATFQLFTKTIAMAWDALLCTFVITVIFIIAIGIATVTINGNYTSNFRDFPKGIVTVTCFAFGYTNLVYPPDIFYGGEWLGILLYTIMGFVVKYMLINLIVSMMRDQMASVKADRDKKVRQRITFWQFLRVEYAHFINYIVKVFHCQKGYQRKNRTVAQNIQRKLNSNELKRRKTKISSIYSETIYVMPIDKDLEQMKYRERIERTFTLAAILHTQMELMERLMFGDEEGNLPSLDQEDEQVPETEED

SEQ ID NO: 42082 - DNA, 7643 bp, DROSOPHILA
cagaaaaggtattaaattaaatattaagtaaaatatctacctgaaaatatgtgtcgatctaagcgacggtaactaaaataataatattgcttggttaacctaatcccaagaaataatgtttactcgagggaaattttatagctccagtattattctgtgtgcatgtctatggtcagcgactgtcagtcagccgccagtgtccatccagccggcatatccccacccagattctgctcttttgtttgctcttctggccccgggggctccctaactgtttgtgctatcccgggtgttgactgacaggtgccgccggagaattttggcgctacaaagtgcataaataaaaatttttccaactctgttgacagtggaacatggcagagaaagaaaaacgtcgaaagaaatggtatgaaaccggggcccaagacccattagttagatgagtgagtaaaggaagaataatggtataaaggcactttaaaatgttgattaaagtttattctctggattgttaaagttccctttcttaaaatttaagttaagaccgacaaggtttgctattagttttaagtaattgaaaagattattatgcgttatattattaaataaataaatagtttaatttaaaaatcgtcctacgaaacgttgcttgtaatatacatacacaaatcttctacatgcattttacatttacaactttgtaagtattagtctacatgtagatgtcgtgattatccatattattatctacgatcattttgtttggtttgaagccatgattactccaacatattcaacaacgaattttatgaaaagctttagctaagatcaaaaccaaagtatctcactaagcaagatcaacaacccacaatttgtgttaaatttttacaaataatgttatttgtataaacattcttgattattgactaaacataaaattatatatgtttaaaacattttcttcttcttctgctacaggctctaacttaatactgctaaaatggcctccacaccaaaagcgaatggcacgacagcgaagacggcaaccataaatgatgactacataacggtcgtggaagtggatgatccgacgtcgaacccgaaggatcgccttaagaagctagtcaagcgtcaaagctctgtggcggaggactcctcgttcatcacagtgctgacgattaacgagatggagttgcttcaacagcgaaaaaaggaggaggatgttggtagtggctcaagccctacgatggaggagcaaatagagaatgtcacagtgttcagattaccgggagaacgtctcggttttggcctaaagtttcaaggaggcacgaggagcacagagctcgtccaaaaactgtacatacaatcctgtgctgcagacagtcctgcctccaaagtgtccaccagctggggtaatctacgagagggtgatgagatcgtcagtatcgatggtcgtgatgtccgggaattgactcgaatcgattgcgttcgcggcctcaaagacaatgtggccattaagctggtggtgcgaaatggtcacggacagaagcctcccagcgaagaggacccacagcagcaggaacacctttcgatcacactgaatgcccaaccaccgcctccgccaccagtgccgccaagaaagttggtgagacggcaaaactccaaagagaaccaggctcagttgctcattgagaagccattgacgccaccaccggatgcggagtactacctgaatcttttaaccgaatccattaaggcgggctcagagtcggatgataccgccagcacaatttccactgttatcgacaagttttccgtgggctccaattactcctcggacagtagtctcaatggccacgagctggccaaggttttgcaaccttttacccttctcgagcaggagtttctgcctttggagcagccgctaggacatcccaagttgcttattcctggcaataactatgaaaatgtggagttcaaaacggagaaggtcaatgtatacgaaaatgtggagctcaggagtccggaaacgacgccgacaccaaaacccagagtccaattggccaccgtggagccaaagaagcgttcgatcatacccatgccacgaaaaattcctactccaaccaagctgcccattgaggtgaccccaccccgggttcccatattggaggaacccaaaacgcccacaaataacaaagttgattctcccaaaacaccaacaaacgaactcaaggagtctcccatcagtgctacaaaaatacctaaggccaagttctcgagggccaaaactgaaggagagatcaagttgcatttgccagccccaaaacagcaatcaccacaaagtaaatctcgtatacccatagtcagtacccctacagcacaaaaaactgttcccaaaccagtatcacccacaatgaatggtacaccactcagttcaaatataccacggctgttgcagaagcagaaatccgaaacggatctgaaattgaacttgtataggagtaaatctaaggagtcgagtcccagacctcccttgcaaagagcgaactcggcagaggctccagaaaggacctttatccctgtacttcttaatgggaactccaagagctcaaactccttggagagcgtcagttcgataggaagtagtagcagtggaaatagtgtaagatcaccaaaaggaccaaagcccaagccaccagagcgagttcaatcgcttcagaaaacccaaatacccaaactgcaggcactcccaactactccacctcaacagatacccaagttgagtatgcagacgttcaagcagagccctcccacaccccgatcaactccagtgggaactccatctccaacaagtaatcgagagatacgcttcaagattcagacgtacgaaagcaaaacccaggacgaagataaactacccagcttatttgacctagtgcacagtcaggagaatgataaggataaagatagggatagtgattcgctcaagacccacaatagcatcactgctcttttggcagccgccgctgccgaggccgctgatctctctcgggagtcgccacctccgttggtcgttggcaaatgcatgaagatcgtcgatgacaccaataccaccacctgctataccagttccagcagcggggaggaggacgaagacgatctggatgcctccaaccgggagtacatatgcgaggacggcgagaagttgggacctccggagctgataaatggccccggtccctcggaggcctacttcaacatgttctggcactcgaacatgctgcccacaatcggcgaggttgaagaggagttctcctccctggaaccccaatccctaacaaacgggtgagtaattggttttgaaagtgtcagtcgggggattagattaggtttaagagtgtctataagccatttttcgaacctcttcagctgtgcagttttctatagtaaaatcaaattcaaacaggtcgatggtagaaatattgaaattgaatgcatttagataaagtaaattctttaataaaacaattaatcaattaacaataaattaattaatgcattaataataataaatatttattaaagtaaatgcctaataaaaagtagtccattacagtcaggttaggaaggaaatgtgtctagtcgttctaatcaggaatttttattatatgacttagacatttgccaatactattagccagtaaaccaaaaatataggattacgcattgcgtagtgcctagtaggtactgcgtacattagaataaacttaatttctttaaagtaatatgtatgaatatgaatagtttacgaatggaaacattgactctttccaaggcattgtttcgtgcagtggccaactccattgattaggtctagctgcaagttcttgtataagtgctagggctacttttctatagtttgactaatacacgatttttgcaaataatatactacaaaacgtgtagggagaacagccagcaggggtaaacgggcaaagaggtggctcctatccctcccccacacaaaaatgaaatagaaaacaaagcaaataaaaaacaaagtctgataagacaaaatgccggtgtgtttaataacacactgataatggggcttcaatcagccgataaggtgaaatggcaataggaaaaaaggtatcagtgtggttttggtaacgttgggcgaaggttcggaactgatcgaacctgtctctattgacgttttgcttagcaggtgtgatagcaacaagtcaattagcatatctattccaccgataagaagcgtaattgtcattgctgaggttctcttaccatgtatttttttttatccagaaaccttgtcaaatcggaggagtcgaagaagttacccaaaatggaagtaaacgccggtggactggcccagctgactgatgataagattgctgaccatgacgcaagtgcaaccagagcggatactcgcgacgaagtcacaacaaaccaaacccaggaaatcagctccagcagttcgagttctgttaaaagtcaaaagaccaccacaaccactcgagtgaccaccaccaagactagttccagttccagttcctccagttgctcatccactgttatcccagatgttgccttcaagctgcaaccctatgaggaaagggacgatatactctcggaacccattaccaccatccacgaagaacgacgtgtgctaagtgagcagaagaccctcagtgaatcgaggactcgcgatgcattaaccggcgaagagcagctggtaactagtgccaattcgaagtcgagcagtgcccgcttcaagaagatcagcagcaacgacaacctactcgaccttggcgacgagcaggacatgcaggagcagccgttgaccgccacgatcacccaggagtcgagtctgagggagcggttggagtgtcctcaggataaccagagtatcgacaggggtactctgaccctatccgagcggggaaagcagctgagcgagaaagaaggcctcaccacctacacggaatgtgagacgagtgaaaaggagtcctacctagagggccaacaagtcctcaacggcaaaggcggtttcgttagccaggatgagaatagtgaccaaccaacttacgaacgagaggtcagcgagacactaacgatcgtcaacgatggcgaaaagcaggtcaccaagaaattggaacagaacaaggaaattgctggcaaaaagggtgccaagctccttaagaagaccgatgaggagcgacgtcttgagcaggaggcccaaaagctgatcgaaagctatcagaaagtcaagaaagaagcggagaagctgtacaagctggaattggccgacgatgatcagggctttgatctgagtgccttcgagcaggcggaggaagaggataagccagaagtttctgaggaaatcaaagaagtgaaggattctcagccagtaaaggtcgatattcaaattgaagaagaggttaaaacacctaatcaagtcataggggaagtcaaagtggaagatgtgaataaggaaattaaagagacggtacaagtctctcaacaggaaattaagaaagaggtcaaggtctcacaccaagaaacaaaagaaacctttaagagtgaagaaaaagatgagagtaatgaactcaaaatagttaaggaggaggtcaaagtaacacatcaggatcttagggaacagatccaggagatcgaggctgtcaaagtggtgcacaaagaagtaaaagttattaaggaaagtgctaaagtcactacgaccacgagtcacaagcaagcaactaaagaagtaatcatctcgaaagaagatcacaaaaatgatagcgcactccctgccgtgtcaaccacaaaagtagagatcatctcacctcccctggaagacgacttgggttatgtcctccacaagcacattatttttccccaggaaaaggtcaagacggctcctacgccactgccaaaaccgaaacccaaacctccagtgcccacgaacaaacccaaaatgccggtcaatttgaccaaaccgaaatcagcaccaccaccggtgcccagtaagaggagtgagctatccggatccggtggcaagcccacacccacccaaagacgcggcagcctggagaccgcccagcctccaaaaccactagaacgtataattgtcggtgtggagcagcgggatgagccagaaaagccccagccaattatcaacttggccagcgtggatctgccaaatgtggcgcccaacagcaagcaagcgacagtggaaacgactcccgtggtcgaaatgccaccggatgagctccaattcgagagtcaccaactgccggatgacggtgaaaaggaaaaggacttgcaccaggagtcaaatgacctgctcagcgggtcgtcatcgtcgtcggtaaccacgcccataacaacgccaattttggtatctgccacctcgtcgatggactcggtgcaaagtgtcatcgaggtcgtcaatggcatgcccatcatcagcaatcagcaaactgacgacgacgacattgatgaagttgcagcgtatgacgatgggatgcatttggaggccgaaggtacgaaggatgttcgtcccgtccaggaggtgacaacgttgacgctcgacagggaacacgaatcaggtgagtaacgaccagacggatttcgatattttacgtgaatttcacattgcttgttgggggtacaaattattttcttatacacctattacactttaaatgaaaattaaaaaaaaattataatttaatttagtttaaattataaattcacttgagctttcaaatccttaaaaaaagcgtctaaaggtgtggtaaaatcaatgatttcaatgattcctttaataattattacgaattattttctttgatccattaattatcttaaatatgctatgcacgctatgcttgaataataaccaattttgtttatttttcttaaagttctgatatttaaatcagtgaaaatatcgcattttgcactttcccacaaagtttttcaaaactctttatggtttgcaatttctgttaaaattcgaagagatattttttggatttactgttttttgtccttgggccttcatggttgtttacttagttggttttttgacaatttcccaaagagttgaaaccaaaattcgtcgacgcacgcaattatcagccaccaaatgagttttacagccatcgcactagtggtcagcctggaaactctggaccctctggtaacttgtcacatcgaccacaattttagcttcctctagcccccggccacgccccttttgttcagctaaaactccctttttgggccattgcgtatgcaaaacggccactaatggactttatggacaagttttgttggtcggtttcgaattttattttctgcgcgggggcgtttaatggcgcccttccaagtgtggtgataatgttggttttttggccagtgtttttattgaggagattatgccatgtaaattaagtttatctttcaatttgttacttgatggcgtttaattagattaaagttaacagtgatggagaacgtcggaagtgaaggggctttttttatatttctaattggattcctatcttgggcataatagaagtttgcgtgcttatgctatgctacaaaaatag

SEQ ID NO: 42083 - DNA, 4659 bp, DROSOPHILA
atggcctccacaccaaaagcgaatggcacgacagcgaagacggcaaccataaatgatgactacataacggtcgtggaagtggatgatccgacgtcgaacccgaaggatcgccttaagaagctagtcaagcgtcaaagctctgtggcggaggactcctcgttcatcacagtgctgacgattaacgagatggagttgcttcaacagcgaaaaaaggaggaggatgttggtagtggctcaagccctacgatggaggagcaaatagagaatgtcacagtgttcagattaccgggagaacgtctcggttttggcctaaagtttcaaggaggcacgaggagcacagagctcgtccaaaaactgtacatacaatcctgtgctgcagacagtcctgcctccaaagtgtccaccagctggggtaatctacgagagggtgatgagatcgtcagtatcgatggtcgtgatgtccgggaattgactcgaatcgattgcgttcgcggcctcaaagacaatgtggccattaagctggtggtgcgaaatggtcacggacagaagcctcccagcgaagaggacccacagcagcaggaacacctttcgatcacactgaatgcccaaccaccgcctccgccaccagtgccgccaagaaagttggtgagacggcaaaactccaaagagaaccaggctcagttgctcattgagaagccattgacgccaccaccggatgcggagtactacctgaatcttttaaccgaatccattaaggcgggctcagagtcggatgataccgccagcacaatttccactgttatcgacaagttttccgtgggctccaattactcctcggacagtagtctcaatggccacgagctggccaaggttttgcaaccttttacccttctcgagcaggagtttctgcctttggagcagccgctaggacatcccaagttgcttattcctggcaataactatgaaaatgtggagttcaaaacggagaaggtcaatgtatacgaaaatgtggagctcaggagtccggaaacgacgccgacaccaaaacccagagtccaattggccaccgtggagccaaagaagcgttcgatcatacccatgccacgaaaaattcctactccaaccaagctgcccattgaggtgaccccaccccgggttcccatattggaggaacccaaaacgcccacaaataacaaagttgattctcccaaaacaccaacaaacgaactcaaggagtctcccatcagtgctacaaaaatacctaaggccaagttctcgagggccaaaactgaaggagagatcaagttgcatttgccagccccaaaacagcaatcaccacaaagtaaatctcgtatacccatagtcagtacccctacagcacaaaaaactgttcccaaaccagtatcacccacaatgaatggtacaccactcagttcaaatataccacggctgttgcagaagcagaaatccgaaacggatctgaaattgaacttgtataggagtaaatctaaggagtcgagtcccagacctcccttgcaaagagcgaactcggcagaggctccagaaaggacctttatccctgtacttcttaatgggaactccaagagctcaaactccttggagagcgtcagttcgataggaagtagtagcagtggaaatagtgtaagatcaccaaaaggaccaaagcccaagccaccagagcgagttcaatcgcttcagaaaacccaaatacccaaactgcaggcactcccaactactccacctcaacagatacccaagttgagtatgcagacgttcaagcagagccctcccacaccccgatcaactccagtgggaactccatctccaacaagtaatcgagagatacgcttcaagattcagacgtacgaaagcaaaacccaggacgaagataaactacccagcttatttgacctagtgcacagtcaggagaatgataaggataaagatagggatagtgattcgctcaagacccacaatagcatcactgctcttttggcagccgccgctgccgaggccgctgatctctctcgggagtcgccacctccgttggtcgttggcaaatgcatgaagatcgtcgatgacaccaataccaccacctgctataccagttccagcagcggggaggaggacgaagacgatctggatgcctccaaccgggagtacatatgcgaggacggcgagaagttgggacctccggagctgataaatggccccggtccctcggaggcctacttcaacatgttctggcactcgaacatgctgcccacaatcggcgaggttgaagaggagttctcctccctggaaccccaatccctaacaaacggaaaccttgtcaaatcggaggagtcgaagaagttacccaaaatggaagtaaacgccggtggactggcccagctgactgatgataagattgctgaccatgacgcaagtgcaaccagagcggatactcgcgacgaagtcacaacaaaccaaacccaggaaatcagctccagcagttcgagttctgttaaaagtcaaaagaccaccacaaccactcgagtgaccaccaccaagactagttccagttccagttcctccagttgctcatccactgttatcccagatgttgccttcaagctgcaaccctatgaggaaagggacgatatactctcggaacccattaccaccatccacgaagaacgacgtgtgctaagtgagcagaagaccctcagtgaatcgaggactcgcgatgcattaaccggcgaagagcagctggtaactagtgccaattcgaagtcgagcagtgcccgcttcaagaagatcagcagcaacgacaacctactcgaccttggcgacgagcaggacatgcaggagcagccgttgaccgccacgatcacccaggagtcgagtctgagggagcggttggagtgtcctcaggataaccagagtatcgacaggggtactctgaccctatccgagcggggaaagcagctgagcgagaaagaaggcctcaccacctacacggaatgtgagacgagtgaaaaggagtcctacctagagggccaacaagtcctcaacggcaaaggcggtttcgttagccaggatgagaatagtgaccaaccaacttacgaacgagaggtcagcgagacactaacgatcgtcaacgatggcgaaaagcaggtcaccaagaaattggaacagaacaaggaaattgctggcaaaaagggtgccaagctccttaagaagaccgatgaggagcgacgtcttgagcaggaggcccaaaagctgatcgaaagctatcagaaagtcaagaaagaagcggagaagctgtacaagctggaattggccgacgatgatcagggctttgatctgagtgccttcgagcaggcggaggaagaggataagccagaagtttctgaggaaatcaaagaagtgaaggattctcagccagtaaaggtcgatattcaaattgaagaagaggttaaaacacctaatcaagtcataggggaagtcaaagtggaagatgtgaataaggaaattaaagagacggtacaagtctctcaacaggaaattaagaaagaggtcaaggtctcacaccaagaaacaaaagaaacctttaagagtgaagaaaaagatgagagtaatgaactcaaaatagttaaggaggaggtcaaagtaacacatcaggatcttagggaacagatccaggagatcgaggctgtcaaagtggtgcacaaagaagtaaaagttattaaggaaagtgctaaagtcactacgaccacgagtcacaagcaagcaactaaagaagtaatcatctcgaaagaagatcacaaaaatgatagcgcactccctgccgtgtcaaccacaaaagtagagatcatctcacctcccctggaagacgacttgggttatgtcctccacaagcacattatttttccccaggaaaaggtcaagacggctcctacgccactgccaaaaccgaaacccaaacctccagtgcccacgaacaaacccaaaatgccggtcaatttgaccaaaccgaaatcagcaccaccaccggtgcccagtaagaggagtgagctatccggatccggtggcaagcccacacccacccaaagacgcggcagcctggagaccgcccagcctccaaaaccactagaacgtataattgtcggtgtggagcagcgggatgagccagaaaagccccagccaattatcaacttggccagcgtggatctgccaaatgtggcgcccaacagcaagcaagcgacagtggaaacgactcccgtggtcgaaatgccaccggatgagctccaattcgagagtcaccaactgccggatgacggtgaaaaggaaaaggacttgcaccaggagtcaaatgacctgctcagcgggtcgtcatcgtcgtcggtaaccacgcccataacaacgccaattttggtatctgccacctcgtcgatggactcggtgcaaagtgtcatcgaggtcgtcaatggcatgcccatcatcagcaatcagcaaactgacgacgacgacattgatgaagttgcagcgtatgacgatgggatgcatttggaggccgaaggtacgaaggatgttcgtcccgtccaggaggtgacaacgttgacgctcgacagggaacacgaatcaggtgagtaa

SEQ ID NO: 42084 - protein, 1552 aa, DROSOPHILA
MASTPKANGTTAKTATINDDYITVVEVDDPTSNPKDRLKKLVKRQSSVAEDSSFITVLTINEMELLQQRKKEEDVGSGSSPTMEEQIENVTVFRLPGERLGFGLKFQGGTRSTELVQKLYIQSCAADSPASKVSTSWGNLREGDEIVSIDGRDVRELTRIDCVRGLKDNVAIKLVVRNGHGQKPPSEEDPQQQEHLSITLNAQPPPPPPVPPRKLVRRQNSKENQAQLLIEKPLTPPPDAEYYLNLLTESIKAGSESDDTASTISTVIDKFSVGSNYSSDSSLNGHELAKVLQPFTLLEQEFLPLEQPLGHPKLLIPGNNYENVEFKTEKVNVYENVELRSPETTPTPKPRVQLATVEPKKRSIIPMPRKIPTPTKLPIEVTPPRVPILEEPKTPTNNKVDSPKTPTNELKESPISATKIPKAKFSRAKTEGEIKLHLPAPKQQSPQSKSRIPIVSTPTAQKTVPKPVSPTMNGTPLSSNIPRLLQKQKSETDLKLNLYRSKSKESSPRPPLQRANSAEAPERTFIPVLLNGNSKSSNSLESVSSIGSSSSGNSVRSPKGPKPKPPERVQSLQKTQIPKLQALPTTPPQQIPKLSMQTFKQSPPTPRSTPVGTPSPTSNREIRFKIQTYESKTQDEDKLPSLFDLVHSQENDKDKDRDSDSLKTHNSITALLAAAAAEAADLSRESPPPLVVGKCMKIVDDTNTTTCYTSSSSGEEDEDDLDASNREYICEDGEKLGPPELINGPGPSEAYFNMFWHSNMLPTIGEVEEEFSSLEPQSLTNGNLVKSEESKKLPKMEVNAGGLAQLTDDKIADHDASATRADTRDEVTTNQTQEISSSSSSSVKSQKTTTTTRVTTTKTSSSSSSSSCSSTVIPDVAFKLQPYEERDDILSEPITTIHEERRVLSEQKTLSESRTRDALTGEEQLVTSANSKSSSARFKKISSNDNLLDLGDEQDMQEQPLTATITQESSLRERLECPQDNQSIDRGTLTLSERGKQLSEKEGLTTYTECETSEKESYLEGQQVLNGKGGFVSQDENSDQPTYEREVSETLTIVNDGEKQVTKKLEQNKEIAGKKGAKLLKKTDEERRLEQEAQKLIESYQKVKKEAEKLYKLELADDDQGFDLSAFEQAEEEDKPEVSEEIKEVKDSQPVKVDIQIEEEVKTPNQVIGEVKVEDVNKEIKETVQVSQQEIKKEVKVSHQETKETFKSEEKDESNELKIVKEEVKVTHQDLREQIQEIEAVKVVHKEVKVIKESAKVTTTTSHKQATKEVIISKEDHKNDSALPAVSTTKVEIISPPLEDDLGYVLHKHIIFPQEKVKTAPTPLPKPKPKPPVPTNKPKMPVNLTKPKSAPPPVPSKRSELSGSGGKPTPTQRRGSLETAQPPKPLERIIVGVEQRDEPEKPQPIINLASVDLPNVAPNSKQATVETTPVVEMPPDELQFESHQLPDDGEKEKDLHQESNDLLSGSSSSSVTTPITTPILVSATSSMDSVQSVIEVVNGMPIISNQQTDDDDIDEVAAYDDGMHLEAEGTKDVRPVQEVTTLTLDREHESGE

SEQ ID NO: 42085 - DNA, 3510 bp, DROSOPHILA
gaagtgtttcattatataaagcccgcacacatacacatcctttccgccgcacaggacgaacgcgaacggctcgcaattttcatcggtcgcgttgttggcagcaggcagatcctttcaatcgctcacgttaattgcacagaaattcagcggcgccccacgattttttcactagcgtaatttgacggcgattgggccgcactttcgtcctgtcgccactcggattcggattcgaaatcgcatccgtaatgctctcgattcggattcgacggctgcggcagctttgctccggcgcacaaaacaagcaaactggtgcggggataatttttgtatattttggcaagcaattggaattgttattcgccagtcgctttgcttcaacaatttcactgcatttgtaattatccttttttttatcgtggcaatcggatgctgcggcgcgggtgaaaaaagttttaaacttttacgctgcgtgttgcttaaatagattttcgggcgaaagctcgtcctgccaaattcgctctcttcgcggaaaatctctctcactgttaagctaacatgtgtcctaaccggttaagcgaattctgttacggaatttggttcgagtctgggctgcagactgttgcatttaatttaaaaaaaacctgatataaaaaacgaaacaaataaaatgactttgccatctcataaaaactattattccaattgattaacaatacactctttcaattaaattgctcacgtcagatatataaataattttatcttaagaaggagtacagttttaaagccattgtgccctgactaagcgcttgagcattggttgaaaacttggctagtacctggatgttcaaaaacagaacttttaaaatcgaacatttctttagaatttgtttctctgttaaattgaaatgttcataagaagaataaaccatagtcttctgcaaaaacgtttatgcttttagataataatttccaaatttgttttttatatttttaattatatatccttctttatttaccagtaaaagcgctataaaaacttatttgttagtaaaaccgcctcatcattttgttacgcatcatttcatattgaatgaaaattaaatgcaaaaaaaatcggtcatgtcgacagaatccaccgaatcacaatatcatccttttgcctgtcacctgtgcaccttgggtcactccactgctgctccttggcccactgacccggctgtcagtcagcgagatgactccagctgaaattgccctgaaatcgcgtccaaaaatcaattttcacaatttggagcaaccatgttcgtcggcctggcagagatgggctgataactaaagtgcagggcaggagtgcacaggcaactcgaaaaaagcttaaacacaaagctacatcagtgatccatcgcctcgggcggcaggacgatgttgcagcccaggagaccgcgtccactccacgttttcggcaccaggatgaggtccaactgctgctcgccgcgcttcactttcagctggacattctggctctgcatgttgcgcaccagctcgccaatctgggcgagatctcccttgaagttgccgctattgatggagccaaagcggaggatggcatcgccggcacagagacccttaaatggtaaagatggcccatctcaatgctgtgatcttcgcttgtttactacattcactcacagctctttcggcgggcgaatcgggactgaccagattgaccaccacgatggcgcgtgcaggagcaagatccgtgatattagcgccaccgggtgaacggtcgctgtccaggtccaaagcggaggcgcggttcaccagctccggatctgtggtggcaatctcgctgtgatattggttgagcagcgtctggatctggttcatcagctccttgtggtcgttctgcaggcagatgatcgtctgtcgcgccaggcgcacctggtaaacgtcgatgtcgttgcgcggaaaaccctcggcgtccaccagtggtccactcatgcccacattgtcgttctggaaggaagatatcattatcaatgctatacagcataaacaaaagaatgtactcaaaatacaattgtgtatataccctacaccaaagcataggataatgctgtaatgcttgcccaagtggacataccctaaccaacagtagggtattgaatatatcaacatttggcttggcggtccgtccaagttgaagaacctgcgatcatgaatatccacggtggtgcgtcaccaacagcttgccacagtgtgcataccctatcccggatgcagggtatccccggatgagcaagcgaatttacttacggcggccaggatctgtccgtttctgttgatctgcgcctccagctgctttttagcgttaatcagacgctccaggcgctccttggtcgtcgtcccagcggccatgacttccacttcgattcgagttattccagcgttcgtcccgaaaaatacaaatttattatttttcgttaatgtttttttttttcagcagcgacagtagcaacaacaaccagtgctcgtgcagccctggttgcccgcgaccagtgtgaccgtattgcggcgaacttactttggccaaaaactaattgttaaacaatttttcggaaggggaaaagaacaaattgaacggcgagagtaaacacaggaattcacaaatttctatgagaaacagatcgcacgacggtgaaacgaaaggggggaacgcctttccagcggacatcgcagaatagacgacgggcgacgagggacctcgaaaaatcgcacggcaatcaattcgagtgtgtgcgaattgattacaaaaataaaggtatttcgagaggtgagcgataaaagcgcgtgtgtgcctggtgaggattaggtgtagccatgaactaaccaaacgttttgcagccacaggcaacacagggaccacaccgtccactcccatccgccggagtggggctgccacctgcgatatgtgatcattggggctccgcggaggtttatgcaatgttctagctctcggccagtcggaggtaaagcagccggtggagcagaagcaggaggggcaggagcaacaggccagatgactgtgaccaccatggaggcacaggtcaaggcagcacaccatcatcatctacatcatcccacgggcggaggggcccagcacaaggtggaggaggaggagccggatcctgttgaggacgagatgaccgtactgctggccaataagaactttcactatgacgtcgcctccgatctggacgacgacgcttttgtggagctcaaagaagacaccgcccaagcggatgatgcgggcgcgggcgttggcttctacaatccggatgaactgctgctcgatgaccagccacatccgcaagtcacgtggctggacgacgacgagatcgagacgctcgatcgcgtgacgctggacatgggtaatatgttcttcaatcgcgtcgacagccaggacatcatctatcagcagaaaaagaagagcattaagatggtgggcaa

SEQ ID NO: 42086 - DNA, 1146 bp, DROSOPHILA
gtcgctgctgaaaaaaaaaaacattaacgaaaaataataaatttgtatttttcgggacgaacgctggaataactcgaatcgaagtggaagtcatggccgctgggacgacgaccaaggagcgcctggagcgtctgattaacgctaaaaagcagctggaggcgcagatcaacagaaacggacagatcctggccgccaacgacaatgtgggcatgagtggaccactggtggacgccgagggttttccgcgcaacgacatcgacgtttaccaggtgcgcctggcgcgacagacgatcatctgcctgcagaacgaccacaaggagctgatgaaccagatccagacgctgctcaaccaatatcacagcgagattgccaccacagatccggagctggtgaaccgcgcctccgctttggacctggacagcgaccgttcacccggtggcgctaatatcacggatcttgctcctgcacgcgccatcgtggtggtcaatctggtcagtcccgattcgcccgccgaaagagctggtctctgtgccggcgatgccatcctccgctttggctccatcaatagcggcaacttcaagggagatctcgcccagattggcgagctggtgcgcaacatgcagagccagaatgtccagctgaaagtgaagcgcggcgagcagcagttggacctcatcctggtgccgaaaacgtggagtggacgcggtctcctgggctgcaacatcgtcctgccgcccgaggcgatggatcactgatgtagctttgtgtttaagcttttttcgagttgcctgtgcactcctgccctgcactttagttatcagcccatctctgccaggccgacgaacatggttgctccaaattgtgaaaattgatttttggacgcgatttcagggcaatttcagctggagtcatctcgctgactgacagccgggtcagtgggccaaggagcagcagtggagtgacccaaggtgcacaggtgacaggcaaaaggatgatattgtgattcggtggattctgtcgacatgaccgattttttttgcatttaattttcattcaatatgaaatgatgcgtaacaaaatgatgaggcggttttactaacaaataagtttttatagcgcttttactggtaaataaagaaggatata

SEQ ID NO: 42087 - protein, 220 aa, DROSOPHILA
MAAGTTTKERLERLINAKKQLEAQINRNGQILAANDNVGMSGPLVDAEGFPRNDIDVYQVRLARQTIICLQNDHKELMNQIQTLLNQYHSEIATTDPELVNRASALDLDSDRSPGGANITDLAPARAIVVVNLVSPDSPAERAGLCAGDAILRFGSINSGNFKGDLAQIGELVRNMQSQNVQLKVKRGEQQLDLILVPKTWSGRGLLGCNIVLPPEAMDH

SEQ ID NO: 42088 - DNA, 5722 bp, DROSOPHILA
aacgcctctctctgcaggaaatacgccacgacacgtaagtaggaatattccttgattgcacttcatgataactgattgttataatctgcttttagttggttccgatccgcaccggttaagaccggcccaccgatacccattccccccctgaagggtgacaaataccgcaactccacggtgataccttacttggaagcttaccactacggcacccaggaggaggatgtctactttacagaacacgacgtaaatcgtacgtaccaacatcaatctaatgccgagtgaactactttcatggttacctttacagaggagctcgcccgccaagcggcagctgctgcctccgaaattcgggccaaacagtcggcggcagccctagccgcctgccacacctacgaaccgccctccacaagtgccgcagccgccagcaattcgctgggcaacggtagcagagaggaggcgcccgtcaagaagaagggatcggcactgaagaggcgcgccaagaagctgacgtcctgcatctccgtgcgcaagctgagccactgccgaacttcgtaggcgccttagatgcctccactaaacatagatgctaagatttatcgaaaggaataactttgttaacaaattgtgagcaactttttggttttgttttcccgtttttattctgttgtcctacattcgccaagtatttgtaaccatagaatcatgtaggaaattcaggcgcaacctcgtaccgcccgagcagcaggagcagcagcggtcgcatcaacagcagcaacagcccgcatcagcggagttggctgtggaattggggagctatgggagcgacacgaaagctatatatccatgtgacaatactgtgtattatatgaaacaaatgaatgcgtaaattagtcgttaatatattatgatgtactgaaggcagccgaggattgccggaggagacggtgcccattggtgcgtcgcacacataaagaaatatgttcaagtgaaattgtttgttggcttcgttatattctaaactacacacgacgaatgatgcgattttcaggcgccgtcggtacaataactgctggacagtatttgcaaggcctaggttgagattttaatttttacaaaccaatgaaacgaaaataaaagaacccattgaatatcaaaatacaaacactgcatttagttcgcacatttcgcacattccaaattccacactcaacactcgcagacgctccattattccatgcacacacgctcatgctcacactacaacattaggctagctaactacgtttgcttaatctatttcaacgatctgcagccgggccgtcggatctggctctgagtcgccctccatcagctcgcccatgatgaacatctgatggtagtgggggcccagggtggacagcttacgctgcattaggtggcgcaacgggtccacatattgcggcggcaccttggccagctgtgtattcgtgttgcgccagtgcagcccgttgttgtccacgtgaaacagcgccggcgagggcacgtgatctttaagatagttccagatgcactcgcgcagcagcagggcaatctggaaatgtcatacattagttggtgctactacacagtttgggcaaataatggatctacctctgccgattcaaagtgctcgatgatgagatgcagattggtgagtggaggtggaattagttggctcatagccagcagttgcagcatcttcttggtgcacagcatcagctcatcgttcgcagcagtgggctggaatcgattgactgcaaacgtataatatgattaggcacctttatagaaaataagcaagtaaagtgacaagctcaccattcttgccccgccagtgatgcaagcaggtggcgcacagtgcgcgcagtagcacggaggaatagcaaagcgccggcctatgaccggcgatcagtcccaaaacagcccacagcactggggagttgatgaacgctctcctgattagcatgtcccgctccattgtgaccctggtgaactcctcatccggaaagggcaggccgttgtacatgacatccgtggagaccagctcgaccagcagcagcgagaccagcgagtagccctccacgttgttgggcttctccagatcggcgcagcatgcattcaatgccttaagatacagcgcctgcttctccgcatcgcagttccgctcgctggggggcagcactggtcgcagacctctgcctataataccggaatgcagcacggagcgattcgagttggcgccagagctggtgtgcagattctgcaggatgaggtgttcgtgctcgggtatctcaagctcatcgagctgatacacctccagctgaccaagcaagtgaccgtgataaaagagcgcgcgctccaccagctcgcgcaggcagacggttctcgcgattttccgggcggaacactgcctctgcaacagcgtgtaggagcgatgcgaagccgctgctcgacggatcacagctagaatgagatatggttaatatattgaggcaaggctaaggaacaactattgcgcttactcttctcggttaagcccacaaagaagtactttacgcttagcgtggccagcttgaggactaatggagtgcgcaggacagttgtccggctgccggcttcaatgttgttcaacagatccacaatgagatgggccaagcgcatgcgggtagcgtcctcatcatccaccttatcttctcccggctccaattttgtgcgctttccgtaatccttgccattgcacaattcattgttgttattgctatttttactttgctgcgcccggaatttatccgctatccgctcggcggcatccctgtctatcctcaggaccagtttgttaacggtgcagtcgaagatttgaaggattttgggaagacattcgttgagggcttggttcaaatgctgcgctttgatgtacggagccacattcttgctcttgtgcatcctgatggagattatgaatttgaaacactaattatatgtatctaacaatagtaataattacctggcaagtatgtttaggttggagaaagtgttaaaggcttctgtgggtgtgcccggcggaactggcaatcgattgttaacttgaacatccaacgtgatgtcctccaagaccatcttgaaacctggcgtgaatcccggaaagttaaccatgccgctttgtccgccaagtaagcgaattaatgcgccaatgccattgggattttgagcatacgacttctttagaagttgggatatagtttggtagtaaatattcgggtgctgggatgctagaaaaatagttcgtaaagtctgccatttcaatatctgaagaactttctactcacagaccaccagcagtaatctcaccgctgtttgctgctcgaagagattggtgctgaggcagctcttccacagcatgtacttggtttcctcataggccagatcggccagcaacgggaagttccgctggttgagcacccactgttccagctcctgcatcgaattgtccaggaaatcctgacaccaaacatacttctcggccattttggctgccgtaaggagcaacgtcgctccacgctcgttcaggcgcagcacggcattattcagcgtgggctgcataccggcaaacattttgttgctcagccacaacggcgccttctgcactatcacctcgcacatgtcctcggtatctacatgacattgtgttagagaaataatatatctctttattcaaccagtacttacagatttcgactagcacattgaccaagctctgcaggatcgtgtccgagtagttggtggtgatcagcaggaaaggaacaacggccacgtccagcggcttcttcggtgcgaatccctccctaagcatctcacgaaaggctgccctaaggtgctgttcgtggcacgaggtcatataatcgaggatgcccgcctccgaatccaggtggcagcggtagtcatcgacgaatcgcttgatgccgcactgtagaatctgcatgatgatcttgtaagggaaacagccgcccaatctcgccacaatccagtcgaaggtcatgggaaaccggtgaaaggcattgagcatgatctccacgcaggcctcctcctccggttgggttaactttcggaaacaactatttataagggtcatcagcccgtgcatggcgctgcactccagccaatagttgcagctggccgtgatggtcatccgccgctgggtgtacttatcggacagcttggccactagttccagactccagttggcgatgagcggcgaccaggcgggcggtcccttccacaccagactctgcagcgcggtctttaccagattgaaagcctcgtattccggagcacgttgctgctgctggcgattcccggccagcttcacctgggataccggcataccggtctttgggtcggccatctccggcgacacatacagctgcacactgatttcggccagcagggcgaagtattcgaacacaatgtctcgcgtggcgggcagctcctccaggaatcccagtctgcaaatatccatggaattatttactacgggcatcattattaaccaccgcggttgctactcacgcgagcttgatgagattggggctggtcagcagctgcggacaactgtgcccattgctcaccgtctctatgaagtgcttaagctgatccaacaggttctggcgcagcattttgtcgtcctaggcatcgggaacgcagcaccgaagttggccaagtgagcaaatgcatcgcagcagcgggtcgctgcgtctttcactcggaataccaaaacgacggggcacaactgcaggcatttggaatccgccgccacctggccacactaaggcggcagaaaattcgaaattctttaatatctgaaaatcataaaattaacagaataataaatatcttagcactctaacgtgtcattacattcattataaactagcacctgagattagtttaagatgacactttacattcaagttaaattaagctggaaaagatttctaatcggaattatgtgtttactacaatgctaactttcgaatcgaggatgtaattactgagtaatcaaactgtttgctctttttaatactaagtaaacgtacttatagctctattttctaattttataatatttaacgtgtttttgttttaaaatattatcgtaacagtagggagtgcgaaaaacggtaacaccaaaacccagttcgtgcattattgcacactcttttggggcgaatcaagagcgaaagacaacatggcgtcgaagcggcgaatctgtctcgcagtttgtcgtgctgtttgcttttttctgctctgatttgtacaaatattcattcaaggtgctccagttttgccaagtatatgttaatagagtaccataacaatggtggcgtcacaggggtgctagagttcgatatcgataacagctcacattctcgtcatatgcaactatcgctgtactctctggccgagtatcgatacgcagatattatcgtcgtggtcagaccaacgctctagcgtcggtccgcggaaaatagcgaaaattacaattatccgggaagatatattggtcgaaaactaactcgtgatcccccaataaatatgcgcaagagaaaattgtatataaactgatcgaatgcagccagcgtgctaagcactaaaagcgaaaaacgccagaaacagaaacaaggaattgcagcgtgagtgtata

SEQ ID NO: 42089 - DNA, 3226 bp, DROSOPHILA
ctgcgttcccgatgcctaggacgacaaaatgctgcgccagaacctgttggatcagcttaagcacttcatagagacggtgagcaatgggcacagttgtccgcagctgctgaccagccccaatctcatcaagctcgcactgggattcctggaggagctgcccgccacgcgagacattgtgttcgaatacttcgccctgctggccgaaatcagtgtgcagctgtatgtgtcgccggagatggccgacccaaagaccggtatgccggtatcccaggtgaagctggccgggaatcgccagcagcagcaacgtgctccggaatacgaggctttcaatctggtaaagaccgcgctgcagagtctggtgtggaagggaccgcccgcctggtcgccgctcatcgccaactggagtctggaactagtggccaagctgtccgataagtacacccagcggcggatgaccatcacggccagctgcaactattggctggagtgcagcgccatgcacgggctgatgacccttataaatagttgtttccgaaagttaacccaaccggaggaggaggcctgcgtggagatcatgctcaatgcctttcaccggtttcccatgaccttcgactggattgtggcgagattgggcggctgtttcccttacaagatcatcatgcagattctacagtgcggcatcaagcgattcgtcgatgactaccgctgccacctggattcggaggcgggcatcctcgattatatgacctcgtgccacgaacagcaccttagggcagcctttcgtgagatgcttagggagggattcgcaccgaagaagccgctggacgtggccgttgttcctttcctgctgatcaccaccaactactcggacacgatcctgcagagcttggtcaatgtgctagtcgaaatctataccgaggacatgtgcgaggtgatagtgcagaaggcgccgttgtggctgagcaacaaaatgtttgccggtatgcagcccacgctgaataatgccgatttcctggacaattcgatgcaggagctggaacagtgggtgctcaaccagcggaacttcccgttgctggccgatctggcctatgaggaaaccaagtacatgctgtggaagagctgcctcagcaccaatctcttcgagcagcaaacagcggtgagattactgctggtggtctcatcccagcacccgaatatttactaccaaactatatcccaacttctaaagaagtcgtatgctcaaaatcccaatggcattggcgcattaattcgcttacttggcggacaaagcggcatggttaactttccgggattcacgccaggtttcaagatggtcttggaggacatcacgttggatgttcaagttaacaatcgattgccagttccgccgggcacacccacagaagcctttaacactttctccaacctaaacatacttgccaggatgcacaagagcaagaatgtggctccgtacatcaaagcgcagcatttgaaccaagccctcaacgaatgtcttcccaaaatccttcaaatcttcgactgcaccgttaacaaactggtcctgaggatagacagggatgccgccgagcggatagcggataaattccgggcgcagcaaagtaaaaatagcaataacaacaatgaattgtgcaatggcaaggattacggaaagcgcacaaaattggagccgggagaagataaggtggatgatgaggacgctacccgcatgcgcttggcccatctcattgtggatctgttgaacaacattgaagccggcagccggacaactgtcctgcgcactccattagtcctcaagctggccacgctaagcgtaaagtacttctttgtgggcttaaccgagaagactgtgatccgtcgagcagcggcttcgcatcgctcctacacgctgttgcagaggcagtgttccgcccggaaaatcgcgagaaccgtctgcctgcgcgagctggtggagcgcgcgctcttttatcacggtcacttgcttggtcagctggaggtgtatcagctcgatgagcttgagatacccgagcacgaacacctcatcctgcagaatctgcacaccagctctggcgccaactcgaatcgctccgtgctgcattccggtattataggcagaggtctgcgaccagtgctgccccccagcgagcggaactgcgatgcggagaagcaggcgctgtatcttaaggcattgaatgcatgctgcgccgatctggagaagcccaacaacgtggagggctactcgctggtctcgctgctgctggtcgagctggtctccacggatgtcatgtacaacggcctgccctttccggatgaggagttcaccagggtcacaatggagcgggacatgctaatcaggagagcgttcatcaactccccagtgctgtgggctgttttgggactgatcgccggtcataggccggcgctttgctattcctccgtgctactgcgcgcactgtgcgccacctgcttgcatcactggcggggcaagaatgtcaatcgattccagcccactgctgcgaacgatgagctgatgctgtgcaccaagaagatgctgcaactgctggctatgagccaactaattccacctccactcaccaatctgcatctcatcatcgagcactttgaatcggcagagattgccctgctgctgcgcgagtgcatctggaactatcttaaagatcacgtgccctcgccggcgctgtttcacgtggacaacaacgggctgcactggcgcaacacgaatacacagctggccaaggtgccgccgcaatatgtggacccgttgcgccacctaatgcagcgtaagctgtccaccctgggcccccactaccatcagatgttcatcatgggcgagctgatggagggcgactcagagccagatccgacggcccggctgcagatcgttgaaatagattaagcaaacgtagttagctagcctaatgttgtagtgtgagcatgagcgtgtgtgcatggaataatggagcgtctgcgagtgttgagtgtggaatttggaatgtgcgaaatgtgcgaactaaatgcagtgtttgtattttgatattcaatgggttcttttattttcgtttcattggtttgtaaaaattaaaatctcaacctaggccttgcaaatactgtccagcagttattgtaccgacggcgcctgaaaatcgcatcattcgtcgtgtgtagtttagaatataacgaagccaac

SEQ ID NO: 42090 - protein, 899 aa, DROSOPHILA
MADPKTGMPVSQVKLAGNRQQQQRAPEYEAFNLVKTALQSLVWKGPPAWSPLIANWSLELVAKLSDKYTQRRMTITASCNYWLECSAMHGLMTLINSCFRKLTQPEEEACVEIMLNAFHRFPMTFDWIVARLGGCFPYKIIMQILQCGIKRFVDDYRCHLDSEAGILDYMTSCHEQHLRAAFREMLREGFAPKKPLDVAVVPFLLITTNYSDTILQSLVNVLVEIYTEDMCEVIVQKAPLWLSNKMFAGMQPTLNNADFLDNSMQELEQWVLNQRNFPLLADLAYEETKYMLWKSCLSTNLFEQQTAVRLLLVVSSQHPNIYYQTISQLLKKSYAQNPNGIGALIRLLGGQSGMVNFPGFTPGFKMVLEDITLDVQVNNRLPVPPGTPTEAFNTFSNLNILARMHKSKNVAPYIKAQHLNQALNECLPKILQIFDCTVNKLVLRIDRDAAERIADKFRAQQSKNSNNNNELCNGKDYGKRTKLEPGEDKVDDEDATRMRLAHLIVDLLNNIEAGSRTTVLRTPLVLKLATLSVKYFFVGLTEKTVIRRAAASHRSYTLLQRQCSARKIARTVCLRELVERALFYHGHLLGQLEVYQLDELEIPEHEHLILQNLHTSSGANSNRSVLHSGIIGRGLRPVLPPSERNCDAEKQALYLKALNACCADLEKPNNVEGYSLVSLLLVELVSTDVMYNGLPFPDEEFTRVTMERDMLIRRAFINSPVLWAVLGLIAGHRPALCYSSVLLRALCATCLHHWRGKNVNRFQPTAANDELMLCTKKMLQLLAMSQLIPPPLTNLHLIIEHFESAEIALLLRECIWNYLKDHVPSPALFHVDNNGLHWRNTNTQLAKVPPQYVDPLRHLMQRKLSTLGPHYHQMFIMGELMEGDSEPDPTARLQIVEID

SEQ ID NO: 42091 - DNA, 2762 bp, DROSOPHILA
ttgcaggaaacgataaacgaggtgaaggaactgatcgaactggaggatctggatgtggagagtgaaggtgactacgaggcggaggaactgagcgagcgattggcggccacaatcaaggacgccgagctgggcattcagtttgacgacatagccaagtaagttgtcggaaactaatattatttaaacataccataaacccaaatcttttgtacagtcactggacgcagtccctcagctggttgacctcagaggaagcaactgccgccgatctggagcaagcctatgctaagagcatccacgcgctgagtgaagcgtgcgccctcgagatgtgtaagctgcacaaaatcgccgagctgttgctggtgaagccacatcacagcaccgccaacgaagtggatggcgtcgtcaatctctgccagcagttcaatggacaccttcaaggacttagccaccgcttcgccgccgttctgagcggcaagtcagaaacggaggaatcaaaaggccgggtcagcacattcttttccgaaatgctatctgccgtgcagttcatcgagaaggcctacaagctatttacacccattctccagatgggagctgtgtaaacggatttaagattaattgttgtactttctacttttactattgcctggttagtgttctcaactcacttgtttttccatataaatgtacaaaattataaatgattgcgttgcaaatgcttgtgataacattcccgaaattattgagaagttttttcaaagtgcaactgaaagttcggtagcctgcattcgtgtttggttggattagagccacctaataatagttggcttcaatgtgatgaactatttttaaaacccgactctcgataggcgcggcaataattttcaggcattatctattctatgccctttctattcgaactattctataaatcaaacgcaaaacacgaatatcaaattgtccattctctagttaagtccagcaaaatttagttagaatcatgggagatcgcaacaagcagccggttattctgctgaaggttccgtcctccgatgatttctatggttcggcgttgcgcagccataacctggatcccatcttcattactccctcgcattttgtgttcaagaatctgaagcaattgcaagccaagttgcatgagccgcacaaatatgccgggattatatttgcatccccgcgctgtgtccaagctgtaaacgaggcactaggaaagacaccacttcctagttgctggcgtgcgttacacaattattccctaggcaagaacacgcacagcgccgcctggataacattccagaatcttccgactctgggcgatcatgccgtgaatgcaaacaatctgtgcgatctgatcgtggagacgtttggacccaagagggatctgccactgctcatgccctgcggcaatggcgtgggtcagacactgcgcctccgtttggtcgcccagggattccgggtggatgcctgcgaagtgtacgagagtcggtcgcatccggatttcgtcaatcagatgcggcacgccctcaaattcaagcgaatggaaacgattgtgttcttcggaccctccagtgtccgcagctccttggagttctttgggaactacaacgtttcgcttaaggatcgcaagctgatagccgtgggcagtggcaccaggaaggcaatggaggaatctggaattaaggcggacggagtcgtgaatgctgctgacgtcgaccgcctgataaatatcatcaaaacatagtttagtatcgatcattttacgttttgtttttaccagtttttacttttggtatgatttcaaaatctgtttggtgtcctttaaagaaatgaggacaaaagtgtgttattaattaaagtgtttcaacaaagtacatgtaatgtttttattacaaaaactataatcaaatagattggatctatttgaacaagatacttcaagatatgagttttaatttaacaattagatacaaaatgggattaaataacataaagtaatcatgttcttaaaaatagcttgccagtttcagacaagttttcaaagaagtacagatgtttaaatgatgatggatctgaatgaatttctaagctcaatattcttccattttactaaaaacaaagtgtaagaattgataatgttgtctgtatgttcgttgtactgcttagttatttagaattcttcaacatgtcgaacatatcaatattattttgtggcttgatgggcgcacataatttggcacgtttgccgcttaaagagttgcccacgatctgtaataaaagttcaataatttaatttcgattataggtgcaattaacaaatactcactggtatatcatcgccgctatcaaagtcggaggaatatgtggtaattttttgacgacgagcattacgctttctggcagtgcttgaaaattcgtctgtattttccggttgcaccttagtaggaatgctctcagttctggttggccctttggaatcttttagctgtttaattgtggtcactggttggtcgatcaggcagttaattcgattcattttaaattgtagcacagccatttcattctgttgggcaattttaaatatataacatgaaatataatgagtccgatagacttacgttcttttcacgctcaagttcaatcaattcggtttcttttcttttaatttcaagctccaattcggatacctttttctatataaaaataataaatcattttgtagaaaaaaggttaatgaaaaagaa

SEQ ID NO: 42092 - DNA, 762 bp, DROSOPHILA
atgggagatcgcaacaagcagccggttattctgctgaaggttccgtcctccgatgatttctatggttcggcgttgcgcagccataacctggatcccatcttcattactccctcgcattttgtgttcaagaatctgaagcaattgcaagccaagttgcatgagccgcacaaatatgccgggattatatttgcatccccgcgctgtgtccaagctgtaaacgaggcactaggaaagacaccacttcctagttgctggcgtgcgttacacaattattccctaggcaagaacacgcacagcgccgcctggataacattccagaatcttccgactctgggcgatcatgccgtgaatgcaaacaatctgtgcgatctgatcgtggagacgtttggacccaagagggatctgccactgctcatgccctgcggcaatggcgtgggtcagacactgcgcctccgtttggtcgcccagggattccgggtggatgcctgcgaagtgtacgagagtcggtcgcatccggatttcgtcaatcagatgcggcacgccctcaaattcaagcgaatggaaacgattgtgttcttcggaccctccagtgtccgcagctccttggagttctttgggaactacaacgtttcgcttaaggatcgcaagctgatagccgtgggcagtggcaccaggaaggcaatggaggaatctggaattaaggcggacggagtcgtgaatgctgctgacgtcgaccgcctgataaatatcatcaaaacatag

SEQ ID NO: 42093 - protein, 253 aa, DROSOPHILA
MGDRNKQPVILLKVPSSDDFYGSALRSHNLDPIFITPSHFVFKNLKQLQAKLHEPHKYAGIIFASPRCVQAVNEALGKTPLPSCWRALHNYSLGKNTHSAAWITFQNLPTLGDHAVNANNLCDLIVETFGPKRDLPLLMPCGNGVGQTLRLRLVAQGFRVDACEVYESRSHPDFVNQMRHALKFKRMETIVFFGPSSVRSSLEFFGNYNVSLKDRKLIAVGSGTRKAMEESGIKADGVVNAADVDRLINIIKT

SEQ ID NO: 42094 - DNA, 3442 bp, DROSOPHILA
aggtgttttagttcttaactaacattttagcggttttggcttttgggtatggcaaagctaccttttttagggattttaattaaaaaattactcatatcaccgaagagatggagatggaggatatggagctcaagcagctttcttgccgtttctgcgtaagataaatttgccggcttgacgaaatattcgtgtggttgcttcattcggtaaaagtctgtggcagcggctgcctgaaattgtgctgcaagtttatgaaaattccttctttatggaaaaggtgggtgtgcgtgtgtgtgtgtgtgcgaaaatggtgttggcttgttaattttgcgctgctgcagcgttgctgtcaaatttatatgctggttagcttagctagcaaaacttttcggtttctggcctgaagaatgagcatttgtatgcgtgcttgtgtgattttctaatttatgagcccagttagaattgggacaatgtcggcaagccagaaagttcaccaaaagcactttgacataaagcagaactcgtgcgattctgctaaagaaaaatagcacacggtttgatgaaatttagtattaactaaagttgtatacttagtgttcccgatttcttaactcctccgacgtccgagatacctagactgtcctagctacttttaagtcccacagccatacttaaattcttcttttagatattcaaatattacgaactataattagttataattattatataagtgtcattaatttaattcatacaatcattcatttaattcaaatcaatcaaaggcaaatagagtagctagcatttatacctaacaataaacatttcttaagcacagtttgaaaaatatttatattcctatataatatttaaatatgcgcgccaattctgacagtgcagcgagttggcaggttggcgtgtaacagctgttaagtctgcactgagttgacagctctgactcaaatcctaaaaatctacgtggagcaaaaataaacaaataatggcaaaaaatccaaaaaaggaggaggacggcggtaacgactgggcccaaagtgacgaggacgacaactgggacgattggggcgatgacgatgacaagttcgttcacgtggagaaggaacagcagccacaggagaaagtctcgagcagaaacgacgcaaaaggaacggcggaaaatcaggaaaagctggaaactcccagaatttctgctccagcaacagcatccgccacatcctcgtcctggggtctgtggggcggtaaactgagctccgtgctaaccaccgccacggagggattgggcacgataaccacccaagtcaaccaggggcttaatcaaatcatcggagtgcccgatcccgaggagctggctcgcattaatgtggctgaaaaggcggaaaaggctgctaaagcgccgccagaggaaaatgtcgacgatgaaaaagaatcttcggccgcctttggcttggactttgtcaccaatctgggctccaaggttctcaacaccggactggatacactcgagggcattggcaagaagaccatgaccatcctgcaggacaacgatcccaagctgatgaacaagaggaaactgctcggtctggaggccaactcgcctaatttgagtgccgtgttgctggaggcaaagaaggaggccgaccaaatggagcaatccctgcaacagctacagctgaaaagacagaaggcgcagctgcgtttcgaaatccttttcgaaaattactgcggcctggtgcacttcgaggccctggagatcctttccaaggagtcacgcctcaaactggacaccctactcgatgcggttagtggcaatgcccgtgcagagttgcaggaaacgataaacgaggtgaaggaactgatcgaactggaggatctggatgtggagagtgaaggtgactacgaggcggaggaactgagcgagcgattggcggccacaatcaaggacgccgagctgggcattcagtttgacgacatagccaagtaagttgtcggaaactaatattatttaaacataccataaacccaaatcttttgtacagtcactggacgcagtccctcagctggttgacctcagaggaagcaactgccgccgatctggagcaagcctatgctaagagcatccacgcgctgagtgaagcgtgcgccctcgagatgtgtaagctgcacaaaatcgccgagctgttgctggtgaagccacatcacagcaccgccaacgaagtggatggcgtcgtcaatctctgccagcagttcaatggacaccttcaaggacttagccaccgcttcgccgccgttctgagcggcaagtcagaaacggaggaatcaaaaggccgggtcagcacattcttttccgaaatgctatctgccgtgcagttcatcgagaaggcctacaagctatttacacccattctccagatgggagctgtgtaaacggatttaagattaattgttgtactttctacttttactattgcctggttagtgttctcaactcacttgtttttccatataaatgtacaaaattataaatgattgcgttgcaaatgcttgtgataacattcccgaaattattgagaagttttttcaaagtgcaactgaaagttcggtagcctgcattcgtgtttggttggattagagccacctaataatagttggcttcaatgtgatgaactatttttaaaacccgactctcgataggcgcggcaataattttcaggcattatctattctatgccctttctattcgaactattctataaatcaaacgcaaaacacgaatatcaaattgtccattctctagttaagtccagcaaaatttagttagaatcatgggagatcgcaacaagcagccggttattctgctgaaggttccgtcctccgatgatttctatggttcggcgttgcgcagccataacctggatcccatcttcattactccctcgcattttgtgttcaagaatctgaagcaattgcaagccaagttgcatgagccgcacaaatatgccgggattatatttgcatccccgcgctgtgtccaagctgtaaacgaggcactaggaaagacaccacttcctagttgctggcgtgcgttacacaattattccctaggcaagaacacgcacagcgccgcctggataacattccagaatcttccgactctgggcgatcatgccgtgaatgcaaacaatctgtgcgatctgatcgtggagacgtttggacccaagagggatctgccactgctcatgccctgcggcaatggcgtgggtcagacactgcgcctccgtttggtcgcccagggattccgggtggatgcctgcgaagtgtacgagagtcggtcgcatccggatttcgtcaatcagatgcggcacgccctcaaattcaagcgaatggaaacgattgtgttcttcggaccctccagtgtccgcagctc

SEQ ID NO: 42095 - DNA, 1383 bp, DROSOPHILA
atggcaaaaaatccaaaaaaggaggaggacggcggtaacgactgggcccaaagtgacgaggacgacaactgggacgattggggcgatgacgatgacaagttcgttcacgtggagaaggaacagcagccacaggagaaagtctcgagcagaaacgacgcaaaaggaacggcggaaaatcaggaaaagctggaaactcccagaatttctgctccagcaacagcatccgccacatcctcgtcctggggtctgtggggcggtaaactgagctccgtgctaaccaccgccacggagggattgggcacgataaccacccaagtcaaccaggggcttaatcaaatcatcggagtgcccgatcccgaggagctggctcgcattaatgtggctgaaaaggcggaaaaggctgctaaagcgccgccagaggaaaatgtcgacgatgaaaaagaatcttcggccgcctttggcttggactttgtcaccaatctgggctccaaggttctcaacaccggactggatacactcgagggcattggcaagaagaccatgaccatcctgcaggacaacgatcccaagctgatgaacaagaggaaactgctcggtctggaggccaactcgcctaatttgagtgccgtgttgctggaggcaaagaaggaggccgaccaaatggagcaatccctgcaacagctacagctgaaaagacagaaggcgcagctgcgtttcgaaatccttttcgaaaattactgcggcctggtgcacttcgaggccctggagatcctttccaaggagtcacgcctcaaactggacaccctactcgatgcggttagtggcaatgcccgtgcagagttgcaggaaacgataaacgaggtgaaggaactgatcgaactggaggatctggatgtggagagtgaaggtgactacgaggcggaggaactgagcgagcgattggcggccacaatcaaggacgccgagctgggcattcagtttgacgacatagccaatcactggacgcagtccctcagctggttgacctcagaggaagcaactgccgccgatctggagcaagcctatgctaagagcatccacgcgctgagtgaagcgtgcgccctcgagatgtgtaagctgcacaaaatcgccgagctgttgctggtgaagccacatcacagcaccgccaacgaagtggatggcgtcgtcaatctctgccagcagttcaatggacaccttcaaggacttagccaccgcttcgccgccgttctgagcggcaagtcagaaacggaggaatcaaaaggccgggtcagcacattcttttccgaaatgctatctgccgtgcagttcatcgagaaggcctacaagctatttacacccattctccagatgggagctgtgtaa

SEQ ID NO: 42096 - protein, 460 aa, DROSOPHILA
MAKNPKKEEDGGNDWAQSDEDDNWDDWGDDDDKFVHVEKEQQPQEKVSSRNDAKGTAENQEKLETPRISAPATASATSSSWGLWGGKLSSVLTTATEGLGTITTQVNQGLNQIIGVPDPEELARINVAEKAEKAAKAPPEENVDDEKESSAAFGLDFVTNLGSKVLNTGLDTLEGIGKKTMTILQDNDPKLMNKRKLLGLEANSPNLSAVLLEAKKEADQMEQSLQQLQLKRQKAQLRFEILFENYCGLVHFEALEILSKESRLKLDTLLDAVSGNARAELQETINEVKELIELEDLDVESEGDYEAEELSERLAATIKDAELGIQFDDIANHWTQSLSWLTSEEATAADLEQAYAKSIHALSEACALEMCKLHKIAELLLVKPHHSTANEVDGVVNLCQQFNGHLQGLSHRFAAVLSGKSETEESKGRVSTFFSEMLSAVQFIEKAYKLFTPILQMGAV

SEQ ID NO: 42097 - DNA, 3513 bp, DROSOPHILA
cgcccagcctgtttgcccagcaactggctgcagaacttcgacttccagaaggccattgtggcgggatggggcttgagtcaggagggtggctccacctccagtgtcctgcaggaggtggtggtgcccatcatcaccaatgcccagtgccgggccacttcgtacaggtccatgatcgtggacaccatgatgtgtgccggttatgtaaaaaccggagggcgggatgcttgtcaggtgggtttaaagctacttggaacattctttaaaggttacatttgaccactctctatgaaccacctttccagggcgatagcggtggtcccttgatcgtcagggatcgcattttccgtttggctggagttgtgtcctttggctacggatgtgccaagccagatgctcctggtgtctatactcgagtgtctcgctatttggaatggatagcagttaatacgagggactcttgttactgcataaactaatccgtttaaaataataataaatcgtgtaaacattatttatttgactaaccctaaatatgatttttaattgaagcctaattaaagttaatatttaatttctttattgaaatgcatattttcgtagaagtatttgggagggctgactttgaacttaaagatagttctttactaatttgttgtgcaattacacaataactttcctttacacattgaataaaggagtaattgatttcgattgattaaatatatatatcttcccatcggaagtggagtaactttttgctattcagcagcaacccacggtcacataaaaatccagttctctttctcgatcgtggggtagggtttatttatttcgtttggggaattggaccgcgtgtgtcccacgcaactccctcaatcgacatctgattttactttcttaatgcaaaagaaataaaaattgtacaaatattttgtggaaacaggttatggaaaccctagcagtggcctttcactttttgccccgcgactgcttgcagaaatcaataaaactcgaacgcgaactcggagttgaagttgaagtttgctgagcgaaaatcgaatcgaagccaaggacgttttccgtcgacatcgcctgacacattgttatcacttgtcaaggctccacaaccgtcctgcgaatcgcggagttgacaaaacctttatctttatcccttttggccgggcaggccgacttgtggccgacagttgtttaatggattttcaagttatttctggtattttgttgtagttgccgctgcatgtcgcagaaatacggcaaaacaaagatatctctccgcggaaagaaactcgtttgtggctaggggccaaagaaaatgccgcataattgccgccaccacgacttgaaaacaaaaagggggcggggcacccagaaggggcggcggtggcaggctagccaccgaatcgacaatcttgtcaatgctggctgccctggcatttgattttatttttaactagactataattgatgccaggcattgcaagggttatcgagaagaaactcgacgggcaaggcaaggggaaatatgtacatacatatgtgtggagttcagggaacagcgcaatttatcttaattaaaaacgtgccatcagaaaagagttgtgtagtaatattcatgaaaatggcactgcttagctgatttacatatatcaacatttatgtgagacttaccatttcaggttaaaattatttgtggtagggaatagagtgaaactaaagatgtggtaagatataacttattttttggtcagcaatacagaaatgttatgttcttgtatctaaagtaaaaggggaaacgccagttctgcacattattgaacccacatatgctggttaatttaatcaagtgttttgtttagtttattttagtattacttttaatttatcatttgacatctgaggacattgcctttgattaagaaggtttcgcagattctctatagagttgatagtcgattgaagttttctttggacattggcacactcaactaccagatccagacagttatcccaatgccgattcgcgattcgcaaattgtctgacaccaaacagccgaatatattccttacgggtaggagatatcctaggatcgggttaacaggaagtcggatcatcttgaaaacctttccccagtagttatcattctctacgacgcgagtaagagccttgtagggtcgtccccttggcaattgggcctctgctggaattcgttcaaaaccctgatgcagtctaactctagccaggactaattgagctctacacgactccttgttgacttgcgagtgcagcagctcaaggtcttctattaattgtatcatttgcaagaggaggccatctaaagtacatctgacatcttcgtccttcgtgattgatctgcttgctcgcttcggatccgattcatcgcagggcactaccttttggctcatctcttaacaggatatttctctttaacaatttttgaaagttcgaaaaatatcgctttgaaataagtttgatttgaaacgacattgtgactaaactatcaagcaaaccaagcaatatttctgttgagattgttattattttgttttcataatccttaattatattgttgcaaattaggtatgtatgtatagttacattatataatccaagcgattacagttaactaatacaaaacgaaaattggttaaggtaatgccattgtctttaaaaccaccttttcaaattagtttcccagaaaatgaactagttacttactccacttgaagccatgttgtttgccttcaaatttcttagagtttttgttggttttgatgaatttatcagatttgttagtctgccttgaaatgaagagggtttcgagaaggggaatcgtcgcaccgcacgcttcgctggctaatttaacataattctcacataaatcgccagcgagttgggtagagaaattttcacgcctcgcttaacgcatttggcatagcaaaaatccattttatggcttgttctcctgccatttagttagcgcttcctttccatattttttcagttttttttcacaattttttatggagttaaaacaaatgtccaaaattgtacaagacacgagttttcgctgcatcaacgcggcactttgctgctaaaccgcaaaacattttaataaattgccagttattagtttcttgcagagcggcaggaaaaagtgcaattaaaatgcattcgaaatggggtgaggtggtgggtaggaaatcgggggacaaaggaagttccgtagcaaaagaaattagcataagcattgacttttttccaaaggggaaggtggggcgaaaaaaaaaactgttgcgctagtttcccataatttgccccagcgaagataatgagcaagaaagagtagccaggggatgggttggaaaagcggggggaaagccacggggcgggaaaactgcggtcagtcgcatagcaaatggtgtgaaactctgctgaaaaccgggaaggaggggaagcccgcactgcattca

SEQ ID NO: 42098 - DNA, 752 bp, DROSOPHILA
caaacttatttcaaagcgatatttttcgaactttcaaaaattgttaaagagaaatatcctgttaagagatgagccaaaaggtagtgccctgcgatgaatcggatccgaagcgagcaagcagatcaatcacgaaggacgaagatgtcagatgtactttagatggcctcctcttgcaaatgatacaattaatagaagaccttgagctgctgcactcgcaagtcaacaaggagtcgtgtagagctcaattagtcctggctagagttagactgcatcagggttttgaacgaattccagcagaggcccaattgccaaggggacgaccctacaaggctcttactcgcgtcgtagagaatgataactactggggaaaggttttcaagatgatccgacttcctgttaacccgatcctaggatatctcctacccgtaaggaatatattcggctgtttggtgtcagacaatttgcgaatcgcgaatcggcattgggataactgtctggatctggtagttgagtgtgccaatgtccaaagaaaacttcaatcgactatcaactctatagagaatctgcgaaaccttcttaatcaaaggcaatgtcctcagatgtcaaatgataaattaaaagacggttgtggagccttgacaagtgataacaatgtgtcaggcgatgtcgacggaaaacgtccttggcttcgattcgattttcgctcagcaaacttcaacttcaactccgagttcgcgttcgagttttattga

SEQ ID NO: 42099 - protein, 227 aa, DROSOPHILA
MSQKVVPCDESDPKRASRSITKDEDVRCTLDGLLLQMIQLIEDLELLHSQVNKESCRAQLVLARVRLHQGFERIPAEAQLPRGRPYKALTRVVENDNYWGKVFKMIRLPVNPILGYLLPVRNIFGCLVSDNLRIANRHWDNCLDLVVECANVQRKLQSTINSIENLRNLLNQRQCPQMSNDKLKDGCGALTSDNNVSGDVDGKRPWLRFDFRSANFNFNSEFAFEFY

SEQ ID NO: 42100 - DNA, 3396 bp, DROSOPHILA
cggtttggtttgcactcacaacagcattgcgtactctaagcaatcgtctaagttatttagttctacgagcccacaacaaaaaaaaaaaacacagatacgctacacacaagtacacaacaaaacaaacacgaagcagaagcgaaaatcttgaaacaatgtaaatacaagctaaacgcatagagctaagcagttactgataattgtacactaaccaacgatcaagaaatcatcgaacgcacccaccacgtcgcgtggacgtggtggatgcggtcggttggagcactggtcagcggttaagtaggcaccacaacaaacccacttgggcttcaagccgaagtgcgctaatgataaaaatattaagctaatctaaatatatatatatatacgaaaacatttaaatatataccatatgcatacattaacgtgtaaatgccgaagagagcagttagctgaagatttgaaatgtattcgcacctgcacacaaacgatataacaactaagctatagaaggcaattatctgtaaattgatcaagcttaaccattagctaaccaaccattagcctttagcccagcaagtaatcagtcggcgttggggccgtgtttttcttatattttaaaaagtttatcagctgtaaatgtatagagcggaattcgaaaggcggtgtgtgaaaatggatcgaacgataaatgtatgtatatgtattttagttgcttaggcgttttcatttctaccttataaacacgttagcggctaattgtagcaattaatactataaaacacaaaaaaaaaaacaaaaacaaaaaacaacaaccataaggaaacctagcgcggctatgtccgtgaaaatgtttattctaatttcgtttttactatctactgcgtatgtttcaccgcaaagctagaatccagtttaattcgttaaaacttgaaaagaaatacaacagaaatgtgaagattaactaaggaccgcaaaaatacagaattatatattcttaaaaatgacacatggagcgccagaagtgatatgctgggaccaccatcgccagatggtggaatctggccaacatgtgtgtcgaatagtttcactagctgacttcaccagttgacttcagtgggcgattgaacttggaatcgaaatgatggtaagggcggacaacgcactggcggctttaaggatactgactccctttcaagaagttttcattgctttttctgctggcctggagctgtgtgtttctgggaagcacgggttctctaaatcggattgggaattctgatataggctttaaatccttggaggagctagtcttgattagaaagactttggctgcacaggcactaaagctaaggggcttggagataaatctgcatcgcgtgctcagcaaggtggtgttactcgccgatgcagttgtgcaagtacctggaagatactcctccaaagaagatccccttgccgttctatctgaacgtctaaatttgttgctggagcgactgaaccaggaagaaagaatatctacgaatttgctggaactcaaagagtggtcaactaaagtgtgccaagaaccttccccaagccagaccttaccaaaggaacttactgaagaaaaggacgagccgaaagtgggcaagttatagtgtatcattttcaagtttcatcgactcacccggtgacattttccagacttttaccagcccgccaaatccgattgccatgagcttgacgaaggtgtccgggtggatggcgtctataggtttctggttccggagcgcaatgaagtccagcgtgatttgtacgagcgttattgcgccttcgccaccgacggccccgcctggacagtgatccagagtagaggcggctccttcgatccgcacgaaaatttcaatcgcagctgggacgagtatcgcgcgggttttggtaacttatcccgagacttctggtttggcaacgagttcgcgcacaagattctctaccgcgacgatcatgagctgagaattgagctgcaggaggcaggggaaccgctggattgggcggagtatccactcttctggctagacagcgagagttataactatcagctttcggtggctggtgaattccgtggttcactaccggacgctctggagcagcacaatcggatggatttcagcacttacgatcggcgaaggaaccacgcgaaatcggcagattccacctgtggcgaggattacggtggtggctggtggtttgatcgctgcacacagtgcaatctgaatggagaacatggtgtccaccagagagcaagtccagccattatctggatgaactggcggaccgggaccgataaaccgaagagctcgcggatgatgattcgacccgtaaatcccactccgggcgataactctgatggggattaggcggcggagaactgggaaatttaaatagcaattccaatcaaatgttgcacgtatttctgcaattgaacgttaccgatagttggcactgcaaataaacgttaccgataggaatcgaatttactggcactttctaaataattctgtgtttattcctgatttaagctgtttccattattatgaaaattggaaggtattttcgtatcataggatttccttaatttgtctaaaatttgaggaaagcaggaatttatcgagtattatcgaatgaatgtgagtgaaagcaagaaaagtcgcgagctaagcattatggggcgccaaatttatgaatttcaatgattaaaatgaaatatgtttaaaatgatcttggggcaactgtttacaaaatttattgagtcattattataattattaagataacgtttcttcgacaagaattgcacacaatttactcaagtttacaatgtagttaccacacaatggcaaagttttgcttttggccacaaaataaccttgcacgaagctagttataacccagcgaccttagattattaataaaatttaccctaagattataataatttcattaaaaactgcaatcaaagtttccctttttgttcgcattggcgctcaatgtggccgcagaaaaataccgcaaaacgacagtaataaaaaaaagtactaaaatgtacacatatgactaaaaccaacggccagtcgtcgataaattttcaaatcgttcggttgcgggcggatgattcttgattgttttagtcctaacaacattgccgctcggacgcattgcggcattttattgattcgcgataatccttgtgataatcaataattaagcatagagtcagcggataaattaaaccaataaagcacatatcctatgtgccgttattggccgacgactgtaattgtttttgcgcgggtgtaaagtgcacgtgtgtgtgtgtgtcaaggattacggcaaaattgtaactgtttgtcgtgggca

SEQ ID NO: 42101 - DNA, 1092 bp, DROSOPHILA
atgacacatggagcgccagaagtgatatgctgggaccaccatcgccagatggtggaatctggccaacatgagctagtcttgattagaaagactttggctgcacaggcactaaagctaaggggcttggagataaatctgcatcgcgtgctcagcaaggtggtgttactcgccgatgcagttgtgcaagtacctggaagatactcctccaaagaagatccccttgccgttctatctgaacgtctaaatttgttgctggagcgactgaaccaggaagaaagaatatctacgaatttgctggaactcaaagagtggtcaactaaagtgtgccaagaaccttccccaagccagaccttaccaaaggaacttactgaagaaaaggacgagccgaaacccgccaaatccgattgccatgagcttgacgaaggtgtccgggtggatggcgtctataggtttctggttccggagcgcaatgaagtccagcgtgatttgtacgagcgttattgcgccttcgccaccgacggccccgcctggacagtgatccagagtagaggcggctccttcgatccgcacgaaaatttcaatcgcagctgggacgagtatcgcgcgggttttggtaacttatcccgagacttctggtttggcaacgagttcgcgcacaagattctctaccgcgacgatcatgagctgagaattgagctgcaggaggcaggggaaccgctggattgggcggagtatccactcttctggctagacagcgagagttataactatcagctttcggtggctggtgaattccgtggttcactaccggacgctctggagcagcacaatcggatggatttcagcacttacgatcggcgaaggaaccacgcgaaatcggcagattccacctgtggcgaggattacggtggtggctggtggtttgatcgctgcacacagtgcaatctgaatggagaacatggtgtccaccagagagcaagtccagccattatctggatgaactggcggaccgggaccgataaaccgaagagctcgcggatgatgattcgacccgtaaatcccactccgggcgataactctgatggggattag

SEQ ID NO: 42102 - protein, 363 aa, DROSOPHILA
MTHGAPEVICWDHHRQMVESGQHELVLIRKTLAAQALKLRGLEINLHRVLSKVVLLADAVVQVPGRYSSKEDPLAVLSERLNLLLERLNQEERISTNLLELKEWSTKVCQEPSPSQTLPKELTEEKDEPKPAKSDCHELDEGVRVDGVYRFLVPERNEVQRDLYERYCAFATDGPAWTVIQSRGGSFDPHENFNRSWDEYRAGFGNLSRDFWFGNEFAHKILYRDDHELRIELQEAGEPLDWAEYPLFWLDSESYNYQLSVAGEFRGSLPDALEQHNRMDFSTYDRRRNHAKSADSTCGEDYGGGWWFDRCTQCNLNGEHGVHQRASPAIIWMNWRTGTDKPKSSRMMIRPVNPTPGDNSDGD

SEQ ID NO: 42103 - DNA, 4705 bp, DROSOPHILA
catctcgaaaacgacttggccattttcccattgtatgtgataattaaatatgccggatttaatccatgagctggtcaccggacgcatctaagtaatcgccaggccagacactttggggatccccaggacctttcacctgcactctggcactctgttttctgtctttatttcattttaattacattgcagttacatttcacaattctcggggccatttgatggccggtttcagggctctggcagtcaaatcaggcgtatgataaattgattgcgaacgcatacttatgtgcatacgaggatgtccttgctcatgcatgcatttatgggtacacccaggataagtgcaatcaagatgcaacagcagctcatgtgcaatttaattatcttcatttcaaaaatattattttgcagaaagacctaatgacaaaacgaatccttttagaagactgtatttacgatttttcagcattttttttctcccagtgtatattactatatgtgtgttgtgtttgtctggcattgagacttttctgcttcatcctgcgaaagctgggctttaataaaattttacgcataaactgcctttgattgaattacatttaattattttaccagacattttgcgtggagttcctggccgaaatcgttttgacactgctcttcgttttgtcatttgtctattttctttccttttccatcgaactcatctttatttgtttctctgttttaaattaaataatttgacaaacataattaaacacttaaattactaagaatgttaatgatagaatatttactgggcgaaaaattgttacagtcgaacaaaaaagtaatagtactgctattacttttcttatatttttagtgaagtcttggagcaaaataactatatattaaagatagctgcgcttaggcaagcttgaaaagtaaacttataaattaacaatttggtttctgtttcaaattcatttgttgatttgtacccaatggcggttattccttatctcacattaatactatactgcttggggtggctcgatttggagagggatattgattggagtagtcgatttcctttcggattcgcttgccctttcccatgatgctctcgacgtccacctgggactgctgcgactgcttcttttgcttctttggtagcttcggctgactttttcccatcaggttttcccagtagaatgggtcagtgttttcagcatcgttattgtagtcatcatgctcctcgtgatcttccttagtggcataagaagcgaccttaaaggacgaaagatactcgttggcccaagactccttctcttcaatgccgcgattggtgcggtcaagcagatcggccaccgctttgtcgtcgtagtgaatagcctcactcttgccgtccttaaaaagatcctcggtgccaaagcgaaggatgtcttcgagctcgtcctttgagaaatttgttgtcatgccacccattcccgggcgcaccacaagatgggtgagcatcatcttgtgcttggcaacctgcataatgcgctcctccaccgagttgtgggtcacaaatcggtagatcattaccttctttttctgccccatgcgatgggctcgggaaaaggcctgaacgtcgttgtgcggattccagtccgagtcgaaaataatgacggtgtcggctgttgccaaattgatacccagtccgcctgcacgagtgctcagcaggaagacaaagtgctccgatacgggatcattgaatctgtcaatggccttctgacgtaaatcgcctttgatcgacccgtcgatgcgatcgtactggtatccctccccttcgaggaagtgttcgagaacattcagcatcttggtcatctgggagaataaaaggaccctgtgattgtccgcctttagctgttttagcatctttgacagtaaatctagcttgccggaagctttggtcagcgaactcatctcgtaaagaccacttggcgagatagtggcctcctcggcggcggaggggaacaggtacggatgattgcagcactttctcaggtccatcatgatgttgagcagcgaacacacgcgaccgccgcctttctgatttaaggccttgaagtttttggtcaaaatatgcttgtagaattttttttgcatagacgacagctccacgcgcacaatgaactccgactttgggggcatgctcttcaatacatccgccttaaggcgacggagcatatgcggttccaagatctcgtgcagtcgcttcacttgctcttccttcgaaacgtcagtgaactcggcctggaaggtctgcaggtcgttaaactttccagagctcaggaaattgagcagatggaacagctcctcgagattgttctgaagcggagtgccggtcagcagcagcttgtagccgatgcggtacttgctcaggatcctaaaaaacttgctctggttgctccttagccgatgggcctcgtccacgaccagcgccgcccaatcgatgcacccgagaaaggctgcgtccacagagataaactcgtagctggtcagcattacgttaaacttatactgggtttggttttcgcgcatggttttggtggttacctcctcgaagcttatctcatgtttccggataaccgctctagcagtcttgccgcccacataggtgacacagtatagttctggagcccagagctccagctctcgctcccaattggtcagtgtggaaagcggcacggatatgaggaagggtccgcggcaatgtccctccttaaatagtgagtaaagaaaaaccacggtctgaatggtcttgcccagacccatctcgtcagccagtatggtggggatgccttggccccaactatagcgaagccaactgacgccctctatctgaaagggatgcaatttaaggccagcctccttcaagaatactggctgatcctcgtacttcttattcaggtctattgtgggtgcaggtctatctctttgacgtcccttattactggaccgtagtttcttgtagagagcgatagcctggtttagacccgggatactgtcgctttctctttcccagctgctatcgttataagacaactcacgccatttcaccaagtacatagtccctccattgggctcctcactatgattgataacccgctggacaaggagccactccggcttaatgccgtatctgtagaatcgctcgtgcagattgccgtcctgatcatcgagctcctcgagacttggctcttccatgtcgctccttctctggaagctggcaaccattgaggcatggtgcaagagcatttgaccttcgggaatccattcgcagtgccagtaggacatgccatgccacttgataaagtactcgcgccgcttttcacctttagatgtacgaagctccacgcttcgatcgagggcccagcgccatgacaatatcttctcggcttttccgggcaagggaatgcagcgcgggcagatccaatcgcctttgggaatcgatttcaagggaggactcagacaggttctgtggtaaacggaagggcaggaatcgcagcacagcagatctcctccatcactacaaactttgcagtattcttcgtcgcgaaacttctgcttcttggcattggttttcggccgcttgtccttggaagccttgccaggtgttttccagtctggatcagcccctctcttagacgacatgctatttgagtttagtttttgcaatcactgattctgaaatggaaattgtcaaatgcgcgccagaagaaaacggtactaccaattataattccaagcaaagaagcattcacactgatcttccgaaataaattggtctgatgcgccgtttacacttgcatctggttaggatgcgctaacactattgcgaggtaaaaaggtgattctatatttatttatttatttatttattatttatttattattatttatttattttttatttatttattatttatttatttatttattatttattttcagccacttgtgtcaccataaaaaaccctagcataatagaacaatacgaacaaataaatgtttaagtcaggggtccgtctatatattcattttttattggaaaatatcaacgttttttctaaacgattcggatggtaaatatcgaacaaaagtcggcttgcatttatttcgatattattctaggtattgaacgtcgctaataccaaatacactataataattccagtgtctttgctaataccctgttcgcacgggcgggcttgctttgatcggcattcgataggtaaacaattattaagatcgtaaaaacttgggcttgctcttcatgatattatcataaagataatagaatttactcatgtaaaatttacttaatttagcgggaagttctctgaaactaaaaaatcaagattttttaaataaatgctagtttagacttcacattttgtagaagtgtttaaacattagcgttaatacacagacaacaatcgaaaacctttcgaaatatcgatatacatatatttaggtaattaatttaattcaaattaagggaaacagcgtaagtttatatgcacaattttttttttgttaaaagtgctattaattttatgctttaactggatgtaaatggaccgttaaagcccagctctgcttgctgatgcctgcgtgtatcgaaaaccaaaaaccagccgcagagcaacgaacccgcgaccgccgaaacatt

SEQ ID NO: 42104 - DNA, 2673 bp, DROSOPHILA
caaaaactaaactcaaatagcatgtcgtctaagagaggggctgatccagactggaaaacacctggcaaggcttccaaggacaagcggccgaaaaccaatgccaagaagcagaagtttcgcgacgaagaatactgcaaagtttgtagtgatggaggagatctgctgtgctgcgattcctgcccttccgtttaccacagaacctgtctgagtcctcccttgaaatcgattcccaaaggcgattggatctgcccgcgctgcattcccttgcccggaaaagccgagaagatattgtcatggcgctgggccctcgatcgaagcgtggagcttcgtacatctaaaggtgaaaagcggcgcgagtactttatcaagtggcatggcatgtcctactggcactgcgaatggattcccgaaggtcaaatgctcttgcaccatgcctcaatggttgccagcttccagagaaggagcgacatggaagagccaagtctcgaggagctcgatgatcaggacggcaatctgcacgagcgattctacagatacggcattaagccggagtggctccttgtccagcgggttatcaatcatagtgaggagcccaatggagggactatgtacttggtgaaatggcgtgagttgtcttataacgatagcagctgggaaagagaaagcgacagtatcccgggtctaaaccaggctatcgctctctacaagaaactacggtccagtaataagggacgtcaaagagatagacctgcacccacaatagacctgaataagaagtacgaggatcagccagtattcttgaaggaggctggccttaaattgcatccctttcagatagagggcgtcagttggcttcgctatagttggggccaaggcatccccaccatactggctgacgagatgggtctgggcaagaccattcagaccgtggtttttctttactcactatttaaggagggacattgccgcggacccttcctcatatccgtgccgctttccacactgaccaattgggagcgagagctggagctctgggctccagaactatactgtgtcacctatgtgggcggcaagactgctagagcggttatccggaaacatgagataagcttcgaggaggtaaccaccaaaaccatgcgcgaaaaccaaacccagtataagtttaacgtaatgctgaccagctacgagtttatctctgtggacgcagcctttctcgggtgcatcgattgggcggcgctggtcgtggacgaggcccatcggctaaggagcaaccagagcaagttttttaggatcctgagcaagtaccgcatcggctacaagctgctgctgaccggcactccgcttcagaacaatctcgaggagctgttccatctgctcaatttcctgagctctggaaagtttaacgacctgcagaccttccaggccgagttcactgacgtttcgaaggaagagcaagtgaagcgactgcacgagatcttggaaccgcatatgctccgtcgccttaaggcggatgtattgaagagcatgcccccaaagtcggagttcattgtgcgcgtggagctgtcgtctatgcaaaaaaaattctacaagcatattttgaccaaaaacttcaaggccttaaatcagaaaggcggcggtcgcgtgtgttcgctgctcaacatcatgatggacctgagaaagtgctgcaatcatccgtacctgttcccctccgccgccgaggaggccactatctcgccaagtggtctttacgagatgagttcgctgaccaaagcttccggcaagctagatttactgtcaaagatgctaaaacagctaaaggcggacaatcacagggtccttttattctcccagatgaccaagatgctgaatgttctcgaacacttcctcgaaggggagggataccagtacgatcgcatcgacgggtcgatcaaaggcgatttacgtcagaaggccattgacagattcaatgatcccgtatcggagcactttgtcttcctgctgagcactcgtgcaggcggactgggtatcaatttggcaacagccgacaccgtcattattttcgactcggactggaatccgcacaacgacgttcaggccttttcccgagcccatcgcatggggcagaaaaagaaggtaatgatctaccgatttgtgacccacaactcggtggaggagcgcattatgcaggttgccaagcacaagatgatgctcacccatcttgtggtgcgcccgggaatgggtggcatgacaacaaatttctcaaaggacgagctcgaagacatccttcgctttggcaccgaggatctttttaaggacggcaagagtgaggctattcactacgacgacaaagcggtggccgatctgcttgaccgcaccaatcgcggcattgaagagaaggagtcttgggccaacgagtatctttcgtcctttaaggtcgcttcttatgccactaaggaagatcacgaggagcatgatgactacaataacgatgctgaaaacactgacccattctactgggaaaacctgatgggaaaaacagtcgcagcagtcccaggtggacgtcgagagcatcatgggaaagggcaagcgaatccgaaaggaaatcgactactccaatcaatatccctctccaaatcgagccaccccaagcagtatagtattaatgtgagataa

SEQ ID NO: 42105 - protein, 883 aa, DROSOPHILA
MSSKRGADPDWKTPGKASKDKRPKTNAKKQKFRDEEYCKVCSDGGDLLCCDSCPSVYHRTCLSPPLKSIPKGDWICPRCIPLPGKAEKILSWRWALDRSVELRTSKGEKRREYFIKWHGMSYWHCEWIPEGQMLLHHASMVASFQRRSDMEEPSLEELDDQDGNLHERFYRYGIKPEWLLVQRVINHSEEPNGGTMYLVKWRELSYNDSSWERESDSIPGLNQAIALYKKLRSSNKGRQRDRPAPTIDLNKKYEDQPVFLKEAGLKLHPFQIEGVSWLRYSWGQGIPTILADEMGLGKTIQTVVFLYSLFKEGHCRGPFLISVPLSTLTNWERELELWAPELYCVTYVGGKTARAVIRKHEISFEEVTTKTMRENQTQYKFNVMLTSYEFISVDAAFLGCIDWAALVVDEAHRLRSNQSKFFRILSKYRIGYKLLLTGTPLQNNLEELFHLLNFLSSGKFNDLQTFQAEFTDVSKEEQVKRLHEILEPHMLRRLKADVLKSMPPKSEFIVRVELSSMQKKFYKHILTKNFKALNQKGGGRVCSLLNIMMDLRKCCNHPYLFPSAAEEATISPSGLYEMSSLTKASGKLDLLSKMLKQLKADNHRVLLFSQMTKMLNVLEHFLEGEGYQYDRIDGSIKGDLRQKAIDRFNDPVSEHFVFLLSTRAGGLGINLATADTVIIFDSDWNPHNDVQAFSRAHRMGQKKKVMIYRFVTHNSVEERIMQVAKHKMMLTHLVVRPGMGGMTTNFSKDELEDILRFGTEDLFKDGKSEAIHYDDKAVADLLDRTNRGIEEKESWANEYLSSFKVASYATKEDHEEHDDYNNDAENTDPFYWENLMGKTVAAVPGGRREHHGKGQANPKGNRLLQSISLSKSSHPKQYSINVR

SEQ ID NO: 42106 - DNA, 5971 bp, DROSOPHILA
agtaaaagataaaatggaaaaaaatccacgcagcgttttccattttaatgaaatttagcctcgttttgtttttacattttttgctcaattaattatgcaaattgttacaagtccaaagaagcattcctcagcagcctgcccgtattcccatttatgacgaattccgtttagatttagagccataaaacaaatcaaaactaaatgctgtcattagaaactctttctaagtaagcaataaattatttaaatagaaattggcatcgaaacacccccgagtgacccagaaaaacatgcgaaaaatgaggcagcacagtttggctaattttgtgcataaaggtttttgtcaactcttcgcttgagggaatcgctaccattcttttggcgactttcgctttttggaaaacccttttgtttttgttttcaaagttttgttttcttcgcatataatttgtttgcctaaatctttgtctccgcctctttgaaccttctctttcttctcgctttttgcgagatttttcttgttattgttgcggtttttaattgctgggatcgcatccgtaagattcgcttttgtttttcgtctccggttagcgcataatgacaactatttgggggcttgctataagcgaaagtttcgctggctaggatggatggatggataattattaaagttttgtaacagagctctcccccgacaattaattgactattatttaaatgatttttgtctttgctggaaatgaccttttaaatagtatttaaacacatttacctttttcttttttcgattatccaacagcgcactactcgaattcctattacctatagttggtcaaaattaaggatatttgcgtatacccaatatgttgctaacttttatctctaaagaactaactcaaaaactttaaactaaatactacatgacctactgtttaacttagcaaaccctatgacgattttatacaaaattaactttaaaaatattataaggttacttcctatgtttattaaattgatattggaaattgttgtatacattcgtaaggtaccttattttccgtccaattgttttcttccccgtgttttatgtttgactaaccagaacctttcccactctcttttacaatcctcttgcagatcttggtaccctcagtaaccaccacagcaatataagcagcattagcggcattaacgccagtagcaacatcccggcagcaactttaatcagcagcagcattaagaagacatccactgaggcggcaaccacaaaacctgctgcaccccagatccccggcaaaatggagctgctgagcagcaacacaggaacaacaacgacaacgacgacagcaacgcaccacctgcatcaggcaaccaccactaaacagctgttggtgcaggattacctcagctacgcctcaccacccacatattcccgcctgccgcccgatggtcatgaatttccacccaatttcagcgaaccactgatcatgcacagccacccactaaaggtcaccaccgagttgagttacgagatacagaaaggcggaaaggatgagtcctctgcaccaccgcttcccaaaacggggccaccagccacagttcccaggaaagtatatcgccaggatttggtcatcaacgtagagccagcacccagtttaaccagggactatcagagatctctgagtggtggtactccccggaagcctagcgattggcgcaaggatgaaaagtcggagaaatcagtgcgcgacaagattgccatgttctcgtcaaacaacgaactggatgccataccgccagctccggcaacagcccccatttcaagctccttcacccggaagcccttgaataggagcagtgaaaatcttctggacagttgctcatcatcctcggctccttcgctgaaaactcgcgcgatgagcgtggaaaatttgaatgatgttcagcggcaatatcagttggccaaacagctgccccagttgcacgtggccgactctatgtattccctgaacacagccacgcccacaccgagctacgcctctttgccgagaagaagccacgggggatcttattcttctggagtggagagaaggatcagtttctcgggagaaggcggagatgcggccaaccgaaaggcagccattacaaatatcctagagcaaagaagaagaagtttgtcgaaactgcgaggattggtcataccagagagaccccaactgctggaacccatcctggatctgccggagatcaaaagccaggtaaaagcagccagcggagaggatagtacggatagcggattaggcgaaagccaccgcagtacggtgaataggaattgccaattgggtgcaggaggtgccgcaaataactatcgcagcattttaaataccaatcaaagaagacccctggagcaacagctctctcaaccaccagccaaaccacccaggacatcgttgacaccacttcagccgagaagcatgatgataccaccaccaccacctcctttagatcaggaaagtgatacggattcggtgttttcgcacactgctagggttgccactccgccggagaagtttgcactaaccagaaccctcagctccgaaacaaacacttcgatagctagttcaaacacctctactctaacatcaggatcttctgccggatctcaagccagttgcagttcgctgggcagcacaccagcggtggatctaaccaggcgggttctcaagagccaggtgatcaatggcgaagccgttgcgctctccagtcgcaaaagtattctggcctcggccaaatgtcgcagtgccaagagtcgaggtcaagaggaggataacgacagcaccgatggtgaagcctgttccctggccaatcgtagaatgaagccgatttccagctataagctccagcagcaacagatccaactgggcaaacaactggtagtggataagctgatcaatgtggccgcttatgtggaactaacctcggatacggacgacagcagccgtagatctgatacgcctgccaagatcagtgccatgttcatagacgaggagcgcaaggccagcttcaaaggagatcctaaccagcaggctaaggtcaaagtggagcaggtcaaacctatggtcctcccaatgctgctaccatctgcgaaaagggaaccgctgaagcaacagaccaccgccgaactgcgcgaaaagttcgaaaggagtgctgcagcccaagctcaaacccaaaaccactcgcccgtaatccataaggtcacccagaagccgcatcatgagcgattctcctcgctggactccctggcgtccagttcctccggcgttagttccaccacccaaaacgtgagcaccacccaggaaacggccaccgaattcggcagcttttcctcgctgggtagcaaccagagtttgatcaccgcccaggatgtccagcagatagtcgaggaggctgatcctccactaaagaccccagaagcgttcatcatcgtcctgcagagggaaaatcccgagagcagcatcggtatcactttggccggcggttctgattatgaggctaaggaaattacggtgagttaacgcttgtcattctcacttttaaacgtgatcttaatgtaacttctttcaatacccaccagatccataagatcctgagcaacacgccagctgccaaggatggacgtctaaagaagggtgatcgaatccttgccgtcaatggaatgagcatgcgcggactgacgcaccgcgaatccatcagtgtgcttaaggtattttaaatgttttgtaatctagggaaagtaatcttcatcttcaaccttaactaaaacattttttctgaacagaccccccgacctgaggtcgtgctagtggtgacccgctccgagtcgctggtggtgaaggcgctgaccaagaaacgatcctccctgggatcacttagctcgctcaatgagaaacccacggagctggactatgaacgcaagaggaactaccacaaggcctcccgatctctggacttggatcttgatctggtgtccaatgaggctggtgaatcgccagtggctactactcccagcacgggatccgtaagtccaccgcagccggcgagcttgcacgacgaggatgcggaggccaccatcgcaggtatccgggccaggaggcagttgtcccgcggagatgccgccaagcttagcacgagcgagctcctggaacgggcggcagaggccagaaatgccatcgcagctgagattcgtgcacaaggtgagtaagccttttagatgaaaaataatttaacaatgttaaaaattatatacataaatcgtaaaagaactatctgcattgcattttcgttatatctaaaaaatctgtatgaaatcaatttgcataagcattatttacacatccagtaaattcattaacagtaagtcaatttaaattccattaatcaaaatatatatattatttgttgaaaatactcggataattgtgcaatttattgtatagtacaaaaatggaaatatttatccaatattttttattaaatttgttaaactcctgtgcctatcgtatatatcaaaaagtccattgttcataaattattttaatgagtccggtgtcattatagcggaggatgcggcggccagtggaggtggagctcgttgtgtggagattgttaaggacagctgtggactgggtttctccatcgaaggaggctttgattcgccgctgggaaatcgtccccttattgtcaaaaaggtgttcatgggtaaggttaatttgtcatccttcctttaaagcgattattaatgaaggttgtgtttcttaaccaggtggtgccgcccagaagaccaaccaggtgcgcaatggcgacgaaatccttagcatcaatggtgcctccacgtcgcggatgacacgtgtggatgcctggaactatatgaagcaactgccgctgggaccggtcaagatttgtttcgcctagatgaaatggtctaaatgaaataccaacgatggggaagaatgcgccacaattttcatagatttaagccaattagcttggttaccccttaaccggtctaaccttgggggtcttgccaattcgatggatcaatgctgcgagcgatttgttttgcatttaaacgaacctttaattgtatgcctaatttgatagatatttaatttaaagtgcaattgtttaaacccttacaacgttttcatgccctgcttacctacctataactgatcgatgattgtacatattactaatcgagactaatttacgtatttaaacctttaatcaaattgaagccagctatcgggcagccctatttccttatacacaacttattattcaaaaaaacataacgaaaaaaaaaacaattatattttatgccataaattatacgggaacgttatacatgtatattattttaataattattattttatttaaagaacaacaaaaacaatgtttacgtatacaaaagtatttgctaaaaataaacatacaacatatatgaaattaacctgaatgtaatttttttaaattgtctggattgttttaatttccttcacaaaaaaattttagttttcacaaaaaagtctagttttaaatttagaaaaatttatttatttagtttcaacttcacatttttctgtttatacattatgggaacatttctaaaaacaacttaaaatgttatttgtcctatgtactgtacataaatttgatatcagtgtattaaagctgttcaatgagcagttcgcaagctacaaatctttggatgccttggacaccagctttggcagctgcagcataagtcccatgtgctgtagtggattcgccgaggagagactcgaggtagtggatagcgttccattgacattctccctgggatgcggctgcgctgggtgggttgatgaggctgactgctcggaatggaatatctcgccaagcaggtcgtacacacgtcgcttgaagt

SEQ ID NO: 42107 - DNA, 3303 bp, DROSOPHILA
atgtttattaaattgatattggaaattgttgtatacattcatcttggtaccctcagtaaccaccacagcaatataagcagcattagcggcattaacgccagtagcaacatcccggcagcaactttaatcagcagcagcattaagaagacatccactgaggcggcaaccacaaaacctgctgcaccccagatccccggcaaaatggagctgctgagcagcaacacaggaacaacaacgacaacgacgacagcaacgcaccacctgcatcaggcaaccaccactaaacagctgttggtgcaggattacctcagctacgcctcaccacccacatattcccgcctgccgcccgatggtcatgaatttccacccaatttcagcgaaccactgatcatgcacagccacccactaaaggtcaccaccgagttgagttacgagatacagaaaggcggaaaggatgagtcctctgcaccaccgcttcccaaaacggggccaccagccacagttcccaggaaagtatatcgccaggatttggtcatcaacgtagagccagcacccagtttaaccagggactatcagagatctctgagtggtggtactccccggaagcctagcgattggcgcaaggatgaaaagtcggagaaatcagtgcgcgacaagattgccatgttctcgtcaaacaacgaactggatgccataccgccagctccggcaacagcccccatttcaagctccttcacccggaagcccttgaataggagcagtgaaaatcttctggacagttgctcatcatcctcggctccttcgctgaaaactcgcgcgatgagcgtggaaaatttgaatgatgttcagcggcaatatcagttggccaaacagctgccccagttgcacgtggccgactctatgtattccctgaacacagccacgcccacaccgagctacgcctctttgccgagaagaagccacgggggatcttattcttctggagtggagagaaggatcagtttctcgggagaaggcggagatgcggccaaccgaaaggcagccattacaaatatcctagagcaaagaagaagaagtttgtcgaaactgcgaggattggtcataccagagagaccccaactgctggaacccatcctggatctgccggagatcaaaagccaggtaaaagcagccagcggagaggatagtacggatagcggattaggcgaaagccaccgcagtacggtgaataggaattgccaattgggtgcaggaggtgccgcaaataactatcgcagcattttaaataccaatcaaagaagacccctggagcaacagctctctcaaccaccagccaaaccacccaggacatcgttgacaccacttcagccgagaagcatgatgataccaccaccaccacctcctttagatcaggaaagtgatacggattcggtgttttcgcacactgctagggttgccactccgccggagaagtttgcactaaccagaaccctcagctccgaaacaaacacttcgatagctagttcaaacacctctactctaacatcaggatcttctgccggatctcaagccagttgcagttcgctgggcagcacaccagcggtggatctaaccaggcgggttctcaagagccaggtgatcaatggcgaagccgttgcgctctccagtcgcaaaagtattctggcctcggccaaatgtcgcagtgccaagagtcgaggtcaagaggaggataacgacagcaccgatggtgaagcctgttccctggccaatcgtagaatgaagccgatttccagctataagctccagcagcaacagatccaactgggcaaacaactggtagtggataagctgatcaatgtggccgcttatgtggaactaacctcggatacggacgacagcagccgtagatctgatacgcctgccaagatcagtgccatgttcatagacgaggagcgcaaggccagcttcaaaggagatcctaaccagcaggctaaggtcaaagtggagcaggtcaaacctatggtcctcccaatgctgctaccatctgcgaaaagggaaccgctgaagcaacagaccaccgccgaactgcgcgaaaagttcgaaaggagtgctgcagcccaagctcaaacccaaaaccactcgcccgtaatccataaggtcacccagaagccgcatcatgagcgattctcctcgctggactccctggcgtccagttcctccggcgttagttccaccacccaaaacgtgagcaccacccaggaaacggccaccgaattcggcagcttttcctcgctgggtagcaaccagagtttgatcaccgcccaggatgtccagcagatagtcgaggaggctgatcctccactaaagaccccagaagcgttcatcatcgtcctgcagagggaaaatcccgagagcagcatcggtatcactttggccggcggttctgattatgaggctaaggaaattacgatccataagatcctgagcaacacgccagctgccaaggatggacgtctaaagaagggtgatcgaatccttgccgtcaatggaatgagcatgcgcggactgacgcaccgcgaatccatcagtgtgcttaagaccccccgacctgaggtcgtgctagtggtgacccgctccgagtcgctggtggtgaaggcgctgaccaagaaacgatcctccctgggatcacttagctcgctcaatgagaaacccacggagctggactatgaacgcaagaggaactaccacaaggcctcccgatctctggacttggatcttgatctggtgtccaatgaggctggtgaatcgccagtggctactactcccagcacgggatccgtaagtccaccgcagccggcgagcttgcacgacgaggatgcggaggccaccatcgcaggtatccgggccaggaggcagttgtcccgcggagatgccgccaagcttagcacgagcgagctcctggaacgggcggcagaggccagaaatgccatcgcagctgagattcgtgcacaagcggaggatgcggcggccagtggaggtggagctcgttgtgtggagattgttaaggacagctgtggactgggtttctccatcgaaggaggctttgattcgccgctgggaaatcgtccccttattgtcaaaaaggtgttcatgggtggtgccgcccagaagaccaaccaggtgcgcaatggcgacgaaatccttagcatcaatggtgcctccacgtcgcggatgacacgtgtggatgcctggaactatatgaagcaactgccgctgggaccggtcaagatttgtttcgcctag

SEQ ID NO: 42108 - protein, 1100 aa, DROSOPHILA
MFIKLILEIVVYIHLGTLSNHHSNISSISGINASSNIPAATLISSSIKKTSTEAATTKPAAPQIPGKMELLSSNTGTTTTTTTATHHLHQATTTKQLLVQDYLSYASPPTYSRLPPDGHEFPPNFSEPLIMHSHPLKVTTELSYEIQKGGKDESSAPPLPKTGPPATVPRKVYRQDLVINVEPAPSLTRDYQRSLSGGTPRKPSDWRKDEKSEKSVRDKIAMFSSNNELDAIPPAPATAPISSSFTRKPLNRSSENLLDSCSSSSAPSLKTRAMSVENLNDVQRQYQLAKQLPQLHVADSMYSLNTATPTPSYASLPRRSHGGSYSSGVERRISFSGEGGDAANRKAAITNILEQRRRSLSKLRGLVIPERPQLLEPILDLPEIKSQVKAASGEDSTDSGLGESHRSTVNRNCQLGAGGAANNYRSILNTNQRRPLEQQLSQPPAKPPRTSLTPLQPRSMMIPPPPPPLDQESDTDSVFSHTARVATPPEKFALTRTLSSETNTSIASSNTSTLTSGSSAGSQASCSSLGSTPAVDLTRRVLKSQVINGEAVALSSRKSILASAKCRSAKSRGQEEDNDSTDGEACSLANRRMKPISSYKLQQQQIQLGKQLVVDKLINVAAYVELTSDTDDSSRRSDTPAKISAMFIDEERKASFKGDPNQQAKVKVEQVKPMVLPMLLPSAKREPLKQQTTAELREKFERSAAAQAQTQNHSPVIHKVTQKPHHERFSSLDSLASSSSGVSSTTQNVSTTQETATEFGSFSSLGSNQSLITAQDVQQIVEEADPPLKTPEAFIIVLQRENPESSIGITLAGGSDYEAKEITIHKILSNTPAAKDGRLKKGDRILAVNGMSMRGLTHRESISVLKTPRPEVVLVVTRSESLVVKALTKKRSSLGSLSSLNEKPTELDYERKRNYHKASRSLDLDLDLVSNEAGESPVATTPSTGSVSPPQPASLHDEDAEATIAGIRARRQLSRGDAAKLSTSELLERAAEARNAIAAEIRAQAEDAAASGGGARCVEIVKDSCGLGFSIEGGFDSPLGNRPLIVKKVFMGGAAQKTNQVRNGDEILSINGASTSRMTRVDAWNYMKQLPLGPVKICFA

SEQ ID NO: 42109 - DNA, 5247 bp, DROSOPHILA
tagccaagcattgccacactttctggttggattcgatttggtgggtcaggaggacaagggaaagccactctactccctgctgccagtcctcagagatcttccgccaacagctcggcttttcctacacggcggagagaccagtgagtggtagttcttttcgatctgatcatcgacttgatgatctattccttacagattggtttggtgcctcaacggacattaatctgctggacgcccttttgatgaacacaacacgcattggtcatggttatgctctggctaagcatccgattctcctgaatgcagtcaagtcacgccggattgccgtggagcttagtcccatttcgaatcaggtgctgcatctggtttgggacctgcgcaaccatccgggctcccagttttttgccctcgatgtgcccgtggtgatatgcaacgatgatcctggcttctggaatgccaagggtctgagctacgatttctattatgccatcatgagtctggcgccaaacaatgcgggactgaggctactgaagacactggtgtggaattcggtgcgatactccacgctgacggaggaggaacagacgagagctttcaaaatccttgaactcagctggtcgcgattcatagacgacgtattggagggcagtgtattttaaatgaacttataagtgaaaataaacagccaaagagtttataaatcattagtgaagtaatgcggcgaattgtgctaagtttcaatttgctctttttaataagaaatagtcagctggacatgaacttattcagcaacgaaataggaaataaccctataccaaacaatgaatgatgacacttctattaacttcctaatgataactccttgtcatccgatttataatgttgcagaaatcgttcgcagctttccagaatctgcagatatgcagcattaaagcctcccatgccttgaatctgtgaaagaaagcacaactttagatactctctacataactatgattatttaaattacaaagtatggatcctcgatgatctcatcctccttgcgtccaatatagctacccagcaattgaatcttgcatgtcggactgggagtaagagaagcagccatatgctcaagctccaataggttgctattgtccatggcgaatatgtaatcgaagtcatagaagtcttgagcgcttatctgtaagagtgaaaaaaggatcagaaggttactttatggttatatgattgatattaccatacgacccaagtggtttgttttcaaaccatgctgttttaacaattgttgtccacgtgcctggggctccaggccaacgttccaactcctgaggccagcactgtccacataccagtcctgcagattccgtttcactaccaaatgcttcagtatggcctcggccattggtgaccggcatgtgttgcctgtaagtatcggtttaaattagagtttttgtcttttatttattcactcttaccaatgcacacgaacagaaccttcattttcgcaatgggaactgcaagttccgatgagcaacgctgctgattcattgagtatatataatttataaaccggttcacgtttagtatcaacatttattagattatctaaatcacaacacttttacaaatcattcatttctggaggcgctctttcatgaaggcggcacaggcaaccacgcactgctgataggcggtctcaaagccctcggctccacgctcctgaaaaaacaaattgcgatctcaattagactaagcttttaagttaagttcttgatatcctattgatctatggaatagttctctactctctacttgatctctactgcaacttcgtattctagttaggagaaatcaggattctaaaagtatcttacatagtagggatcctcaatgatgcggttcttcttctcaagtccgaaatcgcccagcatgaggagctccgccttggagcccttgggcgccagacgccttagctcgctcatgttgtcctcgtccatgccgaagatgtagtcgaattccgagaagtcctgcttgcggatctgccgaacgatgtgggtgcacttgaggccgtgcttttgcagcgtgctgatggcccgcggatctgcgcggttgcccacgtgccagccaccaattgctgcactatcgacctccacgtccttgacattcgccttctccagggtgtccaccatcacgacctccgcaattggggacctgcagatgttgcctgaaagaacggaatatcacttctataatggtatacattgtaagatatttgtgtgctttattacccaaacaaatcattagcacttttcgaaccatctttgagtcaatttacacgggaattttacgaacaattttgtgtgttgttttttttccggctcgcaattgagcgttccgcaacctgcagccctggcctcaacagttagttggcaacgcgtgttatcagctgttcttgttggtcggatggcttaacccttaggcggtgtcggggacttatctacattatctgttttaagcgcgcttgtttcagaaaattcctacacgctatgctgcactgccggtaaatttcttcaaatgatgcttcaccaatgtcctggcatataaaaaaagttaattttattaaaaacaaaaatatttagaaagcaaaattatatccattattacagaaactataaataaatatgaagcataggtttgcttaataatatatcagaattaaaatttgtcttttttgaggtaaacgaattttttaaatccgaacatatagtacctatctctactcacataatagggatcctcaatgatgcgttcatctggtttcaggccaaaattcccgagaatcagcaacttggcagtggtgcctttgggagccatgcgcctcagggcggccaggttgctcagatccatggcgaagatgtagtcgaattcgaggaagtcctccggagctagaactctcgccttgccattgtattcgatgttgtgcctggccaggacattcagtgcacgctcatctggttggtggccggaatgccaatcctcgatcccggcgctctccacatgccactccccctgtagtcccgcccttgcgaccaagtcacgcatcacagcctcggcaattggggagcggcataggttgcctgcgtggacagtccatttgcatagtgattaacaaaagtgtccaggattagtttttgatacggaaatacgcacccacacacaccattagcacactgctcttctgcgatcttttgcccatttttagtattttgggattggtcttttgatttacgaacgcacttaaactctgcggtaaatttaataaaactttgttgttgcagtaaattaaatgggcgtggctgggtacaaaagtgttcaaaaaatgtgcgaagaagaattaatatctgaacaaaactgacatgtaaagcaataaataatacgttttgagttttatttatttatcctatcattttcgaatacccatttacttattttaaaggtagatttcgaaatctgtacattaattttgaaatgttcttttaaaactatacgctaataaaaagctagggaaatgcccagaaccattgactttaaaaaagttacacaataaatttgttataaaatgtcataaaagggattattcagtatcttaactttacagattgaaataaaattgcaaaatattattgacagactatacagtttgtcaagaaactgtttacacaccgtgaaataacttgaatttttgactttaaaggtcaaaattaagggttttttgcttaattaaacgcaatttttttatgaaatataattaaacaatatttattttacttataaattaaaaaacaaattcaaaatatcaaatatacaagaaaataaataaataaaataaatatcaagaaactcttttacacattttgttttcctactttgtcttgctctttttcttagaacgaactcgatttttccgttatttttgttttttgcattatatatatatgtatatatatagatagttatataatagatagttatttagtggcagcccaaaacagatccatgctcaaaattaagtaaacacctatgagatataaacaatctacggattagactgcacctctagctgaaattagagttccttctttgtcaagtggtttcctctgctggagatcgcacctctggcacttccacttccggctggctggtgcagactccacaaccacgtgcacatcctgtttatccagcatgcatatttagccgaaaaactcggacaaaaaactgcgccgaaagcaactttaactattagcatttaattaaagttcatttgccgggcgacagacgaggtcatttccacccacttcagttggctggggatgaggacctttgccccgaggaatagagaagtgatgagctctggccctagaatccaaccagaatccaggtagttgggtttaggtttgggtttgctttggccatgaatatgtaagctgcagctggtgctcaaaggacaggcaggtcctggtcgcaaaatgtgtaatgactgtcggggagatggaggtctcgggtgcgggtgtgaacttaaagcggatgaccagctcgccggcagagaaataaagttgcctttcaaaataaattcgttttgagttttatgcaaattgtatacaaccaacaacagcaacaacaacaacaaacaaaggccagacgaaatgcatggcataaactttgccaacttggctggctgcaattgtagtttgtgatgtggatgtggatctggatgttgctcttcctggtggttggggttgatgttggggcggctttgatggcatcaaagtgagcttgtcgttgtgcagacaaatgttacgtactctcgtcacactcttacgtatgcaaatgtcccttgccattgccggcgcaatgctgcagtgcgtcctccacaattgacaattgttgaaaatgcaaatggaaatggaaatgccaagacatgtgcccaacagccacaccagcaattcatacatatgccatggataatggatactgggcgcactggaggtgtgttgggggtggcatgcggcgcattgaggtaaagacaaatgcaaaggcgttgtctctactatcatcatccggcgacgacatctcctcagataagataaacgatggcaaagtcaacagcaacaactggttggctacgaaatgcactgcaagaaaatgcaatgaagtatgctaaatacacttggcatgaatttaatc

SEQ ID NO: 42110 - DNA, 1275 bp, DROSOPHILA
atgctggataaacaggatgtgcacgtggttgtggagtctgcaccagccagccggaagtggaagtgccagaggtgcgatctccagcagaggaaaccacttgacaaagaaggaactctaatttcagctagaggcaacctatgccgctccccaattgccgaggctgtgatgcgtgacttggtcgcaagggcgggactacagggggagtggcatgtggagagcgccgggatcgaggattggcattccggccaccaaccagatgagcgtgcactgaatgtcctggccaggcacaacatcgaatacaatggcaaggcgagagttctagctccggaggacttcctcgaattcgactacatcttcgccatggatctgagcaacctggccgccctgaggcgcatggctcccaaaggcaccactgccaagttgctgattctcgggaattttggcctgaaaccagatgaacgcatcattgaggatccctattatgtcgtgatggtggacaccctggagaaggcgaatgtcaaggacgtggaggtcgatagtgcagcaattggtggctggcacgtgggcaaccgcgcagatccgcgggccatcagcacgctgcaaaagcacggcctcaagtgcacccacatcgttcggcagatccgcaagcaggacttctcggaattcgactacatcttcggcatggacgaggacaacatgagcgagctaaggcgtctggcgcccaagggctccaaggcggagctcctcatgctgggcgatttcggacttgagaagaagaaccgcatcattgaggatccctactatgagcgtggagccgagggctttgagaccgcctatcagcagtgccgttgctcatcggaacttgcagttcccattgcgaaaatgaaggttctgttcgtgtgcattggcaacacatgccggtcaccaatggccgaggccatactgaagcatttggtagtgaaacggaatctgcaggactggtatgtggacagtgctggcctcaggagttggaacgttggcctggagccccaggcacgtggacaacaattgttaaaacagcatggtttgaaaacaaaccacttgggtcgtatgataagcgctcaagacttctatgacttcgattacatattcgccatggacaatagcaacctattggagcttgagcatatggctgcttctcttactcccagtccgacatgcaagattcaattgctgggtagctatattggacgcaaggaggatgagatcatcgaggatccatactttgtaatttaa

SEQ ID NO: 42111 - protein, 424 aa, DROSOPHILA
MLDKQDVHVVVESAPASRKWKCQRCDLQQRKPLDKEGTLISARGNLCRSPIAEAVMRDLVARAGLQGEWHVESAGIEDWHSGHQPDERALNVLARHNIEYNGKARVLAPEDFLEFDYIFAMDLSNLAALRRMAPKGTTAKLLILGNFGLKPDERIIEDPYYVVMVDTLEKANVKDVEVDSAAIGGWHVGNRADPRAISTLQKHGLKCTHIVRQIRKQDFSEFDYIFGMDEDNMSELRRLAPKGSKAELLMLGDFGLEKKNRIIEDPYYERGAEGFETAYQQCRCSSELAVPIAKMKVLFVCIGNTCRSPMAEAILKHLVVKRNLQDWYVDSAGLRSWNVGLEPQARGQQLLKQHGLKTNHLGRMISAQDFYDFDYIFAMDNSNLLELEHMAASLTPSPTCKIQLLGSYIGRKEDEIIEDPYFVI

SEQ ID NO: 42112 - DNA, 3092 bp, DROSOPHILA
cccctaataaaaaccttaaagcttcgataatggcactatcgatataaattcgcacttttacacttttcaacattgactttgaaaatccccaccactacaatttacagtttaacttttcccgctacgcggaattgtgaaatttttcattgtttatgtcggaaaatggatcaggaggttatggatttctttgacttctcgaaggagttgaagcgcgtggccgccgccccgcaaggctacatcagcagcgatccgaggctaatggccacgaagttcaaatcatccgaagtgcccaaccgcgagttgatcggcaccgactatgtcagcaaaatcgtcgccaaggaaaagtgtctcctgaacggggtgagaactggaagcttgcgtcagcacttctgtttgtttatgtgtaattcgatccagacgctgctcaacgaacagcctcaaggcaaacgcattcgaacgctggacgatttggacaccgacgatgagggggaagagaccgaaattcgccgggatgacgagtactacaagaagttcagattcaatctgaatcgcgacaagaacttgtccatctacgccaagcgcgaggaaatattggcggccatcaatgctcatccggtagtcattattaagggcgaaacaggatgtggcaagaccacgcaggtgagcaaaacttaaataaaatcctaacttttttattaagtctatattttaataaagccaacgcaagcgaattataattaaaccttttatcctcgacttttgaaattcaaatccaaactagtcgagagtatttaatattatataataaataataatcttcaatatacttttcaactctttatataagaatagcaaagcctaggaaacttatatcctatatagttatatatcctatcctacatacttaaatacaatgaatattttatgtgcaacagataaacaagatcacatcgcgcaaaaatgctagttatttaattatgtaaaagttttataaactaactcaagtatccaaaatagctttgagttcttcttccgtgacctcctcgctttcacccacttccatttcctcgtcgtcactaaactcaatcatctcatactcttgctgcacgtctgctggaagttccctctgaaaaacggtggccgaggacatgcggcgttgataagtctcgttgacctccagctgcacttctagttcatccgcctggttttgcggctcccgttcctcgacgccgtacatggccttgttccgcaccctctggcgcacttccaactggttgcctgtagatgttgtggtacaattctcatctggagtactctttctagctcctagaacactttggatatcggcaaagacttctcgcaaatggccgaatatttgagagggcggcaaagcgtgctcatgaccagccgccaattgcttcttttgggcattgtatgccgcttccagttcacacaatggctggcttgcctggtccagtgctcgcagaccctccagttcgtatgtgagactgacgccgttcgcacgctgttgcttctgcatcaaggcactctgcctctgttccttggcacccgctacggtctccacacggtcgtagtccaccagattgtccaacccctggcaatagtcgagcgcggtgaagcggaaggcctgctcctgggtcaggcgccacagcatgtaggcgatctgatgagtgtccttccgctccggactatccttgcgcagatctagagcgtagtctgttagttcttgccaagtgcgcggtgagacctcgatcttaataaagttgtgcgtgggctgcttgtagtagattacgtagagcagaaagaaacctccgatcctttgagcgcgagatgccgggaaaacgtccccggtggtgcgtcgggagcacgacagtcgcttggccacatgcagggccgccagtgtggtggctatcacctctgtgtggttcgtctgggcagtgaagaggtgctgcagctgcagttctcgccagcaccggcagaacacctcgaactcgcagttttcgccatcattaaccaatcgctgaaatcgttgcaccagctcccagcagtcgtcaaagatattcagctccattctgaatcttaattacgcgaaatatatgcgcatctctcattcaaaagagcctcaaaatataaacaataacattcgccgggaataagcttttacaacactagccggggagttcatcgataaatatgtagtgttcataactgcttagctattttcaaaaaaaaagcgcaaaactataaaaactgtttgaaaaatgtgtaaaaaatacaattacatttttgttctgctttgtaaatatttagatattttcttataattattattagtattcaatcaattattcttacaggtgccccaatacattttggatgaggcctataaaagcggtaaatactgcaacattgtggtgacacaaccccggcgcatagctgccatctccatagcgaatagagtttgccaggagcgcgagtggcagcagaacacggtgtgcagcttccaggtgggcctgcaccgcccgaactctttggaggacactcgtctgttgtactgcaccaccggggtgctgctgaacaatttgattaacaacaagacgttgacccactacacccacattgtgctggacgaggtgcatgaaagagaccagaacatggattttcttctgatcgtggtgcgtcgcttgctggccacgaactcgcggcatgtaaagattatcctgatgtcggccaccatcgatgccaaggaactgtccgactactttaccaccactaactcaattccgccagtgatcaccaccaatcatcgacgtaagcactcgatcgagaagttctaccgtgaccagctcggcagcattatttggaatgaggaagatgtgggacaccagcaggtgccagaaatcaacaaacacggttacagggcagcggtaaagatcatagtgattattgacaacatggaacggaaggctgcaatccagtcgcggcagagctatgacgaggccctgcgctatggagctgtgctcatctttctgccaggcatctacgaaatcgacacgatggcagaaaatctt

SEQ ID NO: 42113 - DNA, 1092 bp, DROSOPHILA
atggagctgaatatctttgacgactgctgggagctggtgcaacgatttcagcgattggttaatgatggcgaaaactgcgagttcgaggtgttctgccggtgctggcgagaactgcagctgcagcacctcttcactgcccagacgaaccacacagaggtgatagccaccacactggcggccctgcatgtggccaagcgactgtcgtgctcccgacgcaccaccggggacgttttcccggcatctcgcgctcaaaggatcggaggtttctttctgctctacgtaatctactacaagcagcccacgcacaactttattaagatcgaggtctcaccgcgcacttggcaagaactaacagactacgctctagatctgcgcaaggatagtccggagcggaaggacactcatcagatcgcctacatgctgtggcgcctgacccaggagcaggccttccgcttcaccgcgctcgactattgccaggggttggacaatctggtggactacgaccgtgtggagaccgtagcgggtgccaaggaacagaggcagagtgccttgatgcagaagcaacagcgtgcgaacggcgtcagtctcacatacgaactggagggtctgcgagcactggaccaggcaagccagccattgtgtgaactggaagcggcatacaatgcccaaaagaagcaattggcggctggtcatgagcacgctttgccgccctctcaaatattcggccatttgcgagaagtctttgccgatatccaaagtgttctaggagctagaaagagtactccagatgagaattgtaccacaacatctacaggcaaccagttggaagtgcgccagagggtgcggaacaaggccatgtacggcgtcgaggaacgggagccgcaaaaccaggcggatgaactagaagtgcagctggaggtcaacgagacttatcaacgccgcatgtcctcggccaccgtttttcagagggaacttccagcagacgtgcagcaagagtatgagatgattgagtttagtgacgacgaggaaatggaagtgggtgaaagcgaggaggtcacggaagaagaactcaaagctattttggatacttga

SEQ ID NO: 42114 - protein, 363 aa, DROSOPHILA
MELNIFDDCWELVQRFQRLVNDGENCEFEVFCRCWRELQLQHLFTAQTNHTEVIATTLAALHVAKRLSCSRRTTGDVFPASRAQRIGGFFLLYVIYYKQPTHNFIKIEVSPRTWQELTDYALDLRKDSPERKDTHQIAYMLWRLTQEQAFRFTALDYCQGLDNLVDYDRVETVAGAKEQRQSALMQKQQRANGVSLTYELEGLRALDQASQPLCELEAAYNAQKKQLAAGHEHALPPSQIFGHLREVFADIQSVLGARKSTPDENCTTTSTGNQLEVRQRVRNKAMYGVEEREPQNQADELEVQLEVNETYQRRMSSATVFQRELPADVQQEYEMIEFSDDEEMEVGESEEVTEEELKAILDT

SEQ ID NO: 42115 - DNA, 15964 bp, DROSOPHILA
ctcataacgcttcgctccccattttcccggtcctcttcttcttttgagtcggaccctcgtggctttctcctgtcaatatgcttcccgctcgacttgtgctataattgtgtcttccccctgcggaacgcctgccatctacacccatacccataagagtgtgtgtgggtgtgtgtgagtgtgtgtgcggtgttaaggggtggagataatgccaaccaggacactttcagttacttagccctagaaactggggagcgtccgttgctcggggaccgaaggactgaaggactgaaggtctgaatctgaggcaaacgtttttcgccctgctttgtcctgttgtttcaccaacttacaagtggccgagaaaggatatctcagctgaagccaaaataattagctgggggctaagcaggagttgcaaaaaatgagaaggccacgaggggcagctcgaagagataaaaggaggataaaacagagacaaaaatggtaaaacgaatacaggtgagggaatacctaaggtttccctctccaataggaaaggaaatgtatttatgtatataagtttgcaaactcaaaagcaagctactaattgaaagggttacaaacaaccggcaatatttttattggattaaaaccattgttattatatagatattttgaagggctttagaaagaaattgtgtcctttccaaatgattccgtatgatgctactgacgtttgtactccaacaattaaactttaagctttaagggtaaacactcgcaactgcatcgttatcgtttgtttgcttcctgatccgcgtggccaggtgacggggtgaacaaacccctgtctgttcaaattcgcaccactcatctgggtcagctggcggtcgtttcctccgacgcaccgccatctcattttccggttgacaggagccctttgattccagcacatcacctgacaatttgttgactcaactaatctccttctccgccgcccctccacccactcccgtttcagatgcccaggatggggagacgtcacaaacactgccatcatcggttgtgcgcttcatcttcatctccgctgcagcggctggtggagctgcagctccttctgccggcgctcttggtcgtcctgctggccaccactctgggacttgcctgccgtgtctccgagttctcctgcaagggcagcgggaacagcggcaccatctgcgtgcccctggacaaatactgcgacggacgcagcgattgcgccgatggcagcgatgaacccaaacattgctccggtgagtgaatgccgccagctgtcgtccgcttctccgacgagtcgagtggacaacagtacagtaaacaatcgaaagagtgaacttatgaaagaatgtttgcactagcattttttgcactagtagcttaacagggagtgcaacaccatgttatgagcacaaaaaataaactatttgaagagacaacactgcctatgagtactgagtaccatgccagttaactatcggttaacgtatatataaatattgctacacattcgattgtttactttgcttaacccactgtacccccaattcacattcttttttccgaccccccgcagtctgcaatcgtacatattatggggatatcggacgcacctatgccataaaagtgccaacgccacagtggaataaattgcccttcctctgtcacttgacattcacagcatccggtcatgatcaaggcgacattgtgcaggtgagtaggaggtggtggggagttcgggatgttggacagtgatggtcgatggttgcacttactatacttacaatcctatactcaaaacatttatatatattataaaagataatagaataatagaatatatatagaaaacaactttatttgcttgtttattttcctaaattaatgtcttaatattgtatttctatatttaagtttctggacaatatatacgcgcttaccgcggaaatctttttcataaccagaaatggtgaaaaaggtacaaaacgtgaatggaacaattttgtttcaatggcactattaatcatttttgtcatttaaagtaagctttaaaatagttttgattcgcagtaatggcttacggaggtagtcgaagttgggcacttaagttcagaaggaagaagtggtaccttcgcatcactggtgctgtgaaatcagagcggagtgtttgtccagctcgtgttgtagtccactgtccgttgtcctttgtccgtttgttggctttagtgcgccgtaggccaaagattagccgtgcgtcagcgaaataaaagtgcaatgcacacacacccacacacacatgctcttgagggcataaggaggagtgtcctgcgggaggagtgcactctaacgggaaccaacccacacacatgcacacacatacacgccgccagcagacagcgacacgcacaaatgcaccgccgtgaagtattccgagacacatcccccctcccaacaatggcaatccgattcgcacatatcacgcgaggggctttatgtgtccgccatccggacaaggtatatgggttctgtttggcgcggacactggccacagtcgggactgcagggataaagaaggtacattctcagtttggatggtatatagaaattacataagtcttagctatatacatatatttaccaaaatgtatgaacagattgggcaaaaaatacatttctaagttttgtgaaaatatttaaataccgtaacgaaatcgtagacgcaaaatttaaaaggacttagtctgttgtttaggtgggtatcgtgcatccagtgatatttgccaagctaccagggtattctgaaaacacgtacatatgcatatcccatggtcgcattcgccgcactctgttcgtgcttgttaggcagaatgtctccatttctcgccttggcggcatatctcctgacatttttggcggcgctggcattttggtgcgtgcttaattaggacttccagcgattgcagttgaatcccagccatgccgcctgctttttaaattaaccggaccggatctttaaaatgccttgggcacacccagaatgggagaccgaaaagcagtcgccgaaataagcaaacaaatggagcggctcgagtggctagggaggagtggaaacacccacgttgacaatgaaattagacacgcttcaaaacatttttggcgagctgtcagagaaacgtcaatttcaatttcgaaaataattgatttcccctgcaatttgcgtaaacatcgcaatgagcagttgagtcccaggaagtggtagtcagcaaatctgttccccagctcccacgacgccccatttgctccttaaatttccccaatccgcttgggagtctcgcacatccatgtatatgtatatactatataagtatataagtatatatgtatatatgagtaaatgtggaatgatgcatgcaaaatgttccttggtgggctttgcaccttgcacaaatctgtcatgcataagttataactttttatttcgcgttgccgaatttgtagaacacttttcgatagaacgtggatacacctaaaacagtttcctatctgactgcaagtaaattcaccttgattgtcattagatgagtttattgtttggtatttaccttaatattacccctttttattatgtaggttatttcttattttgtatctatactgcatatagcttataccctttttatagcagtgtagctcagtgtaaattttttcttcacctcttcatcgtggcatataaatcatgcggttggcttttcgaggcttcccgttttttccgctttcccttcgattttcatatatatttttttttttggatctcacccgtgtgcgtctgtgtgggaaattgcttgaaataataatgttagacatcggcggggcgaggattcgatggaaggatgcgatgttgtcggggctgtctgtttgtacatattgattgatgattgtcagccgaagtcccagaacttcgcggcagggagaagtttaaattgcctgggactcagccatgcacccatgggttaatttttaatggaaataccttaacccaaactctgaaatatgttagctgtaatcaaatagcatatagcgtcggatttttaataattaaagcttgttttaatcaccctctaatggacgggaaaatttatgcaacaacgcaaccaaagggaaactttccactggtaaaaggcagacaaaacatttcataaatcaagtagttttttatttacgaaatatatatttctgtcatttatttaattttgcattgtaaattgcttgtatgtgcaagaagttgttgcccattgttttcgaggaaattttaaaatgtgcgcttttcattttcccaataatttgttgcattttcatgcccaattagtgtgacaattagaataaaactttgctcagttaagcagagctgatggaatttcggaaaatattggtattttgtggtcgagctaataatggatttattttgtgataattttaaatgaagacctaatttactgctgcaaacaaatcgaaatcaacaccactgaccactctatttaaagtgtctgttaacggagtcagtaagttttccttaaagtccttaaagtttcccagtttgtcacgtcgaagaccaaaaaagtttgagaggaaaaaaaccataaaacatgagagaactccttaaaaagctacactacacataaattatgcttcctcatttgcccaggagaatttccgggatgagaagtctacgttgaagtccagagcaagcttgcagatgcaaaagtttttcacagaatttccctctgtcgttcagtttgccgcttctaatgaagccacaaatgccatgtgcgatgtggatttcccttcctcattttcatttttgctcgctgtcacttttgcctttgtttaatatttcaaattggaagtgaaaatctcttcgtgtgcgtaggtgttgggaaattcggccaaatgaaaagcaagtggcaggcaactgaaacccgaggccgaacccttttattggagttttctttccaattttcgacacactctctggcaggcatttatttgcatattttgttaggaaaactcatgtgccgcacgagtacataatgtacatattgcatacgggattagaacacttgactctctgactttttgactcacacaacttccttactttgaccttgacttgactccctctcgaggcagtgtgaatgtggtattatctttttttttatggccaatcaaatatgcaaacagtgggcgttgtgctgttccccacatttttcgcaagtggaatttcatttgcatagctttaagcaaatataaaatatagtgttagtaccctgaaatgccgagctaaactgtactctatagatttggaaaaggattttaattaatttaggattataaatagtaagtcgtataaaaacggaggttgtattgaaccttttaacaagattttaatattaattttcagctattcataaacaacttactctaaaatgactttcaataagttcagttttaatgttattcttataatctattatcttataatataaaagtatagctaactattattttacggaaattttttccaaatgattacaattttaaattcgactcctacagattatcttcgatggcttcacggtgggaaggttcgacgagggcatggtcgacacggatgtggatggttacgaaacgaacctcagtcccacgggcgaattgccaggatgtcccgagggcttcatgcaggtgagtgggctggaattccatttattaaaattcatgttacgtgataataaaaatagtttgcgggaaattgtgtccgggagtttgcactccatttgcttgcgttgcttgcttgcccataatttcatgcccaactgggtggtggtggttgtgggcggtgggtggtttggtggctggaaaatccgggcgaggactttggcttgtcatcattggtagctttcctcgatgtcgtcgtcgtcggcgctgtcgccgtcgttcgattcaatcaatgtccgagtaattctgtaattttctgtttggttctctgttgacaaataccacattagcccggcaaattgaattgaatgctgcgcctgtgtgagtctctggcccgatatccatgttgtctgtgtgtatcctgccgatcccaggattgggagcttgagtgctgtaagtgttgttgggtcacatccatttgcccttctctgggccgaaaaggaaaactatttaacatgtactcgggctacgcaagtggatctgtgtgcgtggtgtatatttttatcgcaaattttgcggacacgtttggaaactagctggtgactagtgctgtgctgtgctgatgtcctcgcccttgtaatgctaaaaccaaaatcctggctaaataaaatgtccgaaagagctcactaaatccctgtaattgacttgtgcaatatgtttgaatgcccctccgcttcgcaaatgtgtccgcttgtgtctcagtttttgtttcactttgcgtttctgcatcggtatctttatctgggtttcgggttgactggccctgcttaaatcgcttttgataaagcccagacggagtgctcgcttttcctcttattcctccccagaacccttgagctgttttaatttgaggattaaataaaatattcgcacagaagtgctgaaaggcgaatgccaaacggatgtgtaagttcacataatcctctgccttaagatgagtttgggatatgaagtggatggttggttgatctataataattaaaacacctagaatttctttgttgcataccattttaaatgtgagtgataaataacaaattttaaaatcgcatgtcagaaaatgctgatgcatgcaaagagtaaaaagagttgaaccagcgctaattataatacataaaataataagtactacggtactaaataaaattctggcaaaatacccatatataatggtcttactctctccttcataggaagagataactattgtagtataccttccattcctataaagattaccttacatatgtagtccattttcctactcccttctatagtacattcctatttactgggactataggttctcattggttgcatttcccattgctcggtataaagggccgttccgcccactgtccgactgttggaaaaccataaacctctattagtttagctacgtaggccctccgaaaccaggggcttttcccgccggccttctgtgtctgccggtcgctttgtgcaacaataaatttaaacaagcgtggggcgtgcgctgacattttgcggtgctcgtccccaaaaaactgaaaaacggaactggactaagggatatggaatagccatccagtgcagccatcgcagccactcctgggctgtcctgttgaggtttcatttggcgcttgacatgtgtacggagttgagggatttccgcaaggacgacggcaggcggaagggggatggctaacaggcatgcatctagtttttcctgccgctgcattttccggccgcagcggctttcatacgctcgcagagggtaagtgtaattgtatttaagctgtacaaaataaatagttggatctttttttgaaatgccaaaaaatgaaaaactgaatgtagttttcgaaaaaaaacgtaatttatagttaaataaaaccagttaattaactaattaaacgcagtgtcaaggcaaattaaaaaaaaaaaatgtaaggaaaatctgtatctatactgtgtatacttaggtaattctaacacaatagctataattagtgaaatttgttttcaccttataagggtattccaaaatccttgacacaagtgtggcatttatgtactcgatactttttttttttttttttttttaatttggccttgctctacggtttaaaaatgcagttaaatattttcagttttttgccgctgctcttgcattgttcattgttgtagttgcagttctatatagactcgtaactaaccgcaggtttgtgttgcgtttcccccttcaaaacctccatttccattggagctgcttgttttttttttttcatgtaaaggcaattttaactgctgacgcggttttgtaagcccctggccctccgatctatataaataatgcgtgtcatggcctggccacataaattcttgaccgaaacggaaaatttatatccgctgcctttcccacatatacggttatatatgatttacccaggttcaggcgcagcaccccgtgtcgagtctgaagtttcggtttaatcatttattcaatttagttggacattctgtctcatgcattttgtagcaggccaaaagcgtagcgaaactgggctgtccttttcttgaccttttcggaataatttttaataattcagcaaacaatctttcgcagttcttaagtagcggcaaagtttaaactcctttaagtcaatttgcataggtccacattcatggaaggaactatgtttttagacacacatgaatctatattttcattattctgtctgctttaaccaaaaaccaaattcacattaattgtgaggccagttttacgcggtatcttgttggttgagtccaagtcttcaattccgctcgcctgaaactcccgcttgaccttttgtataatattgctaatcataaataataaagtttatgcataaacgtattaacctaaatcaacagcgacaacaatgtcaggcggtctgcggaggaggaagctgttatccttgggtgtccttgcgagagcagcttggccaaatgactcaatatttgacaatcataacatcctgaccctctgttttccccatcccagccaaggacaacaactggaggagtgaaggcagcttggtcctgtctcatcttgttcatagtttttattggttagtccagtgtatacgtatgtatgtatataccaactctgccatggctgagagctaagaacataactcaaggttttgctgagcgtagaatatataatttttgtaatttattggactatcttccagcatttgtgttgcaaatgaaatgccttcacggttaagttacttacatattacaatgccaaacgctttaaattactataaatcaaacagaacgcggcgacagtcggccagcgctggcattatgcgcttaaattgtttcacaattaagtgaaaaaacagtgtgcaataaaaggcgtggcatctgggggaggaaagggatgcggagcgaaactgacaagcggcagcttttgtttattgttggcagattatgaagcgagaaggattctgcggatgccagtacatcaacaatgctgataaaacttttatcgcactcactgtattgcatgtgtgtgcgtatgggcgcaaacccagagtacggaacaatatattacggatatctgcgggggttacagaatgcaacccaaaattcccattaatagctagaaagttcttaatggatgagtatctatctagtgatgctaaatttaacaagctccttcaactgaattaaagcaaatttttttaaactagaaatgcctatttataacatcataatagtcatcttttgtttcggaccagatttttgaatgtactaatatacttcgggcttcaattaaaatttgtgtatcaacttgtatggccattgaacgctaaccagtttagtaggccaacatttcgactggcatatgagcaaatgtttggccaaaatgtcaggcaattattagcactgacccaataaaaaaagcctctaaaattaaacccatgggccatagcccaaaaatgttgcctgctacaatactaattcaatcaatttaaaaccaacagaaaatgtggcagaaatagcaagagcagataggccagctatgcaaaggagggcaaaaaaaagagaatcgggcttaaaagaacacacacacacacacacacacaaggagcaaggtccaataattcgttatgaagtcgatgctaataacgctccaatgcacacaatggacatgatgacgatgatgaagaggaacgaccagtgggttaagatagaggaaaagctaaagaggggaaaaagacagaacactcaaagaaatcagagttgaggtgaatgaaaaatatttatatttttgaaaaaaccttgtaaaacttcagtgtttaattcacccaaaagtatatgaaacaagaatggaaattaaccactagatattaatgtttttatacccttgcagtaagtaggtcttaaaaatatagtttgtccacagaagaagaatatttaatgtcaaaaaacaacggaactatgattttgtatattgtcaaaaaactgatgtgttccgaatatttattattatgaagagatttatttagagatttatattaaaaaaaaaatatatatatatatatgttttgattaaattatctttgtggtaatttatcatagctatctctctagctctattccttaaatactcttatcccaatcaggacattttttatgagtgtggaaattagagtcctgtgagcaggactcgtccagagtttgcaatgaatttacacaaaatcgaaatcagaaaattaccattatgccgggcagtcaagcctgcctgtgccccgtcctgccaggaccatttgccccattccaatcccactccaaccagaatccagccaaaccaaatccactattcatcctggcgatgagatagagtaggatggccgacggactggccattgccattcaatatgacagcagcaatgggccgacacaagactccagtgcaactgcaactctaaccagttacaaatattggccagacctcgattggcgactttgcaattacagcaaaaattgttgtttgagtttgaggcagccgcaggacatggcaggggcagaaaggacatgggggctgccaggggccggtctcgttggccgtcggttcagttcaaataacccattaactaaaaacttaatcaattggaacctcagtgtaaatgagctgccgttgccattgccgtcgccatttcccgatccccacatttatcgactggtggccactgacccaggccgcaggcagcagaaaagaattgagaaccggaaccggcagtgtcctcatcgtcctggtattagcaatattaatgctgcctatgcgagcaggctcaatagatgtcagttgtcctggggcgaaaagcttttcgtgattgtgcgcatataccgggtattcagagctcaggaattttgcatgagttccgaggtatttaacttaaaaagggttcacagtcatgtaacgtaaattatattaaaatattaaaatataaaattttaaaatgtgtgttattaaatattcagaaaaagaaattataacttgtgtatttaattttcatcgtactagcaaatggagttaaaatgtaattagatacccaaaaaaaactattcaaaactattgtggttgtcttgcattggaagcagtgttattattttttccaagcatatatacgcatgtatacgtttttaaatataaatattttaaacatttgcttaaattgtgatacaatattgaggaaatgtcagtattaagggcagagtacttcatcgcccattattctttcccccatttaaggttcgcactcttttttcggctccgttaatattttagccaccattcgtttggcaggctttaggggtcccctttttggtcgccaagtaaatacatttatggggcagcatttgcagttgtcgctttcacggatgcagtgttggttcagctggttggtcgcacaccttcgccggttgccaacggttttgcgcatgcataaaatacctgctcgaaagtggggtacactgcgctttggtaccgctgccaagtggcatgttgtgctggaaagcgggaaaggcgggaggatcgggagagagcaggggaaacaatcgaatattaagcggagaggtggcagggaaaacaaaaaattacactgcccaacacaacacgcactcataatccattagcccacgccagctggccccctgcaacgtgcgtatattaattttccatgcgtttttcgccaacccagtgccaataaaatcaatatgggcgctcgaactctataacttaacccaattttttaatgcgacggtgtgtgtgtgtgtgtatgtgtgtgtgcgacatacatacgtatgtgctttatgggctttaaatgttgcatcatggcattttgccgagctgggcgaaattgcttttagcctctctgtttggctgtctgtgggcgtgtcaccagcgaaacaaacttgatttttaattaattaaatttttatttatttacttggcagctcagcgaattgggacgcccattcaccggcggctcctggtgcggcaaggccaccggaccgcaattgtactttagcgaaacatccacggtgacagcttcggtgaaggtgagtgcaagtgcaagtgcaagtgagagggggaacatgggggaaagagacggggcgcctggaactggagctctgggagcctcggctcacctgtgtgtgctcaaattacataccctgccaggacttaaggccattaagtttggagcatctgtttagatttgatttaaataaaaaacaaaaaaaaatatataaaatatatataaatttatattttactcttaataagtttggttaattgtatttcattttacattcaatgttagcgagttgagcgagtttcaccattgtccacgatgcattgtaggctttatatgtccataatgggcggatctgcatcctctttaattaccatgcagagaatgaaatcttcagcttatcccgaagcttacgtgtccagcctttcattttaaattgaacaactttcccgcgtacaccacacggcgtatgcgtaatattttcttaaggctgtcaggcgacgaagcagttccactgccactttttgattaatttttaaataaacgcgccgccataaaaacgggcaaatggacaaggcatcgaagaggacacgtccatgggaggatcttggccggaaatatggtttcagttactcccatcgagttgccgcgcataaattatgaaaattaataaaagttcactcgccatgtgagaggaaactccttcggacacttcttgtctgcaaaagtgttgacgagcagttgacatggcaatgggggaaaatcaaaggagaaatcgcagatggcataattgaagagaaattgcgtgtcgagatggaaatttgcactcgttaagcatccaattgtattgttttctatcgagaggcaggtcttcttttcagcaacttaagtagtaatgggagagtcatgtaaatgtcaatcgaactccgttttaaaaagacctacctcagtttacatatatttcgttcctttcattaacttgtattttaatcagttttatgtaaagggaattgcttatgtgtacgttaaagtttggttagatgtcgttcctgttgtttcacatcacaggaaactagcttgagtcacgtttcccgagaaacattttcacattgattgctctttttggcgttgtaacatttcaaattgcattctacgaccgctttccattttcttgcaggtatttcatccgccacgcaatatccgagacgagaagccctttgagttcagcataagatataaatttataagccagtcggatgcagttgtgaggtaagttgcagcaccgaattgcactggcaaactgacaaatatctgtgcagctcgaaaagtattcaattgatattggttcggtgcatttccctcttacgacttcacccctcttctcgaccaaacaagggtaatgtcatcagttgcctcagcttttcccgctcgagttttcatctttccatagatgtttctattcctggcactggctctggatttggctcgattcaaaggctcttgcttagaacttaaatctttctgcccgaaagaacaatgccacttggttgccctggggatggcttttcgggaaattccgaaccgaagaaggttgcctgcataaaacatgagccgtgttctgtctagtttctcaatacaggtttatcctcacctcatgtatttgcactgcaatccatttgtgcctgttgcctaggcatgtgtcaaatttgtctccgtatcgcttttgctcccacttccacccacttcctcttccgagtgccgcgctttttgtttgcaggtggaaaattagagcgagaggaaaatagaaattgaaatgtatttttacacctgaataagttgcacagaatttacaagtcattgctacactgcgaaaacaacgttgttaggggtttgaagacatcaaaaaacgtgttaagtagagcttaagaatctgcaataatgtatcttgactgtcttgcatccatttaaagtgactatttctaagttactgttactgtaatcaatgttacgaaacatatttcccttgtttttcaagaggtaaattggaatatttttcaagtgcaaagtccgttcgttgtccgtgaatcgtgtgcacaccattagcaaactaaacaatgatcagagcccaggaatgagcccgtctgtacatgcatatgtagaatggtaggcgtgtgtgcgtttgcgtcccgtagcacattttatgcaaattgcaggtctttgtgttgttggtggtgctggccctgccttaaataccattcaaaatgtagtcgcacggaccaaaaacgaaaaggacgcagaacctaaaactcgcacaacacttagtgaactgagaactgaaccttttggcctctattccagatacggcctgcccgataagccgctcgaactgggccgtgtgacacccggcacctattgtaccaggcaattcgacgagtgctatcggaacaagtgtcgcctgcaaagtccaaattatcctggcatgtatccgaggaacgttacctgctactggacgatccggcagaaggaagtcccgaccagcaagcacgccatgattgccgttagccaggaaaatcagcacaaggccttggtaaaacggtaagttggagctgggaattgtgggagggggggattggcccgaagaatctcgaatgaatacctgcattggagagcattaaataagcattaccattctgtccgacgaattcgagtcccgtcccgaattgaatgggatatgggcatatacatacatatcccggccagacagagtgcatctgcatctgcactgcatttgtatgacaaatttcaatttggcaaattgctaggcgaagtaccagtttgcagtttgttaactgacggcacaaatgaaactgtttcgtgtccgagaatgttaagcattcgtcgcccaaaaagttttgtatattccaattaaatgctgcaaactggcagccgatgcaatttgtatgcaaaaccgtattagaggacagtatgtgaagtttgtaattggattgatgggattaggtaaatgtatttttgatattagcttacatttattttcaactttcgaagagaacatctggggtttctgctcaggtggaaaatcagctcttatatatgcaccaacgaaaatagtcattgcagtactccaaacttttttaaaaatttacaaagtttgattctaaaaagtttgtcgttgaaataataaggaatagaaaaacaacacagttattggaaacaaacgtatatactataaaattgattgaaaaacatttgttaccatgtaaccattgtttgtctacaatttttcgcatacttgtaaatattatttgtattactttagcttttactattattttgaccccagctgtaacaatttcctagcctggctttggcaaatgaaaatgttttcattgcatttcgatttgattgcttttctccgtttttcaattgtacatattgttcgtgctctttggctaacctctccaatatgatttctattttttccgcccacactcacagctcaatagccagctttaataaaacatcccggtccattcgagcctggtcggactgtacaggtgaacgggaccatttgattttct

SEQ ID NO: 42116 - DNA, 972 bp, DROSOPHILA
atgcccaggatggggagacgtcacaaacactgccatcatcggttgtgcgcttcatcttcatctccgctgcagcggctggtggagctgcagctccttctgccggcgctcttggtcgtcctgctggccaccactctgggacttgcctgccgtgtctccgagttctcctgcaagggcagcgggaacagcggcaccatctgcgtgcccctggacaaatactgcgacggacgcagcgattgcgccgatggcagcgatgaacccaaacattgctccgtctgcaatcgtacatattatggggatatcggacgcacctatgccataaaagtgccaacgccacagtggaataaattgcccttcctctgtcacttgacattcacagcatccggtcatgatcaaggcgacattgtgcagattatcttcgatggcttcacggtgggaaggttcgacgagggcatggtcgacacggatgtggatggttacgaaacgaacctcagtcccacgggcgaattgccaggatgtcccgagggcttcatgcagctcagcgaattgggacgcccattcaccggcggctcctggtgcggcaaggccaccggaccgcaattgtactttagcgaaacatccacggtgacagcttcggtgaaggtatttcatccgccacgcaatatccgagacgagaagccctttgagttcagcataagatataaatttataagccagtcggatgcagttgtgagatacggcctgcccgataagccgctcgaactgggccgtgtgacacccggcacctattgtaccaggcaattcgacgagtgctatcggaacaagtgtcgcctgcaaagtccaaattatcctggcatgtatccgaggaacgttacctgctactggacgatccggcagaaggaagtcccgaccagcaagcacgccatgattgccgttagccaggaaaatcagcacaaggccttggtaaaacggtaa

SEQ ID NO: 42117 - protein, 323 aa, DROSOPHILA
MPRMGRRHKHCHHRLCASSSSPLQRLVELQLLLPALLVVLLATTLGLACRVSEFSCKGSGNSGTICVPLDKYCDGRSDCADGSDEPKHCSVCNRTYYGDIGRTYAIKVPTPQWNKLPFLCHLTFTASGHDQGDIVQIIFDGFTVGRFDEGMVDTDVDGYETNLSPTGELPGCPEGFMQLSELGRPFTGGSWCGKATGPQLYFSETSTVTASVKVFHPPRNIRDEKPFEFSIRYKFISQSDAVVRYGLPDKPLELGRVTPGTYCTRQFDECYRNKCRLQSPNYPGMYPRNVTCYWTIRQKEVPTSKHAMIAVSQENQHKALVKR

SEQ ID NO: 42118 - DNA, 2701 bp, DROSOPHILA
gctttgttttgaggtatttgctgaatcacacggggatcatttgaatcttttagccagacagtcactgtgtggaattgcgattgggattttatttgagagtcacacccagtccgtggcgaatgagctagtatcccgctccggaattgactcacggccaaacaatgcgacatgcggcgaagtgctgtggggccacgctggcttgggcaaaagagaaaaaatcaaaaatgcaaaacttgttgctaataaacaacaattacagcaaaagcaaaaacaagttcagctaaccacaaaaatgctggcagctaaactctagactcgttgcccaggagctccgccgcactccactacactccactcaccaaaacaagtcggtgtatggagccattttctgatgttgctggctcacactactggccattcgccaccagcaacaaccaacagcaacaccaacaaccaacagcagcaacaccaagagcaacagcaacatcggcaatttgttgttgctgcactggaaaaaaggtgctcaaggaacggacataatgttaacattttaaaagccaattcacttctaaatcagaccacattatggtccttttattgaccataaagtgtagccaaatgaagagaaatgctgagccccttctctggaatttggctcagtgcatgtgtaaatttttgtcgccatgtgaagaccataaaaagcggccaagtggccagctgcctcagctttcctctggaagccacagagcaaccacagagaacgtccataactgtgtcagtgtgcaactagaagaggtctaagcctattaagcacactggcttaagatcggcctatgccaggaggtaatacccgtagctccaaagcgattaagtgtaattaatgccgacaggtgtcactgaattggcgcaagctcaaagagattgaaatgccctaattggaggctccaattaggagatattctccccactttcgacacttcaaagtgcgagatttccactagttgctctctttattcacgtgattagcatgtgtgccgttcctgatcatcatgtcactgcccagtctatccggtctattccacctcctcctgactacggcggacgcacctggtgaccttgcgcttgaattccgcataattctcccggtactccttggccgcatccacattggcggccgactcgtcattgggatcggtgagcatggagataacggaaagaaggatcgtctccacggtgtggaccggtagccagcgctcctcggccttctcgtagccccacttatcgtcaccaggttcgtggaggatcgagatgcaaacgtcgccggccttgtcaatattgggatgccagatttcggtgatgaacttcatcttgggcgggcgcagtgggtactctttggggaagatcaggtgagccttgaagaagccgccctcgtatagcgtatctgggggaccgatgatcaccacctcccatttgaagatgtcggagtcgctgaccagaccggcggagaagccctcgacgggatggcgttgtaattcggagagctggcgattgagcagtagcgatgcttgcagttcggacatgtcactggacttgggggggataagcaccatcagtgggataagccatttaagtacaatcacatttgtacttactggaattttgttcaattgtttcgagtcactttctggtttacttctacggaggctgaactacgctcaatgcgacctgtcagcttgccgagagaaaactcatgctgcgactacttcgatctataatcacgatcatggtttatcatggtataaaaatgtaagttcttaactatacattaacgggattccatcgacatttctaagataaaaagcctaagagccacaaaagatcaattccttttggaatgtctggctgcaatctcattgcaattgtagccctttgaatggagatggagtatagaaactatctccatagaaatcatcttgaaagcgacttgaaagtttccattataagctcttttggctgtcggtctggaatgggtccaaggaaagtccgagtccctcctttcctttcatttcccagcactttcctgcaattacttggccgttgctaatgctactggtgccactcatttttcctttaatgttttctttgcccgtgctggctgaatggaaattatgatggccgccacattgtagccgcttggttttggcctttcgtaattgcgcacaaatgttggcccagagctttttttttcatttttgctggcctgcaacttcgaccacgacatgtggctgccccatcgactgttttttttttgtttcgcctttttgccaattgcatacgactccggcatttggaaatccgcaactttagctgactatctgactaactgggcaactgaaattatgttgccgcaaatgtgtgaatcgttaatgtctcgatgctgccagcaggggcattttgtgcttggtctcttgccactgccggtttttcaagttttccatgcagcgcgagttttcgcacaaaaattcctttcccattttttcgaagcattattattattgttgtaataacatttacttagcatcggtgcaaaacgcaacaataaaatcatgtgcagttcctctaggaaaacgcagtcggactcgaaatttgctaaattatccagcacatgccaaacgtaaaggggaggggcgggggcggaggt

SEQ ID NO: 42119 - DNA, 638 bp, DROSOPHILA
ccgtagaagtaaaccagaaagtgactcgaaacaattgaacaaaattccatccagtgacatgtccgaactgcaagcatcgctactgctcaatcgccagctctccgaattacaacgccatcccgtcgagggcttctccgccggtctggtcagcgactccgacatcttcaaatgggaggtggtgatcatcggtcccccagatacgctatacgagggcggcttcttcaaggctcacctgatcttccccaaagagtacccactgcgcccgcccaagatgaagttcatcaccgaaatctggcatcccaatattgacaaggccggcgacgtttgcatctcgatcctccacgaacctggtgacgataagtggggctacgagaaggccgaggagcgctggctaccggtccacaccgtggagacgatccttctttccgttatctccatgctcaccgatcccaatgacgagtcggccgccaatgtggatgcggccaaggagtaccgggagaattatgcggaattcaagcgcaaggtcaccaggtgcgtccgccgtagtcaggaggaggtggaatagaccggatagactgggcagtgacatgatgatcaggaacggcacacatgctaatcacgtgaataaagagagcaac

SEQ ID NO: 42120 - protein, 168 aa, DROSOPHILA
MSELQASLLLNRQLSELQRHPVEGFSAGLVSDSDIFKWEVVIIGPPDTLYEGGFFKAHLIFPKEYPLRPPKMKFITEIWHPNIDKAGDVCISILHEPGDDKWGYEKAEERWLPVHTVETILLSVISMLTDPNDESAANVDAAKEYRENYAEFKRKVTRCVRRSQEEVE

SEQ ID NO: 42121 - DNA, 3997 bp, DROSOPHILA
ggattcgagcaccacgacgcgcccgtgggcattttcgcggcagatgctgacagctatgacgtgttcaacaaactctttgatccgatcataaaggactatcatggccagatggacaacgagaacgatgtgctgcagaaagacccagactttggcaacgtggacgagatcgagaacttggatccggagcgcaagtacattctgtccgcacgaatcagattggctcgcaatatcgaaggtctgcccttcttccccaaactgaccgagaagcaattcatagaggtggaggagaaggtgcgttcggccacggagacaatggatggcgagctgattggctcctatctgacaatggcggacatcgatgctgagacccaggcggagatggtcaagagacatatattattccagcgcggcgatgagaagctgaccacagccggctgctatcgtttctggccaactggtcgtggtgtctaccacaatcccgccgagaccttcttgatctgggtgaatcgccaggaccatgtgcacattatgtccatggcacagtgcggcgacttgggcgatgtttacaatcgccttgtcaacggtctaaccgaactggagaagacgttggcctttgcccggcatccgcgttatggaaaccttacggcttgccccaccaatttgggcaccaccctgcgggcttcggtgcacatccgtctgccgctactcagcaaggaccccgatcgtctactcgccctcgccgaggaacagcagctgcaggtacgcggcaccgatggcggcgagctgtccaccgtggaagatggtgtcatggacatatcaaataagaggaagcttggtttcaccgagttcgaactggtcaaaactctgcaggatggcgttgtgaccctgattaacgcagaggaagagctcgaaatatccggacaggagggttagaaacaaatagccaatacttaaaaaccttgtaaagcaattaatatcactataaagtactcacgaacactcacagacgaacacttagagaaacaggagaaacgtatctttggttaaataaatttgtccctagccacagacaatcactcaccttccagtcgtcctcgtcatcctttgaatttcgctgaacctggccggtcagcttgaaccaattggacttggtcgatgccagcacgtccagggtaatgttccatctatgaagtgcatccgcagcatgattttcgttcatgtggtccgtgtgctccaatgtaaggccgatctgcttgcctttcatgtccgacgttttcaaaacgtcttcggcacaaaagttaccttcgatctgaacgaaaattggttttagctttaaatattgttaaatatttaattttatttctcaccctggtgttcttctcgttgtacataagcatggtaaagttgcgatcgtggcccaggtgtatggaacttagctgggtgaagccaaatatgtacatcaaagcattgaccaccatattgccggagaacccactggaagtgaagtgattagctgagtagcaaatcggtttcgaaattcaaaaattacttctccgtgaactcggactttagcagcatccccctgtacttgatgagctcgttgagattggtggtcatgctcagtcggacgcccaaatccgtcattgggtagctaaatagttgaacctgcgagcttgactttattattattcttaattttacccattttcagatgcttaaagtagttaattaaatttagttaatttatttcatatattttggtattatttttctcaacaaaacacttaccacatcgttccgaccctcgggcaccatgatctcttcgaagggcgccgccgctgtcttcgtgatcaaacccctggtcttggtcaccgcccgcgacttgaaggacaggccactggtcaggttttggggtcgggagaaggagtagcgcctgcacttactgccactctcgttcagatgcagttcgctgctaaaggggatgtagatgaggaagccctgctcccggttgatctcgtgatcgaggttgaggaacggattgtagctacgactccgcaccgaggcgtatgaagagtatcgggcatcgatttccagcgtgtgcttggttatgggcgagttccgctgctctgttatattaccacgcaacgaggttagtacggtggtctgcagcaggacgtcggaggaggttcccagcaccgtgggcaccgtgtagcgattcatgaaaggccaacgaacagtctgcatgtttatgtgactgtctgtccgaatgatttgctgcattctttccagaactgtggaaaacgggcatgaaccgcacatggctgatggtcaagaggtcaatgtactcactgttgtcgtaggtcagctgccggaacatccgctggttgaggtagtacgacagcaccgtcttgccctccatttgcaggatgaactccagatgcaggtccttcgagttgatgatcggagcctgcagcatggccaatagagccttgatgctcttaaaggtaaaaggatcgctgccatttcgcgattgcatcttgttcaggatggtatctggcagcccacgtgccttgatgtatagctggaagaagtagagatggcttatttgattcttgaaacaccgagaggttgtacttaccgccagttgtcctgtgaatttgcctagagcttcggtgtcgaatttgaagaaggccaccactggcatgtccgactttggatcgcccacgaggaatacctgaagcattgcaccgatgccgaacttggagtcgcgatagtcaaagatgtagttaccggtgacccagtagcgtgactcgggcttctggggcagatgacgatgcatgtaggacaacagacggcgtctaaatgaaggatatacgacatctgtggatggctgtgaattaggctgagttagatgacttacaggtgctgatagcagggatatgttgtctccgagatgctcgtcaccgtcgtccggtagtagttaatcatgtgagggtccgtctcgctctgaatgatgcgatggatgctgatgagacgggcggccgtggggttggaaatcaatagcagcgtaaccgctgccacacgaagttctaggctggcatttcgggactcaaagattggccagtagacctcgtatatgcgctccgctcgacgatcggccagtgccagggtcgtccaggcggcctggaacttcagatcctcgtgctcgttggggtcctgaacaatgggctccagatagttggccacgttccccaattgcaagttgtttagaccctgcagatacaacatcttctggtcgaagtcgcgatcgcctgcgatgaatgatattagtttatatggaactcatggttatttggaacacttacttagataggcattaaagtacttctggacatactcctcaaacttttccttatcgatgcccttggccacatagacattatggatgagcgtggcaaagctaaggatagcggcctgccgcacatccgggcgatcgggtccgatattgaggaagtcctcgcacttttgcaccaactccgccgagagctcgaagatgtggaatggcatgggtatgagcagttgcacagcgatttgcggcttagtcaatttgttgagcaccaggtggtgggtcagaaaaacggatgctttagttccaatgcggggaatgatttcatgaaagatgttgcgaatggtctcctggcgataggaggtgccaatgtccacctcccgatagagtttagtgagcgaatcaaagtccatctcgctgagaagcttgatcacgtcggagagagtggagtcgtagggctccgagaacttgaattccgttgtctctagtgcttcggccagactgtctaagagcgtccccgcctgggcaatcagcgtctcctgctgctgagggctacgacctccagtgggatcgttgggatccagccgctgcagctccaggttggatggctctgctgccattgaggtttcaatatcgatgggattgtcgatg

SEQ ID NO: 42122 - DNA, 1585 bp, DROSOPHILA
gaccctcacatgattaactactaccggacgacggtgacgagcatctcggagacaacatatccctgctatcagcacctacgccgtctgttgtcctacatgcatcgtcatctgccccagaagcccgagtcacgctactgggtcaccggtaactacatctttgactatcgcgactccaagttcggcatcggtgcaatgcttcaggtattcctcgtgggcgatccaaagtcggacatgccagtggtggccttcttcaaattcgacaccgaagctctaggcaaattcacaggacaactggcggctatacatcaaggcacgtgggctgccagataccatcctgaacaagatgcaatcgcgaaatggcagcgatccttttacctttaagagcatcaaggctctattggccatgctgcaggctccgatcatcaactcgaaggacctgcatctggagttcatcctgcaaatggagggcaagacggtgctgtcgtactacctcaaccagcggatgttccggcagctgacctacgacaacattctggaaagaatgcagcaaatcattcggacagacagtcacataaacatgcagactgttcgttggcctttcatgaatcgctacacggtgcccacggtgctgggaacctcctccgacgtcctgctgcagaccaccgtactaacctcgttgcgtggtaatataacagagcagcggaactcgcccataaccaagcacacgctggaaatcgatgcccgatactcttcatacgcctcggtgcggagtcgtagctacaatccgttcctcaacctcgatcacgagatcaaccgggagcagggcttcctcatctacatcccctttagcagcgaactgcatctgaacgagagtggcagtaagtgcaggcgctactccttctcccgaccccaaaacctgaccagtggcctgtccttcaagtcgcgggcggtgaccaagaccaggggtttgatcacgaagacagcggcggcgcccttcgaagagatcatggtgcccgagggtcggaacgatgtggttcaactatttagctacccaatgacggatttgggcgtccgactgagcatgaccaccaatctcaacgagctcatcaagtacagggggatgctgctaaagtccgagttcacggagaatgggttctccggcaatatggtggtcaatgctttgatgtacatatttggcttcacccagctaagttccatacacctgggccacgatcgcaactttaccatgcttatgtacaacgagaagaacaccaggatcgaaggtaacttttgtgccgaagacgttttgaaaacgtcggacatgaaaggcaagcagatcggccttacattggagcacacggaccacatgaacgaaaatcatgctgcggatgcacttcatagatggaacattaccctggacgtgctggcatcgaccaagtccaattggttcaagctgaccggccaggttcagcgaaattcaaaggatgacgaggacgactggaaggtgagtgattgtctgtggctagggacaaatttatttaaccaaagatacgtttctcctgtttctctaagtgttcgtctgtga

SEQ ID NO: 42123 - protein, 413 aa, DROSOPHILA
MQSRNGSDPFTFKSIKALLAMLQAPIINSKDLHLEFILQMEGKTVLSYYLNQRMFRQLTYDNILERMQQIIRTDSHINMQTVRWPFMNRYTVPTVLGTSSDVLLQTTVLTSLRGNITEQRNSPITKHTLEIDARYSSYASVRSRSYNPFLNLDHEINREQGFLIYIPFSSELHLNESGSKCRRYSFSRPQNLTSGLSFKSRAVTKTRGLITKTAAAPFEEIMVPEGRNDVVQLFSYPMTDLGVRLSMTTNLNELIKYRGMLLKSEFTENGFSGNMVVNALMYIFGFTQLSSIHLGHDRNFTMLMYNEKNTRIEGNFCAEDVLKTSDMKGKQIGLTLEHTDHMNENHAADALHRWNITLDVLASTKSNWFKLTGQVQRNSKDDEDDWKVSDCLWLGTNLFNQRYVSPVSLSVRL

SEQ ID NO: 42124 - DNA, 4845 bp, DROSOPHILA
ctgccggaacatccgctggttgaggtagtacgacagcaccgtcttgccctccatttgcaggatgaactccagatgcaggtccttcgagttgatgatcggagcctgcagcatggccaatagagccttgatgctcttaaaggtaaaaggatcgctgccatttcgcgattgcatcttgttcaggatggtatctggcagcccacgtgccttgatgtatagctggaagaagtagagatggcttatttgattcttgaaacaccgagaggttgtacttaccgccagttgtcctgtgaatttgcctagagcttcggtgtcgaatttgaagaaggccaccactggcatgtccgactttggatcgcccacgaggaatacctgaagcattgcaccgatgccgaacttggagtcgcgatagtcaaagatgtagttaccggtgacccagtagcgtgactcgggcttctggggcagatgacgatgcatgtaggacaacagacggcgtctaaatgaaggatatacgacatctgtggatggctgtgaattaggctgagttagatgacttacaggtgctgatagcagggatatgttgtctccgagatgctcgtcaccgtcgtccggtagtagttaatcatgtgagggtccgtctcgctctgaatgatgcgatggatgctgatgagacgggcggccgtggggttggaaatcaatagcagcgtaaccgctgccacacgaagttctaggctggcatttcgggactcaaagattggccagtagacctcgtatatgcgctccgctcgacgatcggccagtgccagggtcgtccaggcggcctggaacttcagatcctcgtgctcgttggggtcctgaacaatgggctccagatagttggccacgttccccaattgcaagttgtttagaccctgcagatacaacatcttctggtcgaagtcgcgatcgcctgcgatgaatgatattagtttatatggaactcatggttatttggaacacttacttagataggcattaaagtacttctggacatactcctcaaacttttccttatcgatgcccttggccacatagacattatggatgagcgtggcaaagctaaggatagcggcctgccgcacatccgggcgatcgggtccgatattgaggaagtcctcgcacttttgcaccaactccgccgagagctcgaagatgtggaatggcatgggtatgagcagttgcacagcgatttgcggcttagtcaatttgttgagcaccaggtggtgggtcagaaaaacggatgctttagttccaatgcggggaatgatttcatgaaagatgttgcgaatggtctcctggcgataggaggtgccaatgtccacctcccgatagagtttagtgagcgaatcaaagtccatctcgctgagaagcttgatcacgtcggagagagtggagtcgtagggctccgagaacttgaattccgttgtctctagtgcttcggccagactgtctaagagcgtccccgcctgggcaatcagcgtctcctgctgctgagggctacgacctccagtgggatcgttgggatccagccgctgcagctccaggttggatggctctgctgccattgaggtttcaatatcgatgggattgtcgatgggcgtctcgttaaggaaattgagcagcaactccgagttaatgaattgtgcttctcccgtggattcgaacgtgtggatcagggttgtgcccttggcatgggccatgctcagatagtaacccgtttcgttgtgcggtgacatcccgtagatggcctcattgccaatgatcacactcttctggtgatcgaattcgcacgtattgggcggcacgttgctgcgtgtagtgtgaaccgcctccgagtacggcttgcaggtcttgacctccggcgttttgcggatggagatgtagtttgtcctgttggacacaaagtactccgtgcggcaagtgccgtgaatacccagctaccagtaaaaataataaagtttaaattaggaattatgtatatcggatggtataacttacctcatccacgacgaaggccccgctggacttcatctggaactgcagcaccgatgcgatggcccgcttgaagttcatgctccatatgggatcgccttccttgaagaccacatgtgagatggcgccatccttggtgagagcgatcttgaagggcttgtagggcgggtacatctccttgttctgcaggaacttctcgccggagttgttcagcgttacatcgtctatgaccagctgtcgggtagagagcgagcgagagagagagagagcagagcagagcagacgattagccgggaaagccctgcaataatgctgtaatcttctatcgaccagggtcgagcccaactgaaccggctgataagacgcgccgagacgccgtttatctggccagcagaaattagtcagatcggcgctctcatatggcgtacatgcaccataccatgcccaggcgcaggtccagatgcctgatcactgataagcgagggactctctactcctagagagtcactctcagtcaaaacaatcagagctgattaacaaaagggaatggcattatctgtgggggctcaatgaaagaagttcacaaccgagttcagtttattgtggcgaatccgctccgatcttttccagagtcgctaccgctcagtgaatggttaaattgtctttaattcatctgcgaattcttcttcgtctgcggaggctgacaagaagtcgcgctgcagatggtgatggggaatgggaagtggaatatgggaatgggggctatagaatgcgccgattggatcgtataaattgataatgaaatcaataaattgatttgatttttcaccgatttccaattgatatacacattcttctacatacaagaagtatgagtaaatactagtatggatcgatttgtataaacaaaaataatattgagaaacgcttgccggagatcaactgaaacatctccgaaactggaactgatcctagacaacttaccgccgcagccaagaccagctcgctttgccgctggagcgtcagcttgccccgcacaatccatccggtggtgggtggcgcctggtggccctcgtcctggggctttgcacccaccaggacattgccctcgtactcgtagagcatctgtttgttgaggccaatgatgctgaaggcatggccggcatcgaagatcaggaacagatctgccggataaatagataaatgggaaattgaacttcaattcgatggatgctcctcccatccgctcgtgttcatccatccctcccgccatctatgtcgcattcgcgcggacgggcaataaactcttcaattatcaattgaatttcttatatatatatatatatagatatatactaaatgtgcatgtgtatatataatatatataaacatatttgaatgatcgcaaaacgctttaatcaatgttgcttctaggtttctttttgatgcgcgcctcgtcaatgaataattacgtcatattcttttattagtttctgatacagttgggattatcaactaggttactctcacgtacacacaaacacggaacacttgagtagcctcatggcctgctacttgctactagctacttccttccgaggtcgtggcactcgcttttccacagatcttccgacgcttttcacttcgcgcacagatttctcaatgtagtatcagtgaatatatgtatatatattatatataatatatatatcaacgcgactgtatattatcagatttttcaaagaagccgacgcttttcctcctttatcgccaacgcgtctaattcccggatcacagctcgacacgtccgctctgttcgcgatccaagctcaaactgagcggacataacagccggatggttggccttgctggaggtttcgttgataagaatcatgctgcgaagagcagcttggcagctgggctctcttacgatctcttgggaaatgtcctataaatagatttttgccgcgtccactggaacaacgtcttacggaccagaaaacggattctcaaatctgatacattctgtttagaggattttaagatatcttgcataacattatcttacaatattcccaaggacaatttcgtatcccttcaagacttaataatttaataaggactagaaatacacaatattgcgctatttatttggtaccagacacatttaaattatattaaatctcgcggattgtctataaaaatctacgttatttattagtataagagtagcatataaggttacttatagacgaactaagactttgacgagctgctctcatacgtataacaatacaccacaaatcacatggaatcaggaatatcagaaactactctgtatgtcacttaaggctagcgtgctcccccatgagcatgtcctgccctgaagtgggcaccacccgttccagtaccacttggtcctcctgctcctcctgccctgcgtttctccgatcccgattctgcactagcgtctccgttatcagaaccaccactctgttctgcatctagattcttgagttgctgttgccacatgtccgcgtagatgccatcttcgcgcagcacaagctcttcgtgtcgcccacgctccgctatgcttccctgctgcaggaccagaatctcgtccgcatggatgatggtggaaagacgatgggcaacaatgatggtggtacgatttgcgcacaccctggccaaagcagcctgaatattgcgttctgtgtgggtgtccaaagctgaggtggcttcatccaggagcacaataatgggcgccttaagaagcgttctggcgatggctacgcgttgcttttcacctccactgag

SEQ ID NO: 42125 - DNA, 1622 bp, DROSOPHILA
aacagagcggacgtgtcgagctgtgatccgggaattagacgcgttggcgataaaggaggaaaagcgtcggcttctttgaaaaatctgataatatacaaaatctgtgcgcgaagtgaaaagcgtcggaagatctgtggaaaagcgagtgccacgacctcggaaggaagtagctagtagcaagtagcaggccatgaggctactcaagtgttccgtgtttgtgtatctgttcctgatcttcgatgccggccatgccttcagcatcattggcctcaacaaacagatgctctacgagtacgagggcaatgtcctggtgggtgcaaagccccaggacgagggccaccaggcgccacccaccaccggatggattgtgcggggcaagctgacgctccagcggcaaagcgagctggtcttggctgcggcgctggtcatagacgatgtaacgctgaacaactccggcgagaagttcctgcagaacaaggagatgtacccgccctacaagcccttcaagatcgctctcaccaaggatggcgccatctcacatgtggtcttcaaggaaggcgatcccatatggagcatgaacttcaagcgggccatcgcatcggtgctgcagttccagatgaagtccagcggggccttcgtcgtggatgagctgggtattcacggcacttgccgcacggagtactttgtgtccaacaggacaaactacatctccatccgcaaaacgccggaggtcaagacctgcaagccgtactcggaggcggttcacactacacgcagcaacgtgccgcccaatacgtgcgaattcgatcaccagaagagtgtgatcattggcaatgaggccatctacgggatgtcaccgcacaacgaaacgggttactatctgagcatggcccatgccaagggcacaaccctgatccacacgttcgaatccacgggagaagcacaattcattaactcggagttgctgctcaatttccttaacgagacgcccatcgacaatcccatcgatattgaaacctcaatggcagcagagccatccaacctggagctgcagcggctggatcccaacgatcccactggaggtcgtagccctcagcagcaggagacgctgattgcccaggcggggacgctcttagacagtctggccgaagcactagagacaacggaattcaagttctcggagccctacgactccactctctccgacgtgatcaagcttctcagcgagatggactttgattcgctcactaaactctatcgggaggtggacattggcacctcctatcgccaggagaccattcgcaacatctttcatgaaatcattccccgcattggaactaaagcatccgtttttctgacccaccacctggtgctcaacaaattgactaagccgcaaatcgctgtgcaactgctcatacccatgccattccacatcttcgagctctcggcggagttggtgcaaaagtgcgaggacttcctcaatatcggacccgatcgcccggatgtgcggcaggccgctatccttagctttgccacgctcatccataatgtctatgtggccaagggcatcgataaggaaaagtttgaggagtatgtccagaagtactttaatgcctatctaa

SEQ ID NO: 42126 - protein, 477 aa, DROSOPHILA
MRLLKCSVFVYLFLIFDAGHAFSIIGLNKQMLYEYEGNVLVGAKPQDEGHQAPPTTGWIVRGKLTLQRQSELVLAAALVIDDVTLNNSGEKFLQNKEMYPPYKPFKIALTKDGAISHVVFKEGDPIWSMNFKRAIASVLQFQMKSSGAFVVDELGIHGTCRTEYFVSNRTNYISIRKTPEVKTCKPYSEAVHTTRSNVPPNTCEFDHQKSVIIGNEAIYGMSPHNETGYYLSMAHAKGTTLIHTFESTGEAQFINSELLLNFLNETPIDNPIDIETSMAAEPSNLELQRLDPNDPTGGRSPQQQETLIAQAGTLLDSLAEALETTEFKFSEPYDSTLSDVIKLLSEMDFDSLTKLYREVDIGTSYRQETIRNIFHEIIPRIGTKASVFLTHHLVLNKLTKPQIAVQLLIPMPFHIFELSAELVQKCEDFLNIGPDRPDVRQAAILSFATLIHNVYVAKGIDKEKFEEYVQKYFNAYL

SEQ ID NO: 42127 - DNA, 3714 bp, DROSOPHILA
attcgctactatatagatagtgtcttcttcaactttaaggaagaaaacaatccagctgttagcgtaaatgaacgtgtttctatatacactcagctgcgtagccttataaataggtaagattgctgcgcttaaagtcatgctaattaaatgatttcactaaatttgatttcgcaggctcctttgcaaggatcgtagatatatcgaaagaaatatgagcaatgcggattttgaatgggaaaccaatcccgaactaccactgccgaatgaaccttttggcaagagggccatatttccgatgcactcacttactgagctccaagaggaagacacgggtcgcttggtgcaactgagagagaactgcagcatgttgcacaaatggcgcaacttgtaagactggtgcttgtttacaagaatatattgcattacttatattttaacttatatttttagcgaaggcactttaccccatatgacttgcaaactgtgcaatcagttgttggaatcggttccccagctccgtttgcatctcctgaccatattgcatcgtgatcgtgaaaagcaaatcgactattgcaaccaataagaatggttacatcgtttaatatgaaaacagctgattttgaactttttgatttctcatttcttttcttaaaggacacacttcacttgtttggtttaaaaaaatgacgtattcatggaatgaaaacaagttttgaattgaatctaaacctacagaaatcttcattacgttaaatattttctatgttatgttgaatgatctctcttcgttcaattacgaagtgtaaaatgtgaaatataattttttgttaattacatctttaaagatatcattaaatacgaagacagctatactaaccagttcattacaagcaaaaatccataaactgcttgctgtttataaaaatcaaagccctggggcgtgcatgttctccctttttgggctcttttttttattttagattaaactcacacattatatttatgcaactacaactacatcggaggaattctgcagcggcacaggagttggagtgtttgcctccagctcgcagatcgtataattctgcatgcggtttaggggcttgctgcacagcccacacatctggtgcttatacacgccgtatatctcgaaattcaggatgttgtacagatcgaactggatggtggaggacagctgcgtacactccacaattaaaatattttgctcgttaagttccacgctgaaagggcatatggcgtttataaaattgtatataaaagctaaaaagcattcttaccggaagtcgtagtcactagtctcaattggccattgatatggctttttgcgcacgttgtgcggtgtttgatcctggttaagatatatgagcactggttcatccgtgggcaggctgctgttgtctgtgcgggcgcggaagttgaagtagttttgcccgatatggactcgtaatccatagttggtggacagtccttgaacaggcgaaggcgtaacaaacactgcaatctgtggcaatggcgaacagtcagccaccagcagcgtgagacagtcgggacgcaccgcaatctctctgagattgattaggtaatcatcgaaggtattgactatgccattgattactgagcaggagcgcttaagtcctgagtcgaaggtaagctcgtgggaagcgtcgaacttcgagtccagcttgtagaagaaggggatctgatggaaacgccacttcactccgttgacctccacagccagcctgaactggtcctgaggagtttgcattgatatatttatctcctggctcatatgcagactgtccaccttgtcggcggataaggcggacactaagtggtccagtcgattcgaccacagctcgaaccaggcgggcatcttaaaaaatataaaggtgagttgattggtcttttatatatcttttcggagcggaaagtaatttgatatatctgatatacttacattgtcaaacttcaggtccatgtcgtattgtgtgatcgaggtgaagttctcaaagttgctacgcttgcaatacctggaagtgggtatgggcgagaacttcagtacctccttgggacagaagtcggtgtccgtcagcgagatcttgtcggagcggaggaaggcacgggcatgctccgagggctggcgagatgaaaacgttgggttaaaagagaatccacttcgggcttatgtacacttacaccagctctagctgcaaactgcaccgtggaacccttctccgggcactcgctctcctcggtggccaggccaaacaccacatcgccattcagagtgtgaggtcgcttggtaaacaccagcggttcataggtcaacttggtgcaggcctaaggaaaattatgcaaatgagtgagaaaatcctgtatccttaagtgaaacaccatgtgttttttttaatgctttttaaaataaacctaaaatctgtcaacttgattttccaattatgaaatatggaatacaatttaatttcctagccggtggttcttcacacagtatgtcccagtaggtcaatagccagctatgctcggcacgagtcaagtgctccttttgggtggcgggtgtgacaccctgtaagtattatgtagttacactgctttcctcaagcgtggaggcaagaaaatgtggggttcagctgttcgctgaagctccaggcgagtggagtgggccacattaccatgacgaaacagcagacaacggagccacaacaactgcagcaacgattagcgaacccacacacatcctgactgtatgattgtatggccctcttccgccccaccgttcgtgcctgcgtgccaccttactacacacacacacacacacgcaacccatcctttcaagcactcaagcagtcgccgcaattgttggcccacattcgtgggttgtttgcgtcccggaatcgagaccgagaaccgagtctggcaaccggactagagtaaagcaggcctggcggtgtaagtagccccgtttgatcaatacgactcggtgggagctcagtagaaggcatccagttacgctactgttcagacgaatttctcctgtcgtaaatttgttttgggaaaaaattacattttcttttattttgtaagaacgctgtaaaaatctggaaaaaagacccagtgctctcgacctattttatttcggtaccgccatcgggagcattcagttgcgttgcttttataaatttatgtttacttgattctcggtcggacaaactgcaaaatgacttcggtaagtgatatataagaagcataatagatatggattcttatgtagccactttacctgcttctccagatcgagtcaaaacgcgtccaatatcgaaagtatttggaacgcgccggagtcatcgatgccttaagcaaggctctgattaagctttacgaagagcagaataagccggaggatgccattcgctttgtacgcaagtttatgtgcgagagctgcccggacgatgcccagtacgatgtaatgaagaacgacctcgaggaggccaagacccacatctcgaaactggagcaggagcttgaacggctacgcggacaaatgtgagtttctaagatcgcgtcttgtctgtccagtcttgatttagattctatttacactcaatagcaaaaagtcaccggaggagtaccaggagctcactactgagggctacaaatcgctcatggatgatgagg

SEQ ID NO: 42128 - DNA, 1167 bp, DROSOPHILA
atggcctgcaccaagttgacctatgaaccgctggtgtttaccaagcgacctcacactctgaatggcgatgtggtgtttggcctggccaccgaggagagcgagtgcccggagaagggttccacggtgcagtttgcagctagagctggtccctcggagcatgcccgtgccttcctccgctccgacaagatctcgctgacggacaccgacttctgtcccaaggaggtactgaagttctcgcccatacccacttccaggtattgcaagcgtagcaactttgagaacttcacctcgatcacacaatacgacatggacctgaagtttgacaatatgcccgcctggttcgagctgtggtcgaatcgactggaccacttagtgtccgccttatccgccgacaaggtggacagtctgcatatgagccaggagataaatatatcaatgcaaactcctcaggaccagttcaggctggctgtggaggtcaacggagtgaagtggcgtttccatcagatccccttcttctacaagctggactcgaagttcgacgcttcccacgagcttaccttcgactcaggacttaagcgctcctgctcagtaatcaatggcatagtcaataccttcgatgattacctaatcaatctcagagagattgcggtgcgtcccgactgtctcacgctgctggtggctgactgttcgccattgccacagattgcagtgtttgttacgccttcgcctgttcaaggactgtccaccaactatggattacgagtccatatcgggcaaaactacttcaacttccgcgcccgcacagacaacagcagcctgcccacggatgaaccagtgctcatatatcttaaccaggatcaaacaccgcacaacgtgcgcaaaaagccatatcaatggccaattgagactagtgactacgacttccgcgtggaacttaacgagcaaaatattttaattgtggagtgtacgcagctgtcctccaccatccagttcgatctgtacaacatcctgaatttcgagatatacggcgtgtataagcaccagatgtgtgggctgtgcagcaagcccctaaaccgcatgcagaattatacgatctgcgagctggaggcaaacactccaactcctgtgccgctgcagaattcctccgatgtagttgtagttgcataa

SEQ ID NO: 42129 - protein, 388 aa, DROSOPHILA
MACTKLTYEPLVFTKRPHTLNGDVVFGLATEESECPEKGSTVQFAARAGPSEHARAFLRSDKISLTDTDFCPKEVLKFSPIPTSRYCKRSNFENFTSITQYDMDLKFDNMPAWFELWSNRLDHLVSALSADKVDSLHMSQEINISMQTPQDQFRLAVEVNGVKWRFHQIPFFYKLDSKFDASHELTFDSGLKRSCSVINGIVNTFDDYLINLREIAVRPDCLTLLVADCSPLPQIAVFVTPSPVQGLSTNYGLRVHIGQNYFNFRARTDNSSLPTDEPVLIYLNQDQTPHNVRKKPYQWPIETSDYDFRVELNEQNILIVECTQLSSTIQFDLYNILNFEIYGVYKHQMCGLCSKPLNRMQNYTICELEANTPTPVPLQNSSDVVVVA

SEQ ID NO: 42130 - DNA, 40962 bp, DROSOPHILA
tcgacagccgtctgacgccagttagtggacaagtcagttacagtgagagttaaaagttaaggtacctgaaaaagataatttaaagtaatatatgataagacacacttaaataaaagagtaaaggtataaatatattgaaatctagtattaattctcgtaaattaaaaattcgtacctcaatttaatttttaaatgttctaatttaatcggaaaaaagatttctttgaggcactgtgccataagagtcaactgttgaataagggtcaatgagcttagctttgtggacagcaagtggggagatcgcggaatccaactcttgtagaaactatagatttgagtttggcaaaaattaagcttagatcccgaagtttggctaacgaacgaggcgagaagacagacatcgagaagaatcgcttatatatgtacgaatggccaaaactaatcgatggaaattacaaaagcgggaaggtcaacttttcgactgtccattgggggggatgggttcaaaggtaaacctgtttttaattctaattctcccttcctctatgaagaaatagaaaaaactaaagttcttatttttgccaacgtggtttggatcacacgcaatatgttctattcaaccgaacaaattaccattaaggtcggtaaaccagctgatccaataaaggatattgaaacaagtgcccgaaattcgattccttgcgcagagaataaagacacttcgctgtttggacgacctaaataaatatgtctaagtagattaatgtcagatgtggggtaataataaaaatgttgccacagacaaatgggctacagtcacgtccccacgaaatcagtcagccagcgaacaaagagcgatcaaaagagcgaataaacagagccaaagagagtcgaagaaaatggtaaaagcaaacagtggtaagccgccgctgccaacgtcttaaagttggccaaaaaggcggccaagtgcccccaggaacattcagtcaagccgcgatcgccgagctctacggacgtctatatctctaagtcttcgaatcgtgaatcggaactcaagtgaacccaagtgccgaccggaaaattctttcggccaagaaaggtcttcgagaactaagatctcaagcgattgtgttttttgtgtaattgacattggatgtctctgaacgccgagcgatcgtacaaaatgaaactgcgcgatgtggaaaatgccttcaaataccggcgcataccgtatcccaagcggtaagtgtggtcttcagccgagaaaaaggcggcggagaaaagatttctttcactcgagaacggtgttcgtttcaaaggggaaatgcaattgagttccagtttcagttaaattgaaaaccggtcataattgccattgaatggccagagaatcgaaatcgagttggtagatcgaagattgcgtttgccgcagcgctaaagattaaaaatactctgctctcgattctccataaaaagcgcttaactttccgtttttcgcatctggctaaaagtgatagtgtttcagggtcgttgtatttgataaataaaattaaataaaaactccaattgctggccagagcagttcgaacattcttgacggactttaagtagtgccagccagtaaattaattgcagctacactagaagaaatagatatttttgatcttaaatttaatatgaatctcatcgacttagatgggtttatgtagatcgacgagctttaagaactttattttaaaaaattgattgagtacttttaattaagctatgaaaaattgttacgaatgctgatatgagcttccaagtactgtatcaattgaaaatattttcaaaaatttatatatacaaaaaggggtctattatttatccttttattttttttgtatttattatttatactttgaaaatgttttcttatattttgaagacttattaaaagcaagtattaaagctttgtaaacactgtacttcaacatttaattttaaatgtttcataaacttttctctgtgcacttgcgtctgtcgttttttcaatctctgctccagttaaaagctacaatcttgtttctattttttattgcgtttttcattttcaattcttctcataattcatttggtgtagcacctcggggcggcagatgaagaggaggaaaaccacaaaagccgagctcacttcaactatttcaagtagccaaaagagccgtgtcttaccaccatcctaccactgcattgtgtgggcctgcatttttcggtgtttgttctggccttttacagaacccaactcggctcagttcgggccaagtcagctcagataaaagttaagagccccccaacttgactgcccgctcattagtcgatggtcgatggtcgacggccggcggtttctgcggccgcccataacaattttggctattaaaaggtgtttaggccagagaactgagccactgcgtccgctattgtgaaagattcgctcttttttccgtttgtatggccaaatttgttgcaacgagtgcgtcgagatgtaaactaatgatataccgactacacatgttatgggctaattggcttttgggaaactatttcttaccgtttttgttgactttttaaaagggtgtgagaatttgcttttcattaaggcaaaacgtggtgaagtcatggctcacagctatttgcgtataactgtgagatcttagctcaagctaatggcaaattggatcaacgacatacatatgttttatattttatttaaacattttcccacttattgagtccctgctagatatccttttttcctataaagccctcgttaattttcgcgaagcgaggcccatttcccgtttatttgcagaacaaattattacattaaatgtatgaattactggcattaattaaacacatggcttaaatgtagatatgtgtgatactttctgtggttaccgctggctggagcataaattttacgctcattttgacaatttcatgcagctgcaaactctcagtcaatcagttggccactcagtcagtctgccaatcaatcaggtaaacatttattttttatccatttccgatggccaggcgacttagtgaaacgagtaatcttgccatttgcacaacaaaatagtgcaaatatttgaatatggatatgatttatcacaacagatacgaattgtcctgcagagaaacataaatacataaattcccagccatattgctgcgtacacttacgtcgttatttgcacaattcttttgtacgctctcaaattgatattaattaatgaaattaattggttttgcttaaataactcggcgacagatgtttggcagcttcattatccggacacgcgataaatgagcatacgtagaaaatgagttcgttgcacccagttgagaaaaatcagtcggaatcgattcgaatcgatttgaaaagtcaaaaaagacaattatacgctcaatgagtggaatgaagtgcagttatgcaataatttctttcgaattagcataaattacgtttctgatttgctttccatttggattagggtttacctaatacaaaaaacaaaactcactcttattttcactgcaagccgaagcgtgacagaaattatttagaacgccccaaaagaaagagggcgaagactcaagccgcgcttgaaaagactgtagctggctcttcgctgccgagtctacaagtcttcaagtctttcttctgtgcgcctttctcagcaattcttctctttcttgccagtttctttctttctctgggcgccacgacatgcagtcacttactctttggtaattatattcagtgatgtgatttgtttttcttttcttcattttctttcgagttttgcatgccgttttgttttattttgcctgtctttctgcaatggaaatgatgcatattgggaattttacacgctgccggtggcccgcgggaaagttaattattgctgtctgtctgcggcgggtggcaaattaaaaaataattattaacaaaaacatatatatgtgctaaattttatgttttaaaacggcaattaaaatgtttttcttcacacactaagaaacaaacgaatttatagctgtagggttaaatacacgactttcttttttatggtttacaaatatttaggaaaatattattaaaaaagaatgaaacaagtgagttgggccttacgagcttttttccgcttacacaatcttgtttacactcttaggatttttaacagtgaattaagcgaaacaaaaatatataaaacctatattaaatggaatacaattatcatatataaaaaattattttcaaaattattagctgtgccaaaaacaaacttggctctttaatatggtatgtttacccatccaattacatatattttcaaagtttacagaataacaagagcacattttgagtgcttttaagcccgtattttacacaattttcgtaaaacttcacacctaacccgcatgatcaggtgaaactgtaggccctctgcccacatatgactccctttttcactgataatttcgcacgcaacttttggcaagtgaaagcccacaaaatattcacatgttttgtatacattatagcaatttatgaccacagccgtttagcacctttcagaagagatgaccggcaattttactgggccaatttcggagagcaacaaacgcccaccggtagtcactaactatgtggctgttattagttggccataaaaacaaaaacttcggttatggctgtgtggacatcaaaaacaacgccctctcccacgaaagagtttttctacattatgtaaaaacggtcgaatgctgggcgcagagtggcaaacacaaaatgctaaaaaaaaaattcgcaatatttttagcacagtttatgtattacggaggctctataagaaagccaaagccaaagctgattaacacaatcatgtgaaaaatgtgcaacacttttcggctaaaaataaaacaagtgcagagatatagccagacgcagcagacaagtggaaattatgtgtatagctttcacttgatttacaaatatgggctgcgggacaagggggcgtggccagcaatgcgtaacagccaagtgatgatgacaatgatgaatttttcttttcgtcttctgacggacttcaagtttcaagtttgccaggtgtaaattgatggccaaaaaggtgaagttgaacgaaaggtgcatctagttcaaagtcattgagcatggtctttaaaatgaaatagtcatgggtgtaatcaaggtaaaggctagtcaaatgtttcatagggctaagttgagggacttgttgttgtattattattttttcaagggtatacaatagctaatagtccagcgcccaggtggcgcatcttttcagttttgtacaaatgatcatcaactaattaccctttcaccgcgctgataaaaacaatgaagaaaactcattaatagcactacagccaacatggtcccctaatttatttaggcacttccttgcccgaaaagactttcataaaaattatctttatgcaatgcataaaatgtttgaagaagcacataaacctcctttcaatttgtgtttttccccaaaacatataaagatgttgttactcgtactttcatacttcataaaatttgattgtttttgatcaaatatgcatgcaaaatgctataaataagaaaccaggctaaatgtgaataaaaagcaaaatgtgtgtgtttactttttttgcgaccgtatccgtacgtttctttctttttctttttttaagtttgccaaatgcagacgaggcaaaattgaatttaatttatctgctgcttcttcactctcacacagcgaaagtgagttaacgcttagcttgagatccgaacttggtaaatacctcgagtatgtaaatcactttttacagccggcaaactgcgaagatttatggccaccagctacttgggcgagcagaatatttaacggtgggacatgtctgggatcccaagagatagatctccaggtgggcggtgctcgtcttggccatcaggtgaaagcattgaactccaattagcgggcgcatttatgattcttttcacttttccgccagtcaagcgcccagagaactttcgatgttaattggaataaaataactagtttttaaataaagaattcccgaaaatagcttactatacttcacaggcatatgaataacaataattggtaatacaacttagaatgcaggtgagcaaaaagttaagttgctttttttaatttgtgtgtgcctctcccttgcaaaaaggcgaaggcaacgcctggccagaaaactaagtgagactacaagattcgcgagtgcatataaagagtgcagtctagaaaccgacccccgacaatggaccaggccaaaattgaaattgtaacaaaatgctcacgacaaatatgcggtttttgtctgccccgacttacaagtttttccccattttccgccttcctcgcccgcttttatatgtgcaaacataccgcctgcattttggctgtgccactccaaagccaaaagctgcatcatgacgtaatgaccacatgaaacagcccggccaactcatgtgcctccgctggcttttaggctaaaccgaaccgaaccgaaccgaactgaaacgaacccaacccaaccgaaccgaaccgcaaacgaaaaatcggtccacgactcgaggaggatctataattaaatattttttttaattgcgctctctgcggtcttttaattgcctgggggattgggattggcctaggttagacaagtaagtgtggaaaacactgaaatcttgactgcctttactcgaagtggttattccagctttaaacggccatcgggacgaaagattagggttattatgtcccatagataattaaggtttacgatgcttaagcaactgaaaaactgatggggagctaaatgtgatattacaaaggtgccagattgaggatcccgattgggaatgatggtatgctaagtgcagtcatatactagttaggttacttaagataagttactaaaaaggctgcaaatgaaatggctatggccacttttcaaaatttcaattaaagtaactaaatagtacataacaaatataagactataaatattttaagtatgttataacactcattttatttacatatccccgactaccatccaccgatcgacctaacttttgttaatgaaaacaacccttacaaattgtttgatagcttacaatcgcaaaactaatgccattgactttatgaatcattaaagccctgatttgattgcacgaattgccgaccgacgaaagagttaacgaattgaaattgctacgtaaagaaagctaaattgatccctaatgaatgtcggatgtagtaacctgccaccgaacacccccaataagcgtggcaatccaatgttgccccattcccccgcccctgcatgtggcagctgttactcggaactcagtgcttgatgttcgatgctcgatggtcggtgaaaggaggttggagcatcaaaattgattttaatgatgccttcgtttcggatcgcttatcggacatgtaccgaacatcatgttccaaaatcataaatcttgctatcatttcgttttgttgccaccacctggaagggagtgagctggggtggttttggccaacaatttttcatttctccggccaagacatgtgcatgtatgtatgtccggagtatttggattcgggtgagcaatgagtgacgaaagatgccctgtcgaggtcaccagctgtgcgtgtactttccacggccacagttttggagtgtcgaagcactgttttcatattaggtggggccttcctcatgtggcaggtgcagcaggtgctcgcctgcctttcactaaacaaaagccgaagatgccaactgagtttagtttagcgctggctcagctcacatcttttgtttgctttgtccgtctgcatttctatgataatgccagagcttagcttaatccctcccggacatcgagcatacttttaattagccgggccacgagaagctcagattaatgttcaacggaattttcttttcgaaaccaatagcaaatagtatttatgaagaggtattgcacacaagcaactgagttgctaaaaattcaaaagaaaataacacatttgaaaagaggtgagcccaaaggtgagcatattgtgtagtgaatatagctggtgaggtgactcccaaaaatgcaggccattaaataaatgtcaagctggattaattgagtttcctgttcgactgattatagcacttaaactaaactaggagctaaatttcttagaactatttgctggataaatcaaccgctcgcaatggccaacatcctttctcgctcccaatgacttccaattaacataaatgcaatggcaaacatacgacagacaaatacctgcgagggaaattgaattgcttaattaatttccacactcgcttccttgtgcgaaaacaagagaacggctccgacaggcaaataaaattccagataaaatttaattttaatgcagcttagtcttagttcacccaaagatgtcccccaggatgcatatccattttttccgcctttcgttccatcgctctgcgacttttatgtgcggagcgagtttttccttcggtcgccggttaaacaagttgcagcggcgctggcgacctacttttggcatcgcctccggctaaaactgttactcgaatccagactgcggctatggacgggaaaaagtcggagatctttgctgggcggtggcgaaaagacagcgaacagcgaaaacagctgccaaacaaggaaaaatgtcgccaaagttaatttcagattcatttttattgaaattgtctttctgcaatgctgttgttcctcaccaaaacaaaaaaaaaagggaatttggcctaaaaagattgacttacaccgaagggattgtgtcacaaaccaagataaatttaattttttccagtgcatttcgcctgctttgtggcgccactttctttggcgtccagttgactggttgacaccaatttgaatggcaagtttctgtcaggcggcgcgctctttttacatcacaaatgagcagaaaatcggatcgggttcgccatgtgaaagtcaaggagtgatacaaatacttaatacttaagcgccctcccaccttttcaggtgagcccatctagagagcgggttttggttaacgcaaattggcgaatgtgcccaatggggattgtgcagcggccgtggagaaaggattctccccaaacgtatttgccatcagctaagaaaattcaaggggctccgatttaactaccttggggctagtttttctgccataatggatttaattggtgttggtttggagttgcaataggagtattggaaatatccatatccttttctatttcgattgatgtaaattcttcaacattgttactacaatatatttaagggtttcggcattcaaagttagtttctattatttgagattaatacgctcagaaaaaatcatctgcatcagtgaaacgctttcatgagcttaccgtcccgctccccaaacgacatctcaattttccatatcagccaacctgagctcaaggctctttgtctagtctttggaaaattatctgtaaactctctttgtcaatatcagttacctcgccgcaagtcgtttcaggtaaaataatgacaatgcaaatgcttatcatggcaaagcatggaagctcggaaaagccagctccagtttccaacgcgctacacaatacatatttcacccctctccctaatttcactttggagtccaggcaggcgttaaatgagaagcgtttgacaactggggaggcgccaccttatccctactgcccctccagtcggatgcagttgttgttcgggcggccagagatcaggaattagtgagccaagttgtttggcctgataccgccctcatgttcccattccatgcacagagagaaatttatggggagctatctatacagaatttatttttaaaataggaaatatatttatgtagtacattcaggttaggaaaactctcaaataaacattaaatggtattcctttaagactgtgcaaatcatgcatatccttgtggcaacagatgccatctttttcgtatgtacgccttgcccctccccttttcccgcaccgctcaccaacacacacacacacacacgtacacagagagagcagccaaaaattaattgcaatgccgcaaatgacagcgtcaagtagtaaaagtaagcacccacggtggcgcagacttcagatgtagatggcgttggaggccaaggagcaggagacttcgagtcctgaatttgggctgcctctgctaggggcggacgttgcaggtgggcgggggacgttgggcgtgtcacgtgcgccggttgcaacaaggacgagctcgttaaaggaagcgacaacgatggagacaacagcaacaaatgccgccgagttgttcgcctctgttgtcgagtgcgtaaattttggttgttgctggtgttgttgatacaaaatgttattaacattcggtgcaagtcaaacaggggaaggcaaggaaggggaaagagggcttaaagctgtcaacgtcttacttgccgccttttgctggtttccgcttttcggtcgaaatattctcttgtcagatataagaagaaccacatgagaaacatttaaaaatactctgtcctggcgaaattgctttaatagtatatagcaattcagcaatgatcttaattaacaataaatcttcccttgtatcactatttaaccactttaattcgtttagctgaataagccgcagaaagtgttcattatcattaggatggctcctcaagcctagccgcctccaaaatccgccgctctcattgctccattatggcattcaaaattaaccttcgcggcgaaatcggttaccataacagctaattgtttacaatttgacccacaaacgcaatttggcacactgctcgtcaagggactttcatactccagcaaaccggcagatttacggccatgatatgaaattcgttaattgtcaacacatctcttctacctcgactccatggccaaatacgaattctagcccgacagtaaaacaaatgacaactggagtgtgttaatggacttcgtcaacatgttgccagcgacatttgttgcatgccacacttgcacgagcagcaacacctccaaatgataaaagggtggaagtgattcatgaaggccacaacaaaaacatatttaatcatataataataagtaagaataataataataaggaaatctctcctttctatttcaaaaatattttttattgttaaatatattgttgaatgttcaaagcaacacaaatatacatctgaataatgtatacacattatatggcagtaactcaatccaagtgtaggtaaaaattttagcagaccttaatgaattcccagttccatttgtgccacaagtttcccactactccacccacagatgtgttgtgtacttaggacttttatgtgtgtactaggcgaaatttaggggcaactcgcggggggccagatacttgaaaagcccgcacgtaggttttacaacttaattacaagccgcgttaatctaagccaaatgaagcttcacctcacttgttcacttttcatttgaaatgcgggaatgtaaaaggaaatttaaatgggacgaaatggaaacggaatgtcattttaattggaagctttaaaaaaaagctgtgcaagccaaaaacttcagaaattacaacaatggtccacaaaggtgcttgtttggacataatttacggaatctctacaaaagtacacataataaggaagttaaatattaatgataacctatccttttatagctctaaactcaaaaattaggaagaacctaggaacaacctacatataacaatgcatatgcatttgacaaactaaaaaatgtttaataaaacgtttggcaaatattaccccagctcaaagtctacaaacagctgtcacttttgtgagttactttccattcaatttttgccaccacgtttttttttttattttttcgaagacaaaagagcaaattgtcttaccaccgataatcatgagggcgataatgatgatgttgctggccaagattgacacttttattcaacgaccatgactgtgactctgacttttagccgcagctccattcgcatagatacatctatccaactggctgtctaactacaggcgaacttagctaactcgaattttctaaaaattatatataaaattgggccctaagtggctaagtatatttattttttaacattaattgaagcaatgaaagactgaaaaatgccaaagatgtgaactaaaaatgtgttcaatctattgaggccgtactgtacgtatctgtatctatttgtatcgggttaagcaaaaacaatttgtcgctgggcggcggggggagtgacagatttgcagcggagcgttgcagttgcacgttccttgaaaacgccacacaattcgcaattgaaagttgagttgtatttgtgctttttgcgtctattacacagtaaccgcagttagccatttgatcgaaaagaagactcattcccagcacagaatgcagtgtccggttgggattttattttactttttactttttagccagctttcttttatgggatcacgttctatttgaaacgtgaattattcgcaacaagccagctgatggatgtaagtaagtcatgaaatagagaaaggggagaaaggtggagtgggagtggcagaacagggtggggggataatgccccactccgcacattcaactccaattttttaagtgcgtgttaagcgccactttatgccacacggtatgggatttacgatattcgatacaggcgtgaaatgccttcggaatattttcttttctaccagcagcatatgtatatgtatctgcagtaatcgttttggtttttgattgttattttgcggctgttgaacgctccagctggcaaagtcattaactcttatttgttgtattatatttaacttgagcgtgccgaagcagattaaaataatttcgggcaagtcgtcgccttcggcttgattgtgtgtggatttcgaggctgtactcattaaactcgaaagctaatgactccctaacatggaaaatggtgaaaatagtagcttggctggccattattccgaattagaatataaacatgcttaaaaggccataattacaataaattagctaataaaactatctaatttatttattctcattaaattaataaccaagcattttaaatacgttataagtaaaattaattatcagatcaaaccattcatcgaacggattttaatttaatgagaataatttattgcgaatataatagactacgaatgtgcagcacatttatgtggcaataatttagtttttggagcacaagtccaaagcgccaaaaacgcttggcccattcaaagccactaccgaaattccattaaagtccaggcaaatttgttagaccatctcaccctgtttaaacattgtctaaaagcaattgtgttgacccaacttttttcagtgccgttcgcttgtttacttaaaatttatcacaattactttaccacataaaacgcagtgaaaaacgaggaaaactgatttttttttcgttttttgatgagtttttaaatgctgacagagtcttgttattagagtaaacaaaccacagaaaaataacgaaataaaagagcagcgccgaatgcaaagcgaaaaaacgaagaataatggtaaaatgtagttcaaaaatggcataacatttgtgaaattaaaataaacacagttccaatctgtggacgattgttgctgcttttgttttgcggcttcaattaaatcatatgccaagctttgctggcttttcagactgctggaaattgttgctatttcgacgactatacctacttatacaatacaatatcagccgcccccgagactccggctctttttccacccgaaattgggaggctacgtgcaaaaacaaaaccgaaagactgaaaagaaaaacaattgcataaaaaattcacatgactcggatcgcagagctcgtctctttcgagattatacaactttctaatcaaaatattattttattattattactcattgcgagtttttgtttattttcgaaccttgccttacttcacttttcgtggcgtcactaaattcaattgctcaattggcccaatcggccgaaactaacatttttatctcaattttcttcggtcacattttcgaaacacagcttccggtacgcacttttcatctgagatttgccgcaaagtattactgctcgatttgggtcagttttggccccatctactgccaagtaaaaccgaaaatcatcgacaggggcacgtagaacgttttaattacaattggcctagtttcgctttgagccgagatttcggcccgttctcttgctgcttttgatgatgtctatctatatgctggcccatgtcatggagccaactatcagattagagttaatagttttattgcgagtgggccaggggaatgccgcctgtggacgaagccccagggaaatgtgattactcgtaaatgtgacccgagaggtcttggcatcgcacaacggctggtagatctttaagttaggagattttccattaaacttctgttaaactgcccaaatatgagacacgatattttgaaacttccatctctttgactttgcaacatcccaaaagaaaaacatagtacatttcctctcgatgattaaatcccgagaaacactcttcaatgaccccgaatatgcccaatgtctggggattaggcctaacggaacccgcagctttagagattgaaccctgacccctcgacctaattgcacctctctatgcgcttctcacacacttttcctacggacttacacaacccaaagcggaaggcctcattaactgacctcagttgacaattttaatgggcctttgagccggacccacgaaaattgcctaatgaagtactcatggattgcgaatgccagatgccagccaaaagtcaagcgaaaggttccaaaaaaaatgcgcggtctgaaagtttgttgaacttttgttacgccaaaaagccgaaagcgcgaataaaattcaatttctttgcatactaaatcaggcaaatcatggtctgacccgggggcaaactagttataaaaagatctgccggctcgggcttgggttatgtcatggtgccaggcgttgcctccgaaatgctaatgctcaacaaagaatagttctttctacgaagtcgggtccagaacatccaaaggtgtttttcgatccaatgatttcatatttccagcactcgcgttctttcaacttgtttggccacttctaatcgcaatgccgctggcttgggggcaaatctgggttcaaacacctttcgaaaacttgcctattgcgtgtattgattggagtgtgcggcttccaagcgcgattcggttttttcatcttcgcagatcccccatcgaaaatcggacccattgcgaaagaaatcttcatgtctcaaacaatttgttgcgcctgctctgcaagtaaaccgagttggtgctgcgtcaactggggttgcttcactgtacatacatatatcactgaagcatattttgagtggctttgctggtagtgcaaagtccacaatcagcatcctcaatcatacacatacgttcaatcacaccaaatacatctgaaatcaatgattttgagaactgttatctgttaagtacaatctaaataatgtcaggttttctaaggtacttccgattttttcgtattgttcgacttacccaagctccactgtagtttttcatcgaaccccccattttgcaatcttcatttctaatgccttggaaactggctgcaatttggtcggtcgcttgccgttttacagtttgattaggtggaaaatttgccatcgtttaattaaattatgtttgcagttggtagatggtagttgctgcctaggcttacgtgtatgggcagtcgaatgacaatgagcggaaatggcgagcaatttgcatgcaacggcagctgacttattccattttagcccgatgccccatccccttcctgcgaagtgaaaggcgcggtctgttggccaacaaatgctgacggataaacggaaagcatcttggccaatgaactcggcgttctatggcaacttcttggtgattctgcaatttccccgctccgagatgggaattgaattcgatgaaaaattgctggatatgcatgaaccgtaggaataaacgtagccatagtcatggctgttagatgcagaacatgcccaaaggcatctcaaaactaccttagcacaaaaacagttagacatcgcttatactcatagatctaccatttaaggagctgtcgtgtaagttataaactattcaccggtatatacagaagaactgccaattactttcaaaaatatcccataaaaatagcttaaatttcggtctggcaaacgacagcttagcttacgaatatctataactcttcgtcccatttcactcattaccaacatgcacgcacatatttcaatcatcttgatgaagttgtagccaactgtgccactgtggaaatcgatctcgaagctattactcttggagccgccacatcccccgcttgccacgcccactccgccaccgcccacaccgaagcaagggaaatagaactcgcatggcatacatatagtatactatagtaccatgctgaaaatccccaaaaaaaagcgctaacgaaccaagtgtggccgaggtcccgggttctgggtccctaatggcctgcacatgtgctacgtggcagcaaacgaactgcagttggaccaaccaaccgatatctacaggctcccaactcgcaagtccccagaactttccctccagaatcgtccaaagaagtcgacgcagtcacgtaaaattattttaataatcacataactttcggcatttacacgacggcgttccaatgggagtagcaaacaaaatgtcaataaattccagcctttttgttggggctggccaaaaaatataattacaattacgagcaacattataggatctgctactacagctattaattacattcccaaaaataaagatcataatcaaaccattataagcaatcatgctaaatcaaaacgttaatgcacaaagcatacgatttttcatataagaatatcttagttctatttaatagttcttaagttctaaaaaaatattttcattctgaccgcaagtgtatgtgagtaacaaagttgggatatgcagaggaaaaagcgcaagttttgggggccagagcgcttaagtgggatttgcgtggcactgtagtgtcaactttaacaataagttggggaaaaaacggggccatgaatggccagccggaacattctcctccacataagccgcaaacttttggcgggcagtgtgggctaatgaaatgaagcctccccaaaaaagcgctcatatactgagcaacttgagctgattccacacagcaggtgagcgtctaaaggcgaaggagcttttccttctgaccagccccctggatacagtttcgactatcaattgcatctgtctatcctgcagatacatttcactgaagtctgacctgggattttcccggtgtcccccgatttccctccttttgacattctgcccagctgagcagctccagtgcagtcgttcgaaataaattactctgtgcacctgatgacaaactaaacaagacccctcaaactagactaaggtggtaaagggggcataggtggggatgattatagatttttattgggtatttcgtactggtcacaaactttggaactcccaaagaagatactgagctaataaatggaatacaatgataagcatagccctaagaaatcttcaaatctaacattaaaataagcatatttatagaaatgtttaaatgtgtacttgaatatattatagaccactaaatgtcgagtgtatttcagctttcggttttagccccattttttgccggtttctttcactagcttgtctcccttctatggccgcatttattgtcattattattttgataccgttttttaagtttccttgtgtttgtctgcccagttttcgtgctatctgcccgtagacttatgccaacaaaagccaacaataaaaaatacatacactctgttttttgcttttaatttcgttttttttttctgcccgcctgtccagtggagccacggacagctgcattaaaaagttgccaaagaaaattgtttgcattgcaatttttgcctcgttttattttccaactctctttttagcaggttcgttgttttctttctatttctttctgctgtgttttgttatcaacgctgggcagagtaaaaatatcaaaacaaaatgaaaatacacccaacttaactatatactttttgtgtgtgctccactaccgactgaccaggacccacaaaaggttgtccggtctgttgcaactcggctaagtccttccaactgggtcattgttctccgccctggcttaccgactcaagcaaaagtaatgccaaatctgaacgctgcgaattcaatttggtatgaaaatatatgcatagaaggaaaacaattgaaagtcgtttgaattggcgtttgagctcaaacaaaatagtttcacaagaagcgaagacacctcctggaactccgttcgtattcgacaaaaatcttcgtcgtgaagagaaaaatatcctgagaggacttaagttaaagtaaaagtgaagtaaatcattttccgaagcattcattgatttccattgatggttttgaatcagtattatagtatcagtattagtaacagtatcagtattattatcatggatatgaaagctttgcaacagttgattttttaattgataatttcgcttacaaaaatttaataaatataaaaataaaaatatatttcccaactacatatttaaattaaaaatacattaaaatactgttttcgattgtaagagattttaaagttaatttttttccattattttgatcctcataaaggccgatttaaatgcctcaatcgctgggctgtaccgcacacctgtcaggtattccttggagcaacaccccacaactcagtcccagttgtttgataatttcttttataatttttgcaatttctcccccatccactgccagtgcatttcttgtgtcccttcgccgatttttgctttgttgtttcgtttcattccgttccggcttttcagaacttaattaaatgttgtcacagcgcacactttgtagtcccgctgcctggacctttgcccctatgccacctttctctgccgccgagtcctgcgagtcctggggatcctggcgaatcctggagagcgtgggcagcatggagagcccggagctagctgtttgtgacagcaattcgaagtgtaaatgaaataatagctgctaaaaaccaatttggcgtaaattataaaagcttaatggctattatgaatggcgaacagacgccatactcctttgttcgcgctttggctaacctttgactgacaattaatttgcttgttctcttgcagttccgtcgagctgatcgccctgctggctatttcgtgcaccttcttcctgttcatgcacaccaacaaactgaacagtcgcctcaaggagatggaggtgaagctgcagccatcggagttttcggccctcggtctaacgggcaaccacatcagcggacacgatgcgggcagtaagtcactatccccaagtttcagatacagatacccacttcccccggctaccactatctcacgtgcatatctaacgcaccgcactgcacctcatctcatctcatcttgacgcatctcatctcatcctatccatcttccatcgcggaacaatggacacaaggccaggctgtgggccagaagttgcgctcgattgcattcgcgttgcgttgcctatcggaacagggcatcagatttggacaggaagctatgtgcgagaagtgataaaaacggtggatagaaaacagggtacgattggtggatattagttgaatgattttggaagtgagcatactcaaagacatggtattatatataataacatctactatagtcatttaaatcataagttcataattaaaatacagatattatctaaaaacatgcttactaagaaccactttcttatagaatatgtattaccaaaatggcctaatccacccttccaatctacaaagtaccttattcgattgccagatacgcccaattgatttttaattaccacattgacccaagcctcaggcaatgaaaaagatataaaaataacagattccgcggggctaagacctttgttaatattttgcgttggcggtagccataaattagcggatcgttttagtccaaattagagctcgtgaattaattatgttctattttccaaatgtagcgaaaagggtaaatacaaatatgtgagaatttacacatttggcactaataaactggccatttaaaataaaacagtaaatggtcgatgcatacattctacaaatatgtgcgatgcacattttaattacaatgtgcatgagtttgtttatgatgcatatatttgtatatgggggagagtccttatttgccaatactttagtgcattaataaattatttaggagcgacaggttcgctggggaaaaggttagaggcattatcagcgtgactgggaatttaaccttttgaccagtgttaagctcgtttttgtttttgtggccgagataaataatgaaacatattgattgtaatattattaattcaattagtaaacaaagataatgtgaaaaggaaatcgaggattaattgccgtgaaatacctaattacgagtctctttgtgtttttatttaaaactaaagcggctatgttaggtatacatatgtgagataataaaaataataaagtataaatcaataatttataatattaatatctacgcgtatgcttagtttccccttgcttactttgcgcttctttctgagtggtaaacatttccaaacaattcgaaatgctcccattgagatctcattaccatcagccacaaatgccatcacttgacacctttttggtccacaacaatgtttgccaaacatacttcgaattccaaaaaggaaaccgcatttgagtgcataggcaataaaatatgaaaccggctgcaatgaaatgaaaataagcgtttgtggtggtccccacttgagatgctgccactccatatctatatagccccaaattaggccgctgcaaccgactaataatgctgtcattaggcaaccgcggaacaatataaaatcgaatcaagctccctggaaatgcaaaaccctaatttccatgccggaagtttggcgggcgctcggtccgtgcaattgcacttgcaaattaagcaaagttgccccaacatcgcggctccaacggcagctgtgccaagtgatctccactcggttgcttgattttcatggtgaaaacgcgagttgaaggggctggagaagaaaacagaagacttcacgcctaactgcggtgattgccaaacaacaacagaatgagaaagcctgtctccgacaccgaaatctgaataccctgacaaacaagcggtttgttagctgcttaatttctgctagcaccagtgattttgtaaaagtttagagcaattaaagtcaatgtttctgtttctgaaaaccttcatttggtacttattataagcaagatattaattttaagaatcagatataataacagatagctatttccttttcaataataacgcaatataaatgaatattttttgcgggctgaaaagatctatctaattataagtaaatctcaaataccctcttcgagtgaatttgtagctaaaattccgcaggccaagtcgattttccactgtgccgtgagtgatgatgatgatgatgatgatgtgcaagaggataaagttgggccagatgctccacggaccatccggagtgcacttgtgggttgtgtttgcggcacagctggtggcatattcattgttgccgctgttgcatttgcgtctgcgcacgcgtcaattgccgacagttacaaattgtccccggttagctcctctcagaaaaacaaaaacccggctaatggtaaaaaaaagtgcagcaaatagctgagaaaaaagaaaagaaaatattttggaaaatcatggacaagtgtgcagcaccttgtgacggtgatggagttttttcactgggctaaaaacaaaacaaaataaacagtgtgaaatgctggaaaaaaggtttaccttccagtgagccagtgctcatccattcataaatatttcatttaattgactcacacgacttggggtcgagtacgagataaagatacgaatatgacgacgtactcaacatgctcgtttaagccatcatgatgatgatgacaccgtttgttgccgtcggcagctgtcgattttttctgtctgcccgacgttttgtacttatttttatacgtacatatatatatttggctggcaacattgaacttgacttaacttaattaacggtgccgaacgatgcaagccatgttgtctggcggcttgttaatttcgtggtctaacgcgcaaatggaaatgagcaggggaaaatcgaaagattcttgctaattttagaaaagcgtgaatttaaggcgagtgggctaggcgtctggtgatttattagagaaatttagcagttttcaaaaatattaaacaaatagctttatgtattatgcacagccagtgcattgcaagttttattattatcagcatattattatatctatgattcatttaactttttaacatgcaataaatttacaaaaccacgtttcttgaagctaaaagattaattgttatacgtgaacgtacagcactcttttcaatgtttttggaagttgatatatcgtactgagaaatataaataaatcttgacatcaaacaatttttcaaaatccattattttcccttctcccaaacaaatcggtcggatctctgtacttatcaacagcagccctcgacctaatagatcaaccgtctttagaacatttcggcactctacctgtcacacgccattgtctcggtagtaagaaaccaacgcaacaattgtttgcaccttcaactggcacgctaacaacaatcttggcaaaaatgtgcaatgccaactttgcccctggctaaaatgcatagcaaaccagttctgtgcgctcactaccgagccgggcagctttattttcaattagacagtcgcaagacacgaactaagccacaaacccaaacacccataaaaatagcaccaatggctatgtgtggtggtacctcaacctacagagagagaaagtattccaaaatcatattatcatcatatcaaatgaagtttgaaactatccccgaaaagtacgaaagaatgcattcttaagtgcatctaacatataagttatgcttgttataatttagagacttgcccaatgatttatctcagttctagagacttttttttcgactgtgtaaagttcactgggtagccaaaataaatgttttggagctggaaaatgcaggcaagcaagcaatttgtgttagcaggggcggtttcaaaaggctcggataattttagagtcggatcttaagattgggtgcgatggggagactgagaagtgaaacataacattaacctaatgaatgaggtcttaggtgggtctgcctgaaaatggccgatacatatgtatatctatataaggaagtttcgggtagaatacggaaaagtttaattctcgattacctatttggtttgagcttttaagtagtaggtatacctaattataagttattagacacctaatgaacttgatctaatatgctaagagtagggaaagactattgaattctgtgcaacaagcctagatagaactattcttaagagatgaaagtctaagcacatctattttatatttttcaaaatttatttcctcagttatttcttaccacatgatagagtgtgagcagacccaaccctataataaatgcacacgtttgttcttaaatgccacaacttaataaacagcgacatatgctacgtggttcaccttcgactcattcgcagttcaaatggccaataaccggagctaggccgagattgaaggttgcattagaacagcagagaaatgcgaagtcgaatccaatcagagcaaatcgagaggcgaactggatgggatgtgacccaatttgaaaccgcacgaaacgaaaacacacaaaactcgcaccagaatccagctgaaaagtgacaaataaaaaggcaggggagctgacttctattttaaggcttcgaccgcaaaatgtgtttcactcttggttcagtgactttgttgtcggtggttttttgtgcagcaagcgggctgaaaccagttggtgcaacactttcattcattcgcattttccaacgaaactgcccaattgaccaaatacaacggatctggtttaaaggcaattggactggatatgcacagacttccttgtccagttcgcggcgaattatgaaatacatacttggccataaaaaccggagacctggccaaaacaaaagtggtgcgaccgaaccatagcacacttgaaaatcaagatgttttccgcatctcctgtccatctgatcaattgcagtcatttgccagccggactcaaattgaatgcactgcctacgacttcgcaatggacaaatgcctggcatcagcattttaattgaccacacgacacgcagaaaactacatttgcatgcgtttgctgccacttttggggaagggaagaaatggggaggcctttcgaatccgccggagatgatccctatcgcatcccatgagagccggcaaagtgaaaggaatcatcatgagcttgcatatttattgcactcgtctttatttatttatcatagctgtaaatggctttaacttcgacttgggcctcagcatccatcccattcgaatattgcataaacacttgcgggcccaaatcaaaagtaaaagtactcggtctgcttccttttttggcgccacattttaaggtcaccgagtatttcactttaattggggtcgagatgataactgatattagctattaaggcggtgttagacgataatgggaaaatcgtgaggtcattcaaaatggtgagttttgagttgacgatcgtagagcgaagttggcctgtgcttcattatgatatcgtaaagcaaagaaatttattagaattattaccaccttttaatacaactttttctcatctttcagagcacgatgacatcaacaccctgcacggcacctaccaatatctgaagagcactggccaggtaagctcagttccataaacctggtatatcctgcattttaccatatcgccgtaaacattgttgcatacattattggtggttcataaagcggaaaagagaaaccatcgatgaatgtccatcaacggtagcttcagctccttggtgattgatattgcatttggcctacagcattcagcatacatttagcatttagcatttgcctgccaagaaaacctcatcagttgtccatctctctccctgtctctgtctcgttcatgcgctgtctttgtcggactcattgtgtcaggcgaggattgcataatatctgtagctttctcctgttgagacctcacccacccacccacatacatacaatacaacacaaacaacaccccaccacacacactagaattaaacagattagccaattagccatttggtagaactatcagctatccctatatctacaactatacctattccgatcctagttagctctacactatcctatacagaatctatcctaacactaaccgaactacgaaaattacacttcgactctgtcttcgaattttgtcagtgcagtcctattattatttttttttttcgatgttggttgactcgttagctagttgcgacatagagcgatagaaaatcgatttataaagattaaaaagtaaaggtaagtgtccgttgcggggaggcttagtatttatgcccacatatccagctgtgctggagcaacttcttgcgaaatttctaagatgatgggatgcctccaggtgccttgtgtgttgcttgagtaaaattgaacaaaaaaataaataaaaacgcaaccgcttaaagtctatttttataaaagtttacatgttgtcctacttgtgtttgactcgtttatgtgcgtgtaactctgtgtctgtgctccaaacaccaagcaacccgccacctgaaaactactccaactagcactcccaacttttgcaatccggcagctaaaacacctgaccaccgcccagctaaacaacactcctcgcgcccaagtggacacgctgttcttcaatcggatcaccaagaccggcagcgagaagatgatggagttgctcaagatcctgggcaagcgccacaactttgaggcgcgtcgcgatgttgagggattctacgaagtagtcatcatgcatgacgccttcgccaaaaactttatccgcaccgaggtactcaactgcaccaaagccaatagctatacgaagcacgtagccttcctggacttcgatctactggacgaaccctggcccatatacatcaatatggtgcgagatcccatcgagcggctggtcagctggttctactatgtccgcgccccctggcatttcgccgagagaaaggaaatgttcggggatgccatcgtactgcctagcatagattggctcaggaaggactttaaccgctgcatcgaggaacgcgatcccgagtgtgtgtacgagcaaatggaaatgggcaatctgggcgatcataggcggcagtcactgtatctctgcggtcagaacatggcggtgtgcatgtgagtagtcgttctaggcgaggtgggggttgaggctagtggagaggtttttcgaaaagtgttgactgaaagctatataaatatataggtgtcaaaataatatcttcgataatacatgaggatcttttccaacccaacatcagcaaagttcttttggcaaatgtcaatgattttctataagtccaagtcgaaggtacgaattttatagctagtttccacatttggatcaaccgctcctttggctaaaaccccacccgatatctgaagaagaaagaccgagaactgactgaaacccaaccaactgcaggcccttcaactcccatgaggccatgcagcgggccaagaagaatgtggaggagcactacgcagtggtgggaacctgggaggatacgaacaccacgttgtcggttctcgagggttatataccacggttcttcagtggggccaaggaccagtactacgcgttgaggaaaagtttgggaaactataacaggaatacctacagacccagtctcagtgacaaggcaagggccgtactcagccagaacctcacccgggaaatcgagttgtatcagttcgtcaggcaccggctgtacaagcagtatatagccctaaagctcgaagaagatcccaagctgtgggattagcagaaatttagtcactaaggattcgttgaagagtaataaaactatgctaactttcgttctgcttcgatcttttcgatctttccggtttatttctaacccttggtgaactttcgattgggctagcttcgttagatttcgcacagatttagtcttacgcagcgtatcatccatgcagaaggtcggatataatgttcacgatcgccggagcagcgaagagcagctgcgaactccaacggcacatggacaccatcatgatcaccactcccatcaccatcatatgcatcagcaggaaaagatcgatggccacaaacacaaggcatcacatgacaaacaactggctgttcccgacaacaagcataaggaagatgaggtccactacgaagacgatgaggatgaagtcgaggaaaatgacgatgacttggccaatgatgtgggaaccactgacagcgaaggcttcaacttcaaagccgatctcctgaacaacaccaagtacgccgaggtggactttgtcttcttcaatcgagtgccgaaagtgggcagtcaatcgctgatggagctgatggctcgcctgggcaagatcaatggcttcacccatgctcggaataagggcagtgcccacgaaacgatcgtgatgaacaagcagcggcagaatgatcttatagccgatctcctgacccgaccaaagccacacatatatagccagcacatagcctacataaactttactcgcttccacttgcccaagcccatttatatcaacttgattcgcgatccgatcgatcgaatcatcagctggcactattacattagggctccgtggtactatcgcgatatgcaggccaaattgggggagaacgcaattcccatgccctcggaagagttcatgaacctcgatctggacacctgtgtgcggaatcacgatccccactgcacgttcacccaaatgcagatcaagaatccggtgggcgatcaccggcgacagacgctcttcttctgcggcatgaatcaaaagctgtgcatgtaagtaggaagtagatagggcagttagtacgatcgtaacccataactttggataggcccttcaattcggaggcggccatgcaaaaggccaagaggacagtggagacggagtacgctgttgttggcacgtgggaggatacgaatataacgctctccgttttggaggcatatataccgcgttatttccgcaatgccaaagtggcctactactgtaagagtttcacgttgtaagttgaggatatttctgaatctgcctaattttttcagtgggaaaagaccgattgtcacgagtgaatcgcaacaatgtcactcgaatcgtcagcgatgaaactagacttattctgagaaaaaatctcaccaacgagatcgagttttatgagttttgcaaacagcgtttgtatcttcagtatgccgccctaagtcatggaaagcgattcggggaggatgactatcttctggtgcccgaacagcaaaacgaatacaatgaggactattagtaaggatacctttgataggaacaaagggaataagtgataagccagtatgaaatgtataagaaaaccgagaaaactcaggactgctagaacacattaaaataaatgaagctgaacaattacaagtatcttttaacactttaaacaactcttgagcaactcgcactcgctttaatcgaaatgatccctactgttttatagtttgcctttctgagaaggcattctgtgactaaaattcctccgtgtgagcacagtgtttgatgctttctgtgtaacttcaatccggtgaagagctttttgtgtgtcttcatttgttctgaaagtatctgtgggtctgtcttttgttggatgtgcttgctacaactatgtcctgaacttttgcagctgtggcgattaaatccgaaatttctaaataacaccaagtttcactttcgcgatattatcttctacaatcgagttcccaagacgggcagtgaaacgctgatcgagttgatgattcaacttggaaaaaagaacgactttcagaacgaaaggtctccgttttcgaaacccactggaatgtactgggatgtgaagcggcaaaagcaggaagccacgcgcatcctggagttgcaggaggaaccagcctttgtctatgtagagcacatgaactacatgaacattcgcccctttcacctaccccaaccaatctacatcaacatggtaggagaaaaatcgcgaccctagattgtttactcatataagccttgatttatcagattcgagaccccgtagaacgagtgatcagctggttctactataaacgcactccctggaactctgtcaaaatgtacaaggtgacggggaaatttcagaatcgcacccactacaccaagaactttgaggaatgcgtccttacacacgatccggaatgtcgatatgactacggacttctgttcaaggacgattctgccgatcacaagcgtcagagcctgttcttctgcggacactcccccatttgcgagtaggtagtttaatattcggatgattcccagtcttaacggtatggtttcttcatccaagacccttcaatacaccggcggcaattgcgagggccaagcaaaacgtagagcgagatttctcagtggttggttcctgggaggatacgaatgtcactttgacagtgctcgagcactatataccgcgattcttcaagggcactatggagctgtactatggtaatgacccttaaagcttcctttctagaggtgctaaaaaaaatacctctacattcccatagaacccaatatcggtctggcctttaagaaggcgaatatcaacccctggaagccgaaaattagcgagcgaatcaagcaaataatgcgggctaacttcactcaggaatacgaattttattacttttgcaagcagcgcttgtatcgccaatactttgcaataaataagcaattgcacttctgaatttctgtgtgctcctttcgtttttctattaacaattctgtagttaattttctgtcaagtcattggttttgatacattttgtggaaggaagcgcacttatttctctccccactttcaagctggaaaatttggagcccgcccatttgaataatacccccaaagcggagcgtgatttcatattctacaatcgcctggaaaagacaggaagtcagtcaatgacgcgactcatcaagcagctgggtgatcgtcttggatttgacacctacagaaatatcgtgcgtccctcgaggtcgattaccgaatccgaggaggatgagaaggatctggtggagcagctcttcgagctgggggaacacgcggtctacgtggagcacgccaattgggtcaacttcacacagcacgacagtccgcgtcccatctacatcaacatggttcgccatcccattcagaaggtgattagtgcctactactaccaacgccatccgctgatcttcgcccagagcttgttgcgcaatcccaataagccgatgcagaccaagaaattcttcgacaccaacttcaatgattgcgtcagaaagcgggtgcgcccgcattgtgttttcgacgcacacaatcccttcaacggcgattggaggaggttctctctacatctttgtggcaactcggaaatttgcacgtaggtcctagtccactcaaaacggaaatcaatctactatcgcaagtccaagttagaaagcaataggttacataatcatattttaaagtcaataattcaatcaattcgttctgtacaattctgttctccttgtagaagaacttgtacctatttctttaaaacttggtcgttgattagatatatactcgaaatgttctcgcatataaggtattcttattcaggcatttcaactcggaaactacaacgcaaatcgccaaaatgaatgtggaacgggagtacgccgttgtgggtagttgggaggacacaaatgtgacattggccgtgttagaagcctacataccgcggttttttaccgacgccacaaaagtctactacagtatgtcaatgccttcaattcgggcgaactcaacgcggctaacgttaaacttacctttctaggcaatactgaaaattttacgataaacaatgtttcgcatgacactcatctggataaggatgtggaggagtatctgaagagcagtttctccttcgaaatcgaactatatctgtttatcaagcagcgactctacaaacagtatatagcagtccataagaacgaattttagtcgaattagtactaagtaccacgaggtttacaaacatgaaatgaatacagggttttgccaaatgatctatacacctaagttgcaactcgagtctttttcccttcctttgctactaatcatttcggatggcttggttgcttgaattcactctccactccgccacccatatcagaaattaattccggggtgaccaacgacctttgcagatccttcagcttagtcctgataagctgaacaatacccccaaggccgagattgacgtgttgtttttcaatcgggttccgaagacaggaagtatgcagctgattgagcttatgaggcagctgggaaaggtccatgattacgatgtggaaaaggatccccaacaggggggcgttattcccatcctggagaccgccgagcagagtgacttgatcgataatattgttaaccttgacgacggcaccgtgttcgccagccacgtgaacttcctcaacttcaccaagcacgagcagcccagaccgatttacatcaacatggttcgggatcccgtggagagggttatcagctggtactactacatccgtgctccgtgggtctttgttcccggcaggagacgcaataatcgagaaatgcccaaccccaaatgggttaacaccgaattcgatcaatgcgtcacgagtggcgaaaaggtgtgcacctacatcgagaattctctgctggaacatgtgggcgatcatcggcgacaaaccttgttcttctgcggtcacaatgagttccagtgcacgtgagttagggttgcatagccgcattttctctcagtgatacctcaaacccctctgtagaccgttcaatgcccgtctgccccttcaattggccaaaatgaatgtggaacgggagtactcagtggtgggaacctgggagcacacgaatgaaacgcttgccgttttagaggcttacgtgcctcgctattttgcagatgcctccaaaatgtattactgtaagtctcggtgggaattgtgttgggagaagaatatcctcaggatcaagaaagacttggtaatcaacgtattccagagatgggtggaatacatagaaaaaccgctacattcttgatttcggatgttctctcttcttaactttctttagaattggaaagatttcagacaaatacttatattacagcgggcttacatgcggataagcaaaatgttaacccaatgaagccgcacatttcgcaggatattttagatatggttcgtcggaatttcacgcgcgaaatcgaattttatcagttttgtcgccagcggttgcacaaacagtacttggccctcaaactgaacgatctcaagcgagtggacaagtcattggccatgttaagtgaggccaaagaaatggccatcaacaactagtctacgtagatatattacaaaataaattaataaagatgagaggataactaaactgagaatcatatcactcttcaaatccttcatctttaatttaaaaaaaaattctttgaatgggaacactttccgggacgactagtataagatctattttgatattgatactgaggttaattcttcagaaacttgagtaaaatttgtttcatgaagctaaagcccttcttttaatctataactatcgcttttaaccaaatcaacaaagcttagctataatttctttctcttcgatccttcgcactctacggaatatatttttaatcgcttgaaagtctggaagaattaaaaaggtcgctgcttactaaccaggattagaagcactccatgttatagaatacctatcatctttagcttcagcaactgagcgcaaatcgcctcaacaacacaaaaaacgcggaaatcgaagtgctgttttttaatcgcgccgccaaagtcggaagtgaatctatgctggagctctttatggcgctggaaaagtacaacgacgatctaacgctggaaagacgtggtctccataccagaaccgttcggcaaatggacaaaaagcagagacgtgagtctgctgaatttgtagccgatctggaggagggcaccatgtacattgagcacatcaattggctagactttgatgaattcgacctacccaagccgatttacatcaatttggtgcgcgatccggtggagagggtcataagttggttcttttacgctcggagttcctacaagaatgccatcgagtaccgaaagaggcccaaccaaaaaataaaacccgaatcctggtataagaagaacttcaatgattgtgtaaggagtggagatcccgagtgccaatacgtgccccacacggtcaaggactcgattgccaattttaagaggcagtccttattttattgcggtcatcacgatgattgcctgtaagtagataggagcaatgaggtttcccccaacaacatggaccaagctaatagtgatcttttagaccttttaactcaccaactgccgtgcaaatggcgaaggagcatgtggaaagggattatgctgttgtgggcagctgggaggacacgaatataaccctgactgttctcgaaaactatattccacgattctttcgcggtgcgaagcttatgtatgaaagtaggtcccttatcatcaatttcctgtccagcgaaattacattgtattctcaatccttaaaaacagtgcacaatagcaagatcaccaatcgaaacaagaacaaacgcaagccgttcgtagagcccgaggtcaaggaaatgattcgcaagaactttactaacgagtacgagttttactacttctgcaagcagcgtttgtacaaacagtatttggccctcaatctgaaggagttggaggtgcatggtctgttaaactagttggtttggagtccgaccttagatcttagtaggtgatatatgcgcgaacaaatcttccattcaataaacagtagtcagtaaacccgtagactagacccacactttttctttacacgttgaacccatctctgtgtcttatcgtttgttgtgtgccttaaaaccccttccatgaagccactaaaacccttatcccataccccctcccccaaacagttaggtagcctaacacctagccaactgaacaacacagccaaggccgaaatggatcgcctctttttcacgagatgcgccaaagtgggcagcgaatcgcttacggagtttatggagcatctgcagaaaattaacaacttccaagtggataagtacggaattatgaagaaatcgaaaaggcaactgaaaccacgtgctcaggccgagacagctggttatatctataacctggacgaaggatctgtctacatagagcacgtgccttggatcgatttcaacgagtacaatctacccaagcccatctttatcaacctggttcgtgaccccgtggagcgcatgataagctggtattactacgtcaggaactcctatcgaaatgccatattctaccgcaacaatcccctggctcctctaaagcccacggcctggttcaaaaagagttacaacgactgtgtaagaagtggtgaccccgagtgccagtatgttccattggcagttcgcgatgtggagggaaacttcaaaaggcagacattattcttctgcggtcacgatcaggactgtttgtgagtcccgtagaagcggtcaatttttcactttttcaagagtcgtcctcctaatcctaacgcttttccagacctttcaattctcccctggctgttcagatagccaaacgtagggtcgaaacggaatacgcagtggtggggacttgggaagagaccaatataactctaaccgttttggagcactatataccccgttatttcgctagagctaaaatgatctttaactgtaagactccaatcaaagacaactcaggcctaccattttaagaatttcctttccagtgtaccaaaagtctctacagaatcgcaatcgcaataacagaaagcctcacgttgatgcagatgtcagggccatggtcaggcggaatttcacccatgagtacgacttttactacttctgcaaacagcgtctttatatgcagtatatagcccttaagcgaactgaattggaacgactgaatttttcctgaattcgtagactgaactttagattttgacatagtttttctgtagctcgttaataaagtactcaatagtaatgttactaacatgtagaaaccatttaggcattacttgtgaaaccctaagaccaatcccatctatacaaatcgcagcttgcttcgctaagcagtaaaaagctgaacaacactcggcactccaggctggaggtgatcttctttaatcgtggagccaaagttggaagtgaagctctaatggaactcacccaaaccatggctccctacaataacatgacagtggttaccaaaggaccaatggatattaagtcccgcacccgttctcctaaagagcaaatgatacaggctatttgggtgaccgaactggagccagggaccatatacatagagcattgcaattggttggatttccgcagatatcagctaccaagacccatctacattaacttggttcgcgatcctgtggagcggatgatcagttggtattactacgttcgtagtggatatcgcaatgccatccaccatcgacgatttcccaacgcaacaattaagtcggagaagtggttcaaaaaaagctacaacgattgtgttcgtagtggtgaccccgagtgtcagtacgtgcctggaagcattaaagatccggagggtaattataaaagacaaaccctgttcttctgcggtcacagcagggagtgtctgtaagttgatttcgatattattgtttttgtctcggaatggtgatgtggagagtacttttcagacccttcgactctcaacgcgccattcaacttgccaaattgaacgtggagcgcgattatgcagttgtaggaacttgggaggagactaacataactctgacggtattcgaagcttacataccgcggttcttcaagggagtcaggaatatctttgagtgtaggtttcattacgaaaggtttaaaaatgtttcagggactacttgaacacttttgggtattatttgcgcctgggaaaatactgtatcttagttagttacaccatttacactccgttcttcatatcaatcatttgtgttttgtcttggacattgaatgcatttaatgcaaaacccctgaacttcccagctcggacgggtgaaccccatgcatctgaacaatactcgattcgcgggttcggaaactgtgatcttcaatcgaccaacccgagtagacagcgagcaaatggtcccacttttcaggcaattggccgccatgaatgacataaatgtggttcttaacggacctgtcaggacgatgaatagaactcgaaccgaaaaggaggaactaaccgaagcggagtggaccatcgaactggagaaaggatcgatctatatggcgcactccaattggttggactttgctagcttcggattcaagaaacccatctatatttcgctggtcaaggatccgatagaccggatgattacagatttctataagcgaaggtctcgggtgaagagagctatatataggcgcatgtatcctggtcgtcgggagcgacccgacgagtggtaccaactgagtttcaatgagtgtgtgagaaatagaagtcctgagtgtctctttgtgcagcatgcagtggcagattatattcaagactttaaaagacagaccctttacttttgcggcaatgcggccgattgtctgtgagtaccctgagacctcgttgaataatccttaaagtatacccctctgtagaccctttaattcccaccatgctacgcaagtagcaaaacgtagagtggagaaggagtactccgtggtgggtacttgggaagagagaaatataacccttactgtgctggagaaatacgttccccgattcttcaatcacgctcgatttctatataagtgtaggtaatctcaggggcttgactcgaaagtgttcaggtatcatcgagaaagcatcgagagtcatggaattatctctttcagtgcacagcaaaagcatccgaaatcggaatcgaaataatcgcaagccccacatagatgcggatgtcagggagatggtaagacgaaactttaccaacgaatatgagttctactacttctgcaagcagcgtttgtacaagcaatatttggcccttcaactcgagaacaatcttcactaaatggtcttgatcacaatacaccaaataaataaactgaacttagttaagtaagaagtgcgtttttataaacaagaataaaccaatccttaggaactgttctttttgaattgagctcttttattcgtatagggtcgtacaaaaagtttgccttatttattcctattttacctcatttgtcccgaatagttttccattgccccaaatgcatatcaaacaccaaggatttgaaggtaaatttgatgatacacttaaattgaaccctatttaccttgatattatttctaataactttctttacccctaatcagatgtcctctcttaacgtgcgggatctgaacaatacacgcaaggcacaaatggaattggtatttttcaatagggttcccaaagttggaagtcagacgtttatggagctccttcgtcgactttccgagcgcaataattttcagttccaccgcgatgcagtccagaaagtggaaacaatccgcttggcggaggatcagcagcaggaaatggccgaggtgattagtgaacttccggaaccctcggtcttcatcaagcatgtgtgcttcaccaacttcaccaaattcaacctgcccagaccaatttacctaaatgtggtccgcgatcccgtagagcgagtgatcagttggttctactacgtgagagctccgtggtacttcgtagagcgcaaagcagctttcccggatctaccattgccacatcccgcttggcttaaaaaggatttcgaaacgtgtgtccttaatggcgatcaggagtgcacctatactcaaggagttaccgtggagggaatcggcgatcatcgcaggcagagcttattcttctgcggtcacgactacgaatgcacgtacgtttttttaacattttccttaaattaataatattctaatatgagaagagatttctaaacatatttatgtgcttaaatttctagacccttcaacacagtgggtgccctggaacgagccaagtttgccgtagaacaacagtacgcggtggttggagtgctggaggatctgaacaccacgctctcagtacttgaaaaatatgtaccacggttctttgagggcgttcgagatatttatgcaagtaagttgatagtaatgaagctcagcgtcacctacattgaagtcgaatctaaaaatatttgttcaatgcttttgttttcattttacacttcaatgtagtacaaagtattaagttataaagccacttgtgctctacgtatacaatgttgtatcacacttacaattgatatcgttctgtgaacttggcaaaactgagctacaaccatcttaatggtacacaattcctgactcatgtatttgtttaaaattcccattttagccagcgcagagtacttgacgaagatcaacaagaacaacttcaagccgccggtcagcgagcatgtgaaggacatagtgcgtcggaactttacgaacgagattgagttctatcaattttgccgccagagactccacaaacaatatctggctgcccacttaccacagcggattataacagactcagcacatctgcccggcctgattggcaattgaactgtactcttcacaaatcacgaacaaattgtaggaacaaatatgataaacaaaatcgtactcgaaacctgtagtcagctaagttccccattattgttttctcttgtgtatatttcaaagcggttatcaaaaatatgacaaatgcatcttatatttatatagattagtaagtaccttatgttataaagacctgagtttgaattgtgatgtcttcaagtgaactgttgaaatttttggtttagtattttagttttaagtcgattatgataaacactgtataaactaataaatgaatattttaagaacatattgtctttccactgatttcacagttttaactataaatggaaacgaaaaataaaaataaagaacattaaataactaaaaaaaactcaacgactatgctggataacaaaatgtaaatggcaataagaatggccgcactacgaacgcaaccgttggagtatttgtacatctttttatgaaatatagtttattaaatataagaaaacgaagcgaatggaaacaataacatacgtttgtttgttgacttaacatgaactattctctggtggatgtttctactctaacttaaagcacttgttgactatcgtcgggcttacacatcgggtaattggacgcttcttgctggaaataaaaataattaactcgtgatctatagttatcggagtaaacatatgtataccgcttattgccaaagaaagctaactcccttgcggattttataagctcccaaggtccaggtatgaccctgttcacccgtatgatgtccgatccggaacagtcgttgctggggacttctacgagtcgatgaggttcttttacatatctcgatataggatccttttcaatgacatttaaaacatactcgtcggtcaattccagccactttggatcctttgagcgaatacttagtagttctggagcaatacgttgtactacactgacaaaaataacatccatggcacaagttagcggatattgataggcctttacgtggagcagcgatcgcgcctcgaacaagcgatatacccgatgatagtcagcataacgatactctatgcgttgaccatcaggtgatatgcgagcctgaagaaatacatcatcaaagtccatttccgcagagctgagtattttcaggcgcttgttatcacgccgcagataatcccatttatccacatccaatccgcagcgacgattatgcacaatatcaaagatgtaggtatgtcccagcatggggaacggcagattctcactggatcccaatatcaaagcctttatca

SEQ ID NO: 42131 - DNA, 1699 bp, DROSOPHILA
ccgagctctacggacgtctatatctctaagtcttcgaatcgtgaatcggaactcaagtgaacccaagtgccgaccggaaaattctttcggccaagaaaggtcttcgagaactaagatctcaagcgattgtgttttttgtgtaattgacattggatgtctctgaacgccgagcgatcgtacaaaatgaaactgcgcgatgtggaaaatgccttcaaataccggcgcataccgtatcccaagcgttccgtcgagctgatcgccctgctggctatttcgtgcaccttcttcctgttcatgcacaccaacaaactgaacagtcgcctcaaggagatggaggtgaagctgcagccatcggagttttcggccctcggtctaacgggcaaccacatcagcggacacgatgcgggcaagcacgatgacatcaacaccctgcacggcacctaccaatatctgaagagcactggccagatgtcctctcttaacgtgcgggatctgaacaatacacgcaaggcacaaatggaattggtatttttcaatagggttcccaaagttggaagtcagacgtttatggagctccttcgtcgactttccgagcgcaataattttcagttccaccgcgatgcagtccagaaagtggaaacaatccgcttggcggaggatcagcagcaggaaatggccgaggtgattagtgaacttccggaaccctcggtcttcatcaagcatgtgtgcttcaccaacttcaccaaattcaacctgcccagaccaatttacctaaatgtggtccgcgatcccgtagagcgagtgatcagttggttctactacgtgagagctccgtggtacttcgtagagcgcaaagcagctttcccggatctaccattgccacatcccgcttggcttaaaaaggatttcgaaacgtgtgtccttaatggcgatcaggagtgcacctatactcaaggagttaccgtggagggaatcggcgatcatcgcaggcagagcttattcttctgcggtcacgactacgaatgcacacccttcaacacagtgggtgccctggaacgagccaagtttgccgtagaacaacagtacgcggtggttggagtgctggaggatctgaacaccacgctctcagtacttgaaaaatatgtaccacggttctttgagggcgttcgagatatttatgcaaccagcgcagagtacttgacgaagatcaacaagaacaacttcaagccgccggtcagcgagcatgtgaaggacatagtgcgtcggaactttacgaacgagattgagttctatcaattttgccgccagagactccacaaacaatatctggctgcccacttaccacagcggattataacagactcagcacatctgcccggcctgattggcaattgaactgtactcttcacaaatcacgaacaaattgtaggaacaaatatgataaacaaaatcgtactcgaaacctgtagtcagctaagttccccattattgttttctcttgtgtatatttcaaagcggttatcaaaaatatgacaaatgcatcttatatttatatagattagtaagtaccttatgttataaagacctgagtttgaattgtgatgtcttcaagtgaactgttgaaatttttggtttagtattttagttttaagtcgattatgataaacactgtataaactaataaatgaatattttaaga

SEQ ID NO: 42132 - protein, 403 aa, DROSOPHILA
MKLRDVENAFKYRRIPYPKRSVELIALLAISCTFFLFMHTNKLNSRLKEMEVKLQPSEFSALGLTGNHISGHDAGKHDDINTLHGTYQYLKSTGQMSSLNVRDLNNTRKAQMELVFFNRVPKVGSQTFMELLRRLSERNNFQFHRDAVQKVETIRLAEDQQQEMAEVISELPEPSVFIKHVCFTNFTKFNLPRPIYLNVVRDPVERVISWFYYVRAPWYFVERKAAFPDLPLPHPAWLKKDFETCVLNGDQECTYTQGVTVEGIGDHRRQSLFFCGHDYECTPFNTVGALERAKFAVEQQYAVVGVLEDLNTTLSVLEKYVPRFFEGVRDIYATSAEYLTKINKNNFKPPVSEHVKDIVRRNFTNEIEFYQFCRQRLHKQYLAAHLPQRIITDSAHLPGLIGN

SEQ ID NO: 42133 - DNA, 6264 bp, DROSOPHILA
acacgaggaatacaagaatctggtggactacatgctcggcagcttcatggaggagatgcagatatcaccggagcagttcgaaatggcctgtctggagggtaggcagcagggtcagggcgagaatccctttcatttccaccaggtgcttttccagcaggtatgtgcggtcgcacgatctcacacagtcgtgtctccaagatgtcatctttcagatatgggccgccaacgatctgaagatattcatacggatgatgacgcaacgcaacgtggagcttcagctgcaggccctggatctcatagagaaaaatcaattagcccctggtggcgtcgaggagggggatgaccgcagtgcggacgctagctcggatccagggtgggtaatgatgtcttatgcaattgtaggcactttgccaaccaaattgtacacgggttttggtaattagtaatcaatacttcttgttttttggtcattattctatatcgcatatatatattatatatgaacattatactttgaacagggataccgcctccgaggtggaacaaatgatagccaagacggtgtctgacgaactggagagccccgaagcggccctaactccagagcaggagcccaatctggagctggttaacgacaagttccagcgcctgaatctgttcttcgagcaggaggatcgtgtggaccccagtgatgttgtctcgcggcaggagtacctgcgccaacagcgtgacaagattgtggagataaagaagcagacgcgtgcaaagcaactgcaagagaccatgtcccgcggtactccacatgcaccggaaggagcacgtcccagctccgcgttggtggcccaacagctgctcgagaatggcggccagactaaggagctctccatgccggcaccactagaagctgaggagaacgctgccctgcagctcagacgcaatcttgccaagcgcttgcgcagcgaagtggttgagcagaagtgaaagaaaggacgcacttttttccctactattcccatttattgcagatactcagccaggattaacaacgtgcattaggtattgtggcatgcagactagtttggttggttgatgcacggtgtgtgtcgtatgttgtacttgtaacgccacccctcatccatgtccacaaacagccaatccatagattgattgtttgtgggcatggtcgagcggatctatcaatttccattacgctattcctcaaaataaacatattgctagtgaagtgtttctcaaaaaacggtgtgaattgctcttctatgtgggtatgcgatcgcgcaaatacgacatgatggcgtcagtgcccttcatcaggatttggtggcggggctgtcgaaatggattgcccaccagctccaagtgactgcaatatacagagaaaataagtttggctccaaacaatatatatccccagcaaggatcttacgttatgtttgtcaggttccccaaaattggtggcactgtctcgatgtcgttattgcgcaaatccaatgtgctcaaacgtcgcatgttctgcagacccgatacatttaacatttttatgtggttctcactggcaatgaggatctccaggccttgcagctcgtacacacagttgggaatacacggaaagctgaaaataaacaagtgggaagtttaaataaagctacatagtttagaaaagatatttcccaatacccaccgattgtttgcaatgtttagttcacgcagtgtattcaagacaccaaactccgtgggcaggtcattcaacagattgttggacaaattcaagaaagatatacgtgtaaactgggagatgaactgtggcacatagccgatgacattgttggataaaactagttccgtaactaaatctttcatgtgctgcagtctaaaaaaccaatcagttataaatcattgcatccattaaaactttaaacttacccattgggcaaagtgctcagctggttgcgcgcaaagtccaccacatgcacaccctcatccctggcgatctggaacacctggtcaggcactgacgtgagctcctccagattgacagctaatgtacgtgtatgtcgtagtttgtatctgcaaagtggagtagagataaaagttagttacaaggcttccatggcagaagtagatgacatgtgtgtaaattttggaacttgatgatacactacacccaacgtggatggacagctgagcgagaggatggatcttgctcataggagaactgctgttgctgctgctgttggtacataaagtatcctggatagggatactccattcgctgctgctgctgttgcacaaaaagtgatctcaagctgccattctgatgttgctgttggtagttttcgggctcatatatgcgcccttgggtctggcgatcatattcctgacagtttctgagcggctcatacacacaaaactgctgctgcatttgctgctgctgacatggatatgaacaaggacattggaatccgttctgctgttgctggtggtgaaagctacagcggcggagatcaatgtgccgtcctcgctgaaagaaaagctcttgatacatacctatccggaaagtttccgggtatatcaccatcgtccatttggccaccacgcaaacgggtaacactgatgcccgctgacgtggaagcgtcgtcgacgccacctccctcctccttggccttcgccacagctctatcgtgcagagtctttaagatcctcgttgttccacactgtaggatgtcgcgtctgattgtctttatgggatttccctccacctgcaggctaatcagatgagccaaggaggacaatgtgactggcagcacgctgatcgtattattggacacatcgagacggtttagattgcgcagcaggcacagctcgtcgggcagctccgtgatcttattgtcccgcaaatccagtatcttcaggtgtggcaagttactacacatagcttttggtatgatctggaatggaagataattattataattgggatttcatttcaattaagatttcagtaaggattaccttgatgaaattattgctggcatgtagctcgttcaaggcctcgtttccctcgaactcgggcagttccagtatgtcgttatgctgcagataaaggcaatccagctttctcaaaaggcccatatcctccggcaagctggtcagatcattatgcatcagatcaatcttttgcaaagctaataacgtaattgttcgatatggattagcaaataattgtggtgggccagcacttacagcgcatgttaacaagatcgggcggcagttccttgatgtgattatagggcaacaagagcgcagttagacgcaccaggaacccaatgccaccgggcagggattgaatattgttatgcccaccgtcctttcgttacaaatggattagcaagcagtttgttaagggagattatacatattggatgggattagtcagataagacgccaaaaccacatataaaaataatactcaataacttaagttaaatgatttcatataaatcgtctatatagttaggaatctacactagctcctatatccgccacccaactcaccaaaaactcaagcatgtgaaggtcactgatgtccggattaagttcgacgaactcgttgtacgagatgttgaggtgccgcagctccggtagactgtacatcgcacgcggcagctggctgagtttgttgtggctcacattaaggcgcactagcttttccagcttgccgatctccggtggtaactccaccaaagcattatcgtgcagctaatatgtggattttaaattaaaaagcctaatagtaattgtaatttcataccgtaagcacggtaagtgattgcagattctcgatctttggcgatatgtgcgttaaggtgtttgagctcaggtccaggttgttcaatggcacttggttccaccaggcatcctcctctttaatcgttagctgctctagatttacggccttgctgtccgcatccgcctcgttaatgtcgtacagtcgcttgggcactgcaatgatataatgtcgaatcaattagagtacgtttatcctgaaaattcactacactacagtcttcagcgcgggttggaggttcggaatcgtccagttccagctcatcgtccggatcctcgctttccagctcgtccgccgaggaggccatctggaattcgcgaatctggtagtagcgacgcctccgcggataaggaccgcacatgcagaacgaagtgagctgtttcctggaggacgcaatcttgggagatgcttcggtagagtcacacaaccgatggcgctcagctcagtgggtagactgaatcaagcgatgactgatctggggacgcacccctggagcacctttatggatcattacgagccccgcatactggtcagtgaagcggcaaatatgcttcgctccatttttgggattctccagggtcaagttcgagatcgaaatcgcttttgcctcacatgaactggaaccacaaggcgctgctgtcaacgaggccggggctccattgatcactgaccggctgacttgtttttggtgggaccatggacttccaacgacgcagctgctcctgggtcaccactgcttgcaaacccgccaatgtatgtagctacttttaagtggatgatacagtcacaacaactgtgttactcgaatcaacagactatatatttcttctattactcttcaaaaagaacgttaatgatatttgaatcataaatgtaacgtattactgaagttcgagtttcagtgctgcgaccatatcaccaattcttccctttgaacttacctctggccaatgctttgttggaaagattcagggtgcccgatttacgcgccagcttccatagttcttgggtgagcacctggtcgtcctcgtgagtgctcctctcgtgaaaaatcgggcgaaaggcacagtttgtcctgggcgagtggaccactgaggcttggcgcggactttgtgcgctgcgaggaatccggctggtggaggggttactccgtcctcggccggttttgtcactcatgtcgcttggacagccgtagtgggtgaagcaggaatggccaaagtcgaagtcgccgccaaatgcggatgcctggtcacattcctgggcaccgcggaatgagccaagttctacgttgcttaagctggcagggatgacaggataaatgaggtcagtgggacgctaaaaagcggccgaatcacaggtgaattcggttttgtccagattttgcgtcgttttattttggctcactgtcagcagtcagctgttcgtcgctcgcttttcaacactacttgacgtgtgcaactcaacggtaattattttaaaatcccgaatgaccgttatttaggtttaatattaacattaaatttaaacgtaatagttattagttgtacaacttttaagaatacgaagttaatgatagtatttattattataatgctgctatgaaggaaaaagaaactagcgaatttttatgaaatactttctaaaactggtcaaactacaaaatataagctaatgaaaaatgtatatttaaaatgttaaagcaaacacagataggtaaaaggattttaattaaaaaatccttctctttcattcacacaattttctttaattgcaattagatttcatgcataagattcgaaattataaattagaatcaatttacctcaaaatgcggcagcttttgaaaacgctgcacctgctcgaatagaatcttaattgatttgatcgtgaacttaagtctgtaatgggtgtgcgcaatccgcaatctacaagcagattaagagcttaggccaagtcgttacttacttcatcatctcgttggggatccctttgtctatcgtttggcttctgcctcggcttctgtgggagatacaagatacccagttagtttggagcaaggtcagtcgtcaaaagtcagtcactgggctgtattagatttccctgttcgacggcagtcaccacaaatgttcaccacaaaaggtgcacgtacagtgtacccagccaccacccacccacaaccctcggaaaatgtttgttttccgaagcggcaaaaatgctgagccacttgtctttgctccatgcccattgcaatgggtctccgcttcggtgtgtgtcgtcaatggtggtcgctgtctaccggcgtggccacgtcggctgtcaatcaaaattatgaataatgccgggtcggttgcctccaattggccgccttctccaaccacatgggctggccatccatcccc

SEQ ID NO: 42134 - DNA, 2451 bp, DROSOPHILA
ccaaaataaaacgacgcaaaatctggacaaaaccgaattcacctgtgattcggccgctttttagcgtcccactgacctcatttatcctgtcatccctgccagcttaagcaacgtagaacttggctcattccgcggtgcccaggaatgtgaccaggcatccgcatttggcggcgacttcgactttggccattcctgcttcacccactacggctgtccaagcgacatgagtgacaaaaccggccgaggacggagtaacccctccaccagccggattcctcgcagcgcacaaagtccgcgccaagcctcagtggtccactcgcccaggacaaactgtgcctttcgcccgatttttcacgagaggagcactcacgaggacgaccaggtgctcacccaagaactatggaagctggcgcgtaaatcgggcaccctgaatctttccaacaaagcattggccagagtgcccaagcgactgtacgacattaacgaggcggatgcggacagcaaggccgtaaatctagagcagctaacgattaaagaggaggatgcctggtggaaccaagtgccattgaacaacctggacctgagctcaaacaccttaacgcacatatcgccaaagatcgagaatctgcaatcacttaccgtgcttacgctgcacgataatgctttggtggagttaccaccggagatcggcaagctggaaaagctagtgcgccttaatgtgagccacaacaaactcagccagctgccgcgtgcgatgtacagtctaccggagctgcggcacctcaacatctcgtacaacgagttcgtcgaacttaatccggacatcagtgaccttcacatgcttgagtttttggacggtgggcataacaatattcaatccctgcccggtggcattgggttcctggtgcgtctaactgcgctcttgttgccctataatcacatcaaggaactgccgcccgatcttgttaacatgcgctctttgcaaaagattgatctgatgcataatgatctgaccagcttgccggaggatatgggccttttgagaaagctggattgcctttatctgcagcataacgacatactggaactgcccgagttcgagggaaacgaggccttgaacgagctacatgccagcaataatttcatcaagatcataccaaaagctatgtgtagtaacttgccacacctgaagatactggatttgcgggacaataagatcacggagctgcccgacgagctgtgcctgctgcgcaatctaaaccgtctcgatgtgtccaataatacgatcagcgtgctgccagtcacattgtcctccttggctcatctgattagcctgcaggtggagggaaatcccataaagacaatcagacgcgacatcctacagtgtggaacaacgaggatcttaaagactctgcacgatagagctgtggcgaaggccaaggaggagggaggtggcgtcgacgacgcttccacgtcagcgggcatcagtgttacccgtttgcgtggtggccaaatggacgatggtgatatacccggaaactttccggatagatacaaactacgacatacacgtacattagctgtcaatctggaggagctcacgtcagtgcctgaccaggtgttccagatcgccagggatgagggtgtgcatgtggtggactttgcgcgcaaccagctgagcactttgcccaatggactgcagcacatgaaagatttagttacggaactagttttatccaacaatgtcatcggctatgtgccacagttcatctcccagtttacacgtatatctttcttgaatttgtccaacaatctgttgaatgacctgcccacggagtttggtgtcttgaatacactgcgtgaactaaacattgcaaacaatcgctttccgtgtattcccaactgtgtgtacgagctgcaaggcctggagatcctcattgccagtgagaaccacataaaaatgttaaatgtatcgggtctgcagaacatgcgacgtttgagcacattggatttgcgcaataacgacatcgagacagtgccaccaattttggggaacctgacaaacataactcacttggagctggtgggcaatccatttcgacagccccgccaccaaatcctgatgaagggcactgacgccatcatgtcgtatttgcgcgatcgcatacccacatagaagagcaattcacaccgttttttgagaaacacttcactagcaatatgtttattttgaggaatagcgtaatggaaattgatagatccgctcgaccatgcccacaaacaatcaatctatggattggctgtttgtggacatggatgaggggtggcgttacaagtacaacatacgacacacaccgtgcatcaaccaaccaaactagtctgcatgccacaatacctaatgcacgttgttaatcctggctgagtatctgcaataaatgggaatagtaggga

SEQ ID NO: 42135 - protein, 650 aa, DROSOPHILA
MSDKTGRGRSNPSTSRIPRSAQSPRQASVVHSPRTNCAFRPIFHERSTHEDDQVLTQELWKLARKSGTLNLSNKALARVPKRLYDINEADADSKAVNLEQLTIKEEDAWWNQVPLNNLDLSSNTLTHISPKIENLQSLTVLTLHDNALVELPPEIGKLEKLVRLNVSHNKLSQLPRAMYSLPELRHLNISYNEFVELNPDISDLHMLEFLDGGHNNIQSLPGGIGFLVRLTALLLPYNHIKELPPDLVNMRSLQKIDLMHNDLTSLPEDMGLLRKLDCLYLQHNDILELPEFEGNEALNELHASNNFIKIIPKAMCSNLPHLKILDLRDNKITELPDELCLLRNLNRLDVSNNTISVLPVTLSSLAHLISLQVEGNPIKTIRRDILQCGTTRILKTLHDRAVAKAKEEGGGVDDASTSAGISVTRLRGGQMDDGDIPGNFPDRYKLRHTRTLAVNLEELTSVPDQVFQIARDEGVHVVDFARNQLSTLPNGLQHMKDLVTELVLSNNVIGYVPQFISQFTRISFLNLSNNLLNDLPTEFGVLNTLRELNIANNRFPCIPNCVYELQGLEILIASENHIKMLNVSGLQNMRRLSTLDLRNNDIETVPPILGNLTNITHLELVGNPFRQPRHQILMKGTDAIMSYLRDRIPT

SEQ ID NO: 42136 - DNA, 7316 bp, DROSOPHILA
gtatgcagcatctttttggttcttttaaaagcgagtcagaggagtctaaccaatctttgaatggttttaaaactgctcgacaaatgctcgaagaaaataattcaaaactcgagggcgtacctgaaaaattacctattaaggatggtgaaaagagagttttagaaaacagggccgattctattggatttacttcagccagagaaatgttagagaggagcaaacaaagggaaggggacgataagtcaagcaacaaactcgaaaaactgggatttatttcagcccgggaaatgctggagaaaaacaaacttaacgaaagatgtttggacaaaaaagacgttaaggaaaagaaattagaaagtagggaaaccaaaagatcgctacaaaacaacgaattacaacataagcaagaggaagaccgtaaagacaaagcatcccacaggaaaacgtcaaaggaatcgttatcgaacttgaagaaggaaggatccgactccagagttttgcaaaaggatacaaaaccagaaaccagaaaccatcaaaaaacagatgtcagcaaaaatgtggtgcagtggctcaatccgtattataaacgaaaaatagccaccaaagagcttttcaaagctttggcaaaattgctcactcagcgcatttgtgatggaagcttaggtaagatattcatacttcctgtctgttaatacctttaaaatggaccataaatctctaggagatggcgatgctggaaagtgctatataaaggaaacttttcatggcctgcagatgataaacaacgatcaggacattgaaaaatatttcataaaatccaagtgactaaaaatctcctaatgattttatcacgacatattgtttcgcctcgttaaaagttgcatcatctttttttttcgttagttactatttttgtatataataagcgcattaattatcaataatacatttaaataagacgtttttatttggacagttttaatagaaaaactattaatttgggatattattcgctcgtacaaaatttatttgcgttgaatcttatttattaattgaattagatataacattcgtgatgctcgatgtattaagcttataaaaaaaacaaaacagggcagccgattaagaactttaaacctcctcggacgtcgattttgtacattttcgattcgatgatggcaatttgttttcttgtgggattacaattagctgggagacgggtatgtgaacggggctcttacttctaagctggagctataaatattacagtccacgctaggcgagaatcgaatgtatatctctttctcgccaaacttcacgggatcgaccatgtcattctagatcaccgtggacacctaaacgcagggtgatgagtatgtccagcaagaagaccagcgaggtaaccaaggcaatcgaggcggaagccatcacgagatccaaacgatgcatattcgggtgccagtagttgcgatccttggtggtggaccaatcccggaaaagcagggcggttacggccacgaagagcacaaaggccactagattccacaaagtagccgtacgccatggagtcctatgtgtacattaaatatatcagtactagcattttaattaaatcaaactttaagcatacaaatcaccgaagagcgccattatcagatagattgccgtgtagatggtcagtgctccaaaggtcacatagcaaagggaagccactcggggagtgatgaacacccgcagatgagaattggtggccggctcgtcgatcagacccaaacagcatataagcaggcactatgggaaacgacgaatagttttcataaattatttgtgtttttaatcattttttttaacaatttaggcattactgggaagccgtctcaaaatgctgaatctttataaaatgtaattggacaccatgaaactagtttcttatctgatttttaaaagttattcaaaagatttccatttaaaggagtatttaaatttaacaaaaactcaccagttccacaatcttgatgcatatcaccgtgtaggtggcctttttgtttccatgagttgtggcaaaggaattatcgtcagccggcgacatttcgacgcgtgagatttctgcaccgagcaattaaacaattaattaattaaagaacactatactatatcaattggtattttggccactttgacatttgctcggagcgaggaaagaatgacaataaaacttattgtatatgtacctatcgatcgcaagtagctcattttgcagagtctgatttggatacgttttcgacctacagaggaaacggaatcttcaattttggctttttagtgttcagttaaagtcgggtttagtggccatttttggcctccatgtctgggttatcggatatttgttattggatggtcagtggagcgtgcaaacgagtaaaaccgaacaatctacgttctgttgtggatttgtgtcaattgatggccgaaggtcttcctctcccacatgaaatacatccagttgcagaccgaattgattaagggcacattctgcgatgatctcatatattgggtgtgtgggacttttgggtggggtatatatctatgtatctatgaacatatggggctatattcgacagcgaggtgccgagatgcataccaaattcaacctgggaatgcgagcagcctacgtgagtttgcatcaaaaagtcgtatgaataataaatccaactataatcgctgtcttgtgaaccgtcatctataattccattattttcaatcattaattgcataccgacaatgaagctactgtcgctcaattgtcacctcttttggacacaattcaacacctgttttgatatatagttctttattctgattctacactaaaaaataagtgtatcgaaccggaaagtaaccaatttctgtatatcaagagagaatttttccaaaaaaaagtttaaacgaatgccactcataatttagaagttctctattattggattctttaatatcaaatatttgcatactattgaaatttacttggaattcagcttaaatgattttctgggttatcataaccggtaactcgtttttgccgtgtataaagtggggaattggatctccacttcatgggcaacaatggtccccccattgattgaagctaattgcatcacataaagaacaaagcataaaatcccaatattagccaaaggcacgttcagcaaaagtgaaggggcggacaaagagtagggaactgtgctagttaaccccacgatgcgtaaccccataaacaacaattaaaatgtgaggggggggcggggaaccagaaaaaataagtcaaactcgaaatgaaactggaaactcaacacaaaccctaaaaaagggccacgcacaactttcactgcgttcggggagggggaaaatgtgaaagggagtgagatgggaaagagctgtagagaaaaatggagggaaaatgataaaaatgggcccaagacactccctatttacaaaacgagggctcggagctaataaacattttagtgtctaggttctggttgcaaaggtaaacagcaaatgggtaaagaaaactaccactattgaaagcagtggaatgtagttagctttttgtattaatctatttgaatccaaagtgataatttcatatactaacagtaactctccacatcaaaccaaatatataaaagtttaggtttatatcaaaaagttttaaactttagttgttcactttattgtaaaacagaattgtatatataaacatatataatagatttcttttaagccaattctctacccgttaaatctccccactaattttcgagtatgtggctctccaagatgggaatttcagtgaataactgcttgcgtgttgttgctaacgagtgcttcacgttttggcccacactcgaacaccccccgcagcacccctttgaaccaaaaaaaataaacaagttttctttggcggcgcttagaagaaagcccaaaaagcagaaaccaaacaaaacacacgcaacaagccacgaagctgaaaaaaaggtaaacaaaacgtattggctaagaaaacttgttttagaaaaaagagcatttggcttaaagagaggatctaagagttcgactacctgccacacctgcgtattttaaaggggatattttctctcgaaaggtaggcataatttagtggccagcactgtgaattaacctcgtttcgctttcaggctcaaaagggactgtttcacactaagcagccctataactggtctgagttttgggtcaatgactcgattctccgtttttgttttggttcttcgattctatccaaagaatttgtttaagccattcccatcttaacttgggtttatatctctcatttccggacaaccagagatccaaagagctacatcatctgtactatctgtatttctcagctttcaatcgcagtcttgggcaattgaaaaatgcaacaaaacttgtttgcttaccgcccccttttttgccccccgcgcgtgtcttaaccctcacccatcacttgcattgatatgcacaactgcaaactggttgcaggcgagagcgacagggacggacgatgggggagtgagagggcagaaccacctgaaacacaaatacatatatgcaaaaggcgcctactgtacttggtcatcgccatagtttttactgcccgcgaagggcagttcgcgattttccagctgcattttccaaacacggtcaatacccatagagggtatgtatatattgtaccaagaggaatcattttcgcgtttaacttttacatataaccaattattttttttttaattaaactaagatgtgtcctcaatcaatcagaaagcgtttaaaaaaaatctataatgtaaaattttgtatttattttattttatggttttagagagtaatatccttacgttttgttgacaatatttttgttatcactttacttaatactgttgtaaacaaaaagtaatggcaagccataaatcttatgaatgggaattttgaagccttacaacttgaaaagcaatgttcatggcggcatttttgcaaattatttagatattcctacaatatctattgctactgcacttgcctttgaccccattgagacccacaccacgtttggtatggggaaacatttggtttggggctaaaacatgcaacattttgcgatgtgggcttacgagggtggttggtgcttgggggagttttctaggcgactcccttaggggttgttggtaaattcaatgccaaagcaattggccaaggctcgtcgggatttaccatgagtgtactggcgttactgtcactgttattgtttcgtgtcgggcctgtcattgaaggtcagtgcccataaatgatattggtattgaatcgaaagggttcagttagcaaaagggaacgtgtaattgagtgctaatataaacaacaactgggttcagagtttttgccatattgtttacatattgacagattttgaactaacagcgttcaaatatttaatgtgttttcaagaacggtaaagaaattaaaaagctcattaacttaataactgctcgtaagtgctccaagaattcgtatactttagttgagcactacctaattgtttttttacgccaacgtaagatatctgttttttcgctttataaaccccagtatttgtcacctaattaaagctgcatcaaagggaaggggccgcattgatggtgagaaaattgtcagtgagtcacattaaacaaactaatttgtgttagccagtgtagtgttgtgtgtagattgtgcaaaattagcatgtctaacaataacaacaaactactgcgatcgtcttgctgatgtagttattgttgtatctgtgcttgtttactgtacaattagctctgggtggggccctccgatctcacagactccattcgtatgagaagatctttgggggagaatcaaaacttcaacggaagctgaacaaattttacgttttcttgtttagtgcattttcaacttgtttaaacattagtaactgccgagcaaacgacaaactagttttagtttttactcagaatttcatttttgggttattatattacatttttcaaattttcgttgagttgcagataggtgcggtacacaagtgcagccaaatgatttgggttagctgttaagttatatctcacactaaatacacagataaatcaatgaattctttcacgcgcgttaaatagtttcagtagttcagtttaaactgcgactcagagcggaaattggttttttaaaaaccgtctttcaaaaaacctctgaaaccgacgacacgccaacgacaactgttgtaacctgaacccaaaaccgaatccaaagcccgccaaacgagctattgagccacagcccaaaaataagagaatatttcccaatgagaattattcccaagacgtgtgtcaacgcttgctgaacaaatattaagtcatattatggcggcttaaaaattagcacatgcacgccatgtatgcaaacaatttaatctcgagttttgtttgaaacttaaatgctctattaaattttgaagtaaaattgtgtcgttggtttaaaaaaaaacattttaaaaacaaagcccagcttagtgggaagcgactgttgaaagcttttatgaaatttccctgctataatagtaaagacgtcaaccgaaacctaaaatcggtaccatacaaatttaaaaaaaaaaataaagatatttagggtcatttagtgtgtgtttagtatttgccaaagaaaacaaaaataactacaataaaacataggtctaaataagtctcaccattgtatgatgaaaaatgcatttttaaaataaaaaggcgagaaagctaacctcctgtgctataatgggtctcagaaaataactattaaatgaaactcaataatttatattataacatttatcatttgatttctgtttaatgtaattaattttctttaattattgttttcttttaacaaatatattcacagatgtagagatgaaataaagacaaaggcagtaaaaacacttgaataaatacaattaaagttaaactgtacataattagagtgacaaatttttgcgaaactatgtacagaaaatatgtaaaactgttaaaatcgtgaaaaacaaaacttaaacacagtctttccgtttacagaactctcaaaaacaattgctgctagttatttgctacgactaaaaataaatttaagaagtaattacaacaaaacatgacgtttgtatatacattctaatctactttacatccagtcagcataaatttgttaatttattttaa

SEQ ID NO: 42137 - DNA, 1062 bp, DROSOPHILA
cgtgtcgtcggtttcagaggttttttgaaagacggtttttaaaaaaccaatttccgctctgagtcgcagtttaaactgaactactgaaactatttaacgcgcgtgaaagaattcattgatttatctgtgtatttagtgtgagatataacttaacagctaacccaaatcatttggctgcacttgtgtaccgcacctatctgcaactcaacgaaaatttgaaaaataaatctcacgcgtcgaaatgtcgccggctgacgataattcctttgccacaactcatggaaacaaaaaggccacctacacggtgatatgcatcaagattgtggaactgtgcctgcttatatgctgtttgggtctgatcgacgagccggccaccaattctcatctgcgggtgttcatcactccccgagtggcttccctttgctatgtgacctttggagcactgaccatctacacggcaatctatctgataatggcgctcttcggtgatttgactccatggcgtacggctactttgtggaatctagtggcctttgtgctcttcgtggccgtaaccgccctgcttttccgggattggtccaccaccaaggatcgcaactactggcacccgaatatgcatcgtttggatctcgtgatggcttccgcctcgattgccttggttacctcgctggtcttcttgctggacatactcatcaccctgcgtttaggtgtccacggtgatctagaatgacatggtcgatcccgtgaagtttggcgagaaagagatatacattcgattctcgcctagcgtggactgtaatatttatagctccagcttagaagtaagagccccgttcacatacccgtctcccagctaattgtaatcccacaagaaaacaaattgccatcatcgaatcgaaaatgtacaaaatcgacgtccgaggaggtttaaagttcttaatcggctgccctgttttgttttttttataagcttaatacatcgagcatcacgaatgttatatctaattcaattaataaataagattcaacgcaaataaattttgtacgagcgaataatatccc

SEQ ID NO: 42138 - protein, 162 aa, DROSOPHILA; identical to SEQ ID NO: 26037

SEQ ID NO: 42139 - DNA, 4169 bp, DROSOPHILA
agttcaaggccaattgactttgtctcctcttgattggcgcatctaattttgaaaataaaagctctgatgtcttaattgggcggcacctcctctcccaattaacacgccttttcgctctcatcgaacatatcccttagtgggcatggcttggctttgcacctgatcaaaggtaatgcacgtgcagccgccgcaaaatgaaaacaataacattgccatctgccaaaagcaagacagagaggtgttaacaatttgttgtggtcacccggttcattggtcagttcattgatacattggatacatcggacaatctatcacgggttttcatcacctgacttatataagaaaatattcggttcttggggcttttaaagcatttgtatagtttttgaaagtatagtttaaaagatggaaggacagccatctattccagtctcggaaactataaagacttttaacatgtaaacattatgtgtttttaaatatttattaaatattactttaaagtgttcacagatccattaaaacgttaagaccaaattcattggaaataatagtgttttcacatcctttgcaattccttcagctgaaagacggacataataaccgtatatggtatttttgtcaaccccaattcatattaaacattttctgcgaaaaaatgttggcaagccagaacaaattaaaacgagaaattctttcaatagtctatttaatgacaaccaactaaatcaaatgaaagacacaggcaacgaaagagaaatgaaaaatgctctgaggataataaaagcatatatgtatactgcatatgacattttcccagctgttttaaaatgccaacgggaatatgggtacgacaagcggaaagggaaagtgatggaaaacaacatttcgtgcgaatttatttgtttacttaaaaattgtttatcccgtttcaatatatcactcacgtcacatatcccgatggctctatacttgcagatattccgcagatcggacgtaaatgaacgatcccggcgatataccactgacacacacaagcactccggacagcaggccgccctgcagcatcatttccatcatacccaccatagggatgtcctcatgtcgcggaagagccgaggcattcgcacggagtctgtcctccaagctgcgcaccttgggatcacaggtaaatgtaattaaaaatgtaaatgtaatcttaaaggggaaaaaatcaaaaatgagttatattaggctttgttatttgttatagtctatgcattgaaaactaattgggtgttccactccgcagacaaccgaggagggcgagggcaacgcggaggatgagccgatcataaatggaaccagcacgaacacgtgggtcaactcgcacgactcggagcagacggtgacggacctgcagccactgcgccatgagtccgactccttcttcgacttcgactgcgagctggagtcgccggggagtcctgtggacgagtgcgagtacctgcgcttgatcgaaactgcctcgaatacgccgcacaactctacggcggagtcgggctatgcctgcgcttcaatggccagcagccatagtagcagcaatgatggtccgtactttgatgcatccgcttccacatccacagctgcagctgcccaggatcagacgctgccagcctcggaacacaaagagtatgtaaataccctacaactaaacggaaagcatggactggccaatggagtgcaggaggagcagccagctttccaggatgatgtgcaggaggacgaggccttcttgcaggcacagatcctcaatgagctccagaagcacagcaacagtttgacggaagtggagcagacaaagcccgaggagggcaagctcaccaatgggcatctcgagaaggtggaggagctggaactgaaggacgtcctggaggtagctggtactacaaacagagctccaaaggtgatcgccgctccacaagaagtggaagcctttgctgatagaagccaagagcaatcacctaatgacagagttcaaaaagaaagctcccaggaaagggttccagaaggaactccattcgaaggagtccaaggagaatctcctagcgacagagtccagacggacgcgtccgatgaaagggttcaagaggaaatttccaacgatacagttcaagtggaatccaaccacaaatccgccacagaatcaatttccaccgaggtaaccacgttggaaagatcaccagaggaaagcaggaatgatgaactctcgccagacagtggtgtggatgaaacagacaagtcggccagtaatctcaccgtagatgtggacctggcccaaatcgaacaggccaaacaggatgccactgaggctgtggaaaagagtggtgcccccagtcggggtaccacagtcgataccacagatgatgaagacgattgtagaccacagcgcatcaggcgttgttcctccctgaaaacgggaaagacaccacccggaactccgggtcgcaagaagatcgttaggtttgccgacgtccttggcttggatctggccgatgtaaagaccttcctggacgagatacccaccataccgaaatcggcgttcgaggacctggaaatactggagtcggagccgccacttcagctggggcccaagtccgacaagctattgatgcctctgttccagcagccaggaggcctgcccaagttcctcgatgcggtccgggagaagcaggtgtccctggagaacgctgccgtgacggacaacatcaaccagacgatatccggatctgtgcgtgtgcgcaatctggactttcacaagtcggtgcacataaggtactcgctggacggatggagaagctacgccgacctgcaggcaaactacgtggagaactcttgcgatggcttctccgacatcttcaccttcgtgctgttcggtaactcgctgcacgtgggccagaggctggagttcgccgtaaggttccagtgcaaaggccaacagttctgggacaacaactacggggccaactactgcttccagtgtttgcccagctcgacacataccgccggcggctccacggcatcgcctccgtctgtggcgactggcgccgtatccaccggccatagtgccagtctggtcggattgctaagccccacggcgggcgatgcctggtgcagctccttctactaaccggtggcgatgggcccgcactaaaggcactagcatcccgtctagaatccaacaccctctcccatgcccaatccaacgacacgacaccaagatctgggaaagtttccgggccttgacgtggtgtctatgtcccagtaagaaatcaaatccaagcagtcccatatgaccgcccagtcagagatcacagatcagaataccaaccttcgtggggctaactcttcattggggtgattggattttttgttagaaaatccacaaggaactaagtatttttttggcaattcttaacgtaacgtatcaacacaactggaactaatttggaatgaaattttcagtcaaaggcagattaagttttgatattttggaacttaagagctgttattaacaacaagaactattgtacgaaatgtcaagaaattacataactcccacaagaatatttcagtccctgcacgtcgataaatcgaaccaccctagccttccaaggacggcaaacattgtttatatatttttatagaatgaatggaaaagattgaagggttagtgaagggcaagaggagctgtaagagcgccacaaaaaaactaaagaatcaaaccagagtagtgcgaactagaacaaaagccagcaaggttcgaatgaatcccaaagatagttgttagtcgtatgttataagaagagcaagtgataacaaactaaaactcagatcagtttcttcaatgtcttcttctgtttttagttacttttcccaatttttatttggtttgttcctaggtttgtttgtcatgcgaaagcgattgccagttggatcgggctattaagattgtgtatctgccagataatgtatcatgatgatttaaatgaatcagttttgtgaaaagattaattgccattaatcacagttctgaatatgagcttagcaccattttaatactttttgttcggtaaaagcagatccgttcgagcacagagaccatgtcaaaagttaactataactaacca

SEQ ID NO: 42140 - DNA, 2046 bp, DROSOPHILA
atgaacgatcccggcgatataccactgacacacacaagcactccggacagcaggccgccctgcagcatcatttccatcatacccaccatagggatgtcctcatgtcgcggaagagccgaggcattcgcacggagtctgtcctccaagctgcgcaccttgggatcacagacaaccgaggagggcgagggcaacgcggaggatgagccgatcataaatggaaccagcacgaacacgtgggtcaactcgcacgactcggagcagacggtgacggacctgcagccactgcgccatgagtccgactccttcttcgacttcgactgcgagctggagtcgccggggagtcctgtggacgagtgcgagtacctgcgcttgatcgaaactgcctcgaatacgccgcacaactctacggcggagtcgggctatgcctgcgcttcaatggccagcagccatagtagcagcaatgatggtccgtactttgatgcatccgcttccacatccacagctgcagctgcccaggatcagacgctgccagcctcggaacacaaagagtatgtaaataccctacaactaaacggaaagcatggactggccaatggagtgcaggaggagcagccagctttccaggatgatgtgcaggaggacgaggccttcttgcaggcacagatcctcaatgagctccagaagcacagcaacagtttgacggaagtggagcagacaaagcccgaggagggcaagctcaccaatgggcatctcgagaaggtggaggagctggaactgaaggacgtcctggaggtagctggtactacaaacagagctccaaaggtgatcgccgctccacaagaagtggaagcctttgctgatagaagccaagagcaatcacctaatgacagagttcaaaaagaaagctcccaggaaagggttccagaaggaactccattcgaaggagtccaaggagaatctcctagcgacagagtccagacggacgcgtccgatgaaagggttcaagaggaaatttccaacgatacagttcaagtggaatccaaccacaaatccgccacagaatcaatttccaccgaggtaaccacgttggaaagatcaccagaggaaagcaggaatgatgaactctcgccagacagtggtgtggatgaaacagacaagtcggccagtaatctcaccgtagatgtggacctggcccaaatcgaacaggccaaacaggatgccactgaggctgtggaaaagagtggtgcccccagtcggggtaccacagtcgataccacagatgatgaagacgattgtagaccacagcgcatcaggcgttgttcctccctgaaaacgggaaagacaccacccggaactccgggtcgcaagaagatcgttaggtttgccgacgtccttggcttggatctggccgatgtaaagaccttcctggacgagatacccaccataccgaaatcggcgttcgaggacctggaaatactggagtcggagccgccacttcagctggggcccaagtccgacaagctattgatgcctctgttccagcagccaggaggcctgcccaagttcctcgatgcggtccgggagaagcaggtgtccctggagaacgctgccgtgacggacaacatcaaccagacgatatccggatctgtgcgtgtgcgcaatctggactttcacaagtcggtgcacataaggtactcgctggacggatggagaagctacgccgacctgcaggcaaactacgtggagaactcttgcgatggcttctccgacatcttcaccttcgtgctgttcggtaactcgctgcacgtgggccagaggctggagttcgccgtaaggttccagtgcaaaggccaacagttctgggacaacaactacggggccaactactgcttccagtgtttgcccagctcgacacataccgccggcggctccacggcatcgcctccgtctgtggcgactggcgccgtatccaccggccatagtgccagtctggtcggattgctaagccccacggcgggcgatgcctggtgcagctccttctactaa

SEQ ID NO: 42141 - protein, 681 aa, DROSOPHILA
MNDPGDIPLTHTSTPDSRPPCSIISIIPTIGMSSCRGRAEAFARSLSSKLRTLGSQTTEEGEGNAEDEPIINGTSTNTWVNSHDSEQTVTDLQPLRHESDSFFDFDCELESPGSPVDECEYLRLIETASNTPHNSTAESGYACASMASSHSSSNDGPYFDASASTSTAAAAQDQTLPASEHKEYVNTLQLNGKHGLANGVQEEQPAFQDDVQEDEAFLQAQILNELQKHSNSLTEVEQTKPEEGKLTNGHLEKVEELELKDVLEVAGTTNRAPKVIAAPQEVEAFADRSQEQSPNDRVQKESSQERVPEGTPFEGVQGESPSDRVQTDASDERVQEEISNDTVQVESNHKSATESISTEVTTLERSPEESRNDELSPDSGVDETDKSASNLTVDVDLAQIEQAKQDATEAVEKSGAPSRGTTVDTTDDEDDCRPQRIRRCSSLKTGKTPPGTPGRKKIVRFADVLGLDLADVKTFLDEIPTIPKSAFEDLEILESEPPLQLGPKSDKLLMPLFQQPGGLPKFLDAVREKQVSLENAAVTDNINQTISGSVRVRNLDFHKSVHIRYSLDGWRSYADLQANYVENSCDGFSDIFTFVLFGNSLHVGQRLEFAVRFQCKGQQFWDNNYGANYCFQCLPSSTHTAGGSTASPPSVATGAVSTGHSASLVGLLSPTAGDAWCSSFY

SEQ ID NO: 42142 - DNA, 4329 bp, DROSOPHILA
gatggccacgtggtggtggacatttgcagctacaggaatcccgagatgatcaactgcatgtatctggaggccattgccaatatgcaaacgaatcccaattatgctaccctctttcgtggacgtcccttgagattcgtcctgcccttgggcacaattcctccggcaagcatcgccaagcggggactggtcaagtccttctcccttgctggactaagtgctccgcaggtttctcgcaccatgaagcactcggtctcgcaatatgcggatataacctacatgcccaccaatggaaagcaagccactgctggagaggaaagccccaagcgagatgccaaacgtggccgctatgaggaggagaatcttgtcaatctggttaccatggagggcagtcaagcggaggcgtttcagggcaccaatggcatccaactgcgtccggaaatgctgtgtgattggggctgtgaaacacctaggatctattatgaacggtatatgggcaagaactaccgatacttctacgcgattagctccgatgtggatgcagtgaatccgggcaccgtaagtgcttatacttctttctccagatcagttatatagaatccctatttctatagctcatcaaggtggatgtgtggaataagagctgtctaacctggtgcgaggagaatgtctatcccagtgagcccatttttgtgccttcgccggatccgaaatccgaggacgatggcgttatcctggcctccatggtgctgggcggtctcaacgatcgctatgtgggcctaattgtgctatgtgccaaaacgatgaccgagctgggccgttgtgatttccataccaatggacccgtgcccaagtgtctccatggatggtttgcacccaatgccatttagatacggaactccttatatgggaagactacttagcttaggagatagggtaaagcatctgcccagtattacgtttagatttagactagatttagactagcatttaatcttagaacttagaattttggattcaagacattcgcaataaactcctgccacttgcgctggaatacccgattgattttccgcctctcgtccgaggtgagaacggcgtacttgatggagttcaaggccagctgcttgagaaagcgcagatccgcatccgccggagccaaggccatgaaggcgtagtagaaatcgtagctgagacccttggctccccaaacacccggatcatcggatgatataacgatgggaaagttctcggctatcaggaagctggccggatgatttcgcagatcccagacgaagcccaagacctggttggaaatgggattcacctcgatggcgatgttacgcttcttgatggtggaccacaattgtggatgcttgggcagggcgaaggcatggccaatccgcttcgtattcagcagaatggcgtccatcatgttccagtccgttcggccattccaatctatggaataggtagattgattctcatataccctatatgggattcggataacatactcgtctcgccggcgtggaagaagtagtttgccgtgctaggaagatcggacagttggttgatatacctgttcagcggttctccagtgtcctcctgaccaatcagatcgaaaccaatcacaaagttcggtttggcatggctgcagcaaataagattttatagggtattaaaatatgatatgatttttcaaaaaggtgtaaaaattgcgactcttttaataattatgtacacactgagctaaacttactgcagctgcttaaaagtggtgattcggcgcaacatctcctcctcggatgcgcgattccgcttggcatatatcaccttaacaccgatgaagtcatggtgcttggccttgaattcctccacaatccgttccagctcgttggccacctccaaggtgctcagagttcgattgttgtcgtcgtacagctgcattaatagtcttaagatcacaatctaagatataacccacgattactactcaccggcgagagggaggctcgtatctcggcatagataatgttatcctcgcaaagttcctccaacattcgcttgtgataggcacaataggtgggtcggtatttatacagccgatccacggtggtaaatatgttctcaaagcgctcccaaatcttcttacgatttggcaatagagctagaatttcgagtttttcaaaaagtaataccaattaaagtggatatccttaccttccggccttggtccgtgcatattgatgtgcttctccagctggcgctcgtactttccccgatcctcggcatttatcctctcagtgcacacattctgcacttcgctatggcatccggactgatcgtaggtgaacactagcagtccatccacattgcgacaggtgtacagattattggtggtggtcagattctgtatgatccagcgtgaagtcaccatacccgtattgtgaccgtgcagaaaggcacccttcggaatcttctggatcatgcggaatacctcgctctgccggacgtactgcctgccctggaagaagtgcatcgcgggcgcgtacttctccggcgtcttgagtccttcggcgatctctgcccgcttggcgttcatcaggatgctgttggccttctcctcgtcggacgacagccagatgttgccacccagcgaggccacgcgctccgcttccatgatttgctccctcagtgtttcataggctgcagaatggaagttttgggatttgctttagaggcctaaaagtccttacacttgtgcactcataaccattaaaattaaaatacaatatttatatataatatataatgtacatcgatttttcgtcttattttgttgtttcacttgctacactttcatagatcatcgacatagaaactttatattatttgtttacacttttgcatttgcgataagcatttacttaatcaaatataataacaatacgagaataaacatggaaaacaaaatgcgtaaattatactacctctgaaataactacacattttaaatttttcttgaaacgtattcctataacatggcgactaatatatgcacatattaattttaactaaaaatctagtgataccagaaaagatggcaactgaagacttgaatcatccatccggaacttacgtagatctgtggcttgcacgctgcccgttaggagcacaacggtggccaccaaagcacctagaaaccacatcgccatccagtaatctcagttccgatatgtacgccgtatttgactcgatccgcggctcttggcgatcgccaaacaactgatagtggccaccgctttggaatccgaaccgaatacggcttgtgcaatttccacactgatcatgatcttggtcgctgtgggatcagcggcatctggtgcagttcaatgacggagattatttcgctccggaatggggcgcgctatgtttggatgtccccgggttggcactttcgttgacactggctgcccctcgtccaatttgcaaatacaattcgtgacgtagcatgctcagtgccaaaatgcccttcttcaaagtgatactgtatgtaaacacacatctctggttgaagcgcatatatgtatatgtatatagcatatctacgggaaaaacatatatgtagggtattaggaggaacgccaaagccgcacttctatgcttcccaaagtagcgctatatgtttgtccatataatgtgaaaacattgcgatcgtgggcatatttttgcatattgttgactaacccaatttgcactgtttacccgccgaaattatacttgacattgaacgtgaaatggggccattgatcatcgcagggaaatgcaatccatccatgggaactttaaagtatctgaaagatatgcatggtaatatggtaatattaataatatggtaatttatattaaatattatattaaatattaaacgctctcctagataatcgttttaagaatatgtttatagtacccaaaagtatttacctgtaattgaactgtaattctccgcaaaaataacaaaataagcttgatgactatacctttttttgtaaactaccttctgccaggtatttgataataagccagcgaaaaataaacattaccttacaattggcatttgtgtaagctgtgataattgactcatctgcgattatcgtacatttcaaaagcatccagaccattttacaaggcgggggatttgaagaactcgtaataccagcgtcgtgtgctgttgaaaaccaacaagcgcgtccgtcgttcacgtcagtgaaaatttgccaaaatagaaacaattcaaatagtttaaaatcggcgagcgatgggcgcgca

SEQ ID NO: 42143 - DNA, 1137 bp, DROSOPHILA
caagccgtattcggttcggattccaaagcggtggccactatcagttgtttggcgatcgccaagagccgcggatcgagtcaaatacggcgtacatatcggaactgagattactggatggcgatgtggtttctaggtgctttggtggccaccgttgtgctcctaacgggcagcgtgcaagccacagatctacctctattgccaaatcgtaagaagatttgggagcgctttgagaacatatttaccaccgtggatcggctgtataaataccgacccacctattgtgcctatcacaagcgaatgttggaggaactttgcgaggataacattatctatgccgagatacgagcctccctctcgccgctgtacgacgacaacaatcgaactctgagcaccttggaggtggccaacgagctggaacggattgtggaggaattcaaggccaagcaccatgacttcatcggtgttaaggtgatatatgccaagcggaatcgcgcatccgaggaggagatgttgcgccgaatcaccacttttaagcagctgcaccatgccaaaccgaactttgtgattggtttcgatctgattggtcaggaggacactggagaaccgctgaacaggtatatcaaccaactgtccgatcttcctagcacggcaaactacttcttccacgccggcgagacgaattggaatggccgaacggactggaacatgatggacgccattctgctgaatacgaagcggattggccatgccttcgccctgcccaagcatccacaattgtggtccaccatcaagaagcgtaacatcgccatcgaggtgaatcccatttccaaccaggtcttgggcttcgtctgggatctgcgaaatcatccggccagcttcctgatagccgagaactttcccatcgttatatcatccgatgatccgggtgtttggggagccaagggtctcagctacgatttctactacgccttcatggccttggctccggcggatgcggatctgcgctttctcaagcagctggccttgaactccatcaagtacgccgttctcacctcggacgagaggcggaaaatcaatcgggtattccagcgcaagtggcaggagtttattgcgaatgtcttgaatccaaaattctaa

SEQ ID NO: 42144 - protein, 340 aa, DROSOPHILA
MAMWFLGALVATVVLLTGSVQATDLPLLPNRKKIWERFENIFTTVDRLYKYRPTYCAYHKRMLEELCEDNIIYAEIRASLSPLYDDNNRTLSTLEVANELERIVEEFKAKHHDFIGVKVIYAKRNRASEEEMLRRITTFKQLHHAKPNFVIGFDLIGQEDTGEPLNRYINQLSDLPSTANYFFHAGETNWNGRTDWNMMDAILLNTKRIGHAFALPKHPQLWSTIKKRNIAIEVNPISNQVLGFVWDLRNHPASFLIAENFPIVISSDDPGVWGAKGLSYDFYYAFMALAPADADLRFLKQLALNSIKYAVLTSDERRKINRVFQRKWQEFIANVLNPKF

SEQ ID NO: 42145 - DNA, 4647 bp, DROSOPHILA
ggacgcatcgttggcgtgggaaccctgatccacgagcgatttatcctgacagatgtacattgtggtgactccattggagttattagagcacggttgggagagtacggaagaattggttctgagctggcagaagaccacatagtcgctgcattcttcagtaacgccaactttaatccggaaacgcaggcgaataacatgggcctaatgaaactgctgcgaaccgtagtatacaaagagcatataattccggtctgcattcttatggactcacggatgcagacgttcgccgatgaactggactatttcaatggaactacatggaagaactcggacaaatcaccctatgctgaggtccaaaactgtgatccgaatgccgcaggcatgtggaaaactggaccatggccagttctgtgccggccacaaagatctggactcctgtgacgaaccatctggcgcagccttgacccgtgaaattgactacattgggccaaaccggacagttctgtttggaatcgcgaactccgtcgaggtgaagtgctccaactcgcgaacttacaccgatgtggtgcaattgcatcaatggatcagtatggtaatctattcctccaacaccaatgatggtatggacaaaccacacaatactactcatctgcccgaacctgtttttgaattaaagagcacaagcttttcaaccaattctaggataaaataaagcttacataaactgtttattttcattttactaaataaatatatagcatttttttaaaccattttcttagaaatcgaaatgtaagttttacctaccatcttattaatttaatggccgcaaaggaagcgtagcgtggaaaatccagctttccacccacaactccggagcaaattggttcctggagtacccgctgatgtgtctgttatgtggagatgggttacgtaatttccaacaaagtcagtattagggtattgcacctggtaaaactcgagatcacgctgcagtaaaatgggcactctgtccattaagtttccctcttcgagcacctccattatgtaggtcctgtttcaaacactttaacaattaactttcaacggcaaacaaactgctaaatatgtgccaactaacaaacattttatttagttcacttgttgccagggaaacagaagattaagccaatcgaaagcgtaaatcggatatgaacagcgatattttatcaggacattcgaaaaatgcgaagcttaactgataactaaaacaaatatgaataataaatacattatactgaaattagtgcaacagtatcaataggttcgcatttagtatactaattatttgcgatggatcctagggaaatgatcaaaaccaacacataaaatattcgactaaccatctgaaagtatgctactttttcatgaccacgctgcactcaacctctcaattcttttaattcaattgataagaaccaggggagctcccctccctccctctctcctaacgcattcaattcagtttgcgactgcgataagctgcccacaaaagccgatttgtcccgctggttcagcattcagaatccgccgtcagttgataattgacttgcgactcggccagtcagtcgttccatcgatccggacacctaccaagtgagtaccttctagtggagatgctatcagtggatccgctctgctggggatctgaaaacaaaactttccagccagcaaccagagaacagacggagctgttatcgctcgataagagcggtatcagctcttaatcagtaatccataaatctcctcccgttctcctccgccagaacaacaattcttcgtagaaataaccctggatcttaacatgtccccataataaatagtatttaattcaatcacaagcttctatgaactatttaataaatctttatttaaataatttggtctgtagataaactataatctttgatattaagatactgaaaatgtggatcactgataacaaatttataatatatgtaaatatatgtttttaattatgcagcatgttggcacaattgagaaatatttcgaagctggcgctgccgcgccgcctcgttacccaaaccgccagctactcatcgtcctcgtcatatctcattgaccagccggagtacagtttcctgaaagaattgggactggagcgcgacaatccaggtgtttattcgggtcagtggcagggtcgtgggccatccgttaccagctacgatcccggaactggtcaaccgattgccaaagtgcgtcagggaaatgtccaggagctcgagcataccatcgggctggcggtggaagcctacaagcagtggcgacaggttccagctcccgttcgcggcgaaatagtgcgccaaatcggcgatgagctgagaaagtacaaggaaccactgggaaagctcgtctccctggaggtgggcaaaatctacagcgagggacagggcgaggttcaggagttcatagatatctgcgactatgcggttggcctctcaaggatttactccggccagctgatcaactcggagcgtgcggatcattcgattctggaggcctggcgtccgctgggagtggtgggcgttatttcggcctacaattttcccaatgctgtgttcggctggaatgctgccatcgccctaaccaccggcaacagtgtgctgtggaaaggagctcccagcactcccttggtctcggtggcgaccacaaaaattgtggctgaagtgctgcgtaggaacaatctgccgccggtggtgaccctctgccaaggaggaaccgatgttggtcagaccttggtggctgataagagagttaacctcgtttccttcaccggcagctgccaaactggtcgggatgtgggtgttgaagtgcagcgcagattcggcaaggtgatcctcgagctaggcggcaataatgccctaatcatcgatgaatctgccaacgtgaagatggccctggacgccgcacttttcggctgcattggcaccagtggtcaaagatgcaccaccaccaggaggattattgtccacgaaaagctgcacgatcagttcgtaaaggagctggttggtaaatataagcagctaatttccaagattggacaccagctcgaagctcaaactctggtgggtcccgtgcacacgcaacaaaacgtggagaactacaaggcggccatcgcggaagcgaaatccttaggaggaacggtggccttcggaggtaatgtcatccagcgggatggtttttacgtagagcccacagtgatcactggattgccgcacgatgccagcgttgtccatcgcgaaacctttgcaccaattgtgtacatcctcaaagccaaaaacgtggaccaggccatcgaatggaacaatgaggtggaacagggcttatcctctgccattttcacggagaacatcgggcaggcgttcaagtggattggagccaagggttccgattgcggtatagttaacatcaacaccaccaccaacggcgccgagattggtggagctttcggaggcgaaaaagccactggaggaggtcgcgagtccggatccgatgcctggaagcagtattgcaagcgggccaccattacagtcaatcactccggagaattggcctgcgcccagggtgttgtcttcaatgtggagtagaaaacacatacgatcaattttaatgtgctacaatttacaatactattacatataatgtccaaaactaaatgcaactgatataattcttcctattccgtgccgatttcaaagcgccagaagtccacctcaatatccttcgacttctgcttgtgaaacttgtagctggcgtcgatgttgtaccggagttcggcgaccactgagccgcgggcgccccattccagtgcctttttctgaatgtacgacctgcgaacaattaaaatcgatatttaaattggctttgatgtactattccacagttgtttaggcttggctattcttccataaaaaacaggaaggggtcgaataataagatacccttttaattaaagaactcatcgttttaatatgagtagcatatatattttaaaatatttaatttccataatttctcactaaaatctaaactattgatggaacgtgctgcatcttatccacatactttatgtgtaaagcagctgcaggcagttgggaccgctgcggcagcaaccacccccgcagacaggaaccactgcatctctgggaatgcggcggcaaaggctgggcggaccgcggtagtctcttcggaagcacagtctctcgcacactgtcccgccagcggacactcgaatgggggtgagacggcattggccgctgcccaggatttgcgcatcagtgggcatgggggccagaagaatcgccagcaccacagtgatgattagaaggctacgtgagaggatcatcttgctgctgacttctagttgctatctgtaacttgttggtgtttctgcggcgttttatagttgtgagcagcgctcttaacaaaacaacaacaaaagcagaaacagcggtaaggaagcacatttaccgaaaagcgggtacaattgtatctcttgtttactgtgccaataacaaaagattgcgcatctgtttataccagcagatattcttaaagtataaatctgcatatgtacattcatatgcc

SEQ ID NO: 42146 - DNA, 1785 bp, DROSOPHILA
atgggcactctgtccattaagtttccctcttcgagcacctccattatctgcccacaaaagccgatttgtcccgctggttcagcattcagaatccgccgtcagttgataattgacttgcgactcggccagtcagtcgttccatcgatccggacacctaccaacatgttggcacaattgagaaatatttcgaagctggcgctgccgcgccgcctcgttacccaaaccgccagctactcatcgtcctcgtcatatctcattgaccagccggagtacagtttcctgaaagaattgggactggagcgcgacaatccaggtgtttattcgggtcagtggcagggtcgtgggccatccgttaccagctacgatcccggaactggtcaaccgattgccaaagtgcgtcagggaaatgtccaggagctcgagcataccatcgggctggcggtggaagcctacaagcagtggcgacaggttccagctcccgttcgcggcgaaatagtgcgccaaatcggcgatgagctgagaaagtacaaggaaccactgggaaagctcgtctccctggaggtgggcaaaatctacagcgagggacagggcgaggttcaggagttcatagatatctgcgactatgcggttggcctctcaaggatttactccggccagctgatcaactcggagcgtgcggatcattcgattctggaggcctggcgtccgctgggagtggtgggcgttatttcggcctacaattttcccaatgctgtgttcggctggaatgctgccatcgccctaaccaccggcaacagtgtgctgtggaaaggagctcccagcactcccttggtctcggtggcgaccacaaaaattgtggctgaagtgctgcgtaggaacaatctgccgccggtggtgaccctctgccaaggaggaaccgatgttggtcagaccttggtggctgataagagagttaacctcgtttccttcaccggcagctgccaaactggtcgggatgtgggtgttgaagtgcagcgcagattcggcaaggtgatcctcgagctaggcggcaataatgccctaatcatcgatgaatctgccaacgtgaagatggccctggacgccgcacttttcggctgcattggcaccagtggtcaaagatgcaccaccaccaggaggattattgtccacgaaaagctgcacgatcagttcgtaaaggagctggttggtaaatataagcagctaatttccaagattggacaccagctcgaagctcaaactctggtgggtcccgtgcacacgcaacaaaacgtggagaactacaaggcggccatcgcggaagcgaaatccttaggaggaacggtggccttcggaggtaatgtcatccagcgggatggtttttacgtagagcccacagtgatcactggattgccgcacgatgccagcgttgtccatcgcgaaacctttgcaccaattgtgtacatcctcaaagccaaaaacgtggaccaggccatcgaatggaacaatgaggtggaacagggcttatcctctgccattttcacggagaacatcgggcaggcgttcaagtggattggagccaagggttccgattgcggtatagttaacatcaacaccaccaccaacggcgccgagattggtggagctttcggaggcgaaaaagccactggaggaggtcgcgagtccggatccgatgcctggaagcagtattgcaagcgggccaccattacagtcaatcactccggagaattggcctgcgcccagggtgttgtcttcaatgtggagtag

SEQ ID NO: 42147 - protein, 594 aa, DROSOPHILA
MGTLSIKFPSSSTSIICPQKPICPAGSAFRIRRQLIIDLRLGQSVVPSIRTPTNMLAQLRNISKLALPRRLVTQTASYSSSSSYLIDQPEYSFLKELGLERDNPGVYSGQWQGRGPSVTSYDPGTGQPIAKVRQGNVQELEHTIGLAVEAYKQWRQVPAPVRGEIVRQIGDELRKYKEPLGKLVSLEVGKIYSEGQGEVQEFIDICDYAVGLSRIYSGQLINSERADHSILEAWRPLGVVGVISAYNFPNAVFGWNAAIALTTGNSVLWKGAPSTPLVSVATTKIVAEVLRRNNLPPVVTLCQGGTDVGQTLVADKRVNLVSFTGSCQTGRDVGVEVQRRFGKVILELGGNNALIIDESANVKMALDAALFGCIGTSGQRCTTTRRIIVHEKLHDQFVKELVGKYKQLISKIGHQLEAQTLVGPVHTQQNVENYKAAIAEAKSLGGTVAFGGNVIQRDGFYVEPTVITGLPHDASVVHRETFAPIVYILKAKNVDQAIEWNNEVEQGLSSAIFTENIGQAFKWIGAKGSDCGIVNINTTTNGAEIGGAFGGEKATGGGRESGSDAWKQYCKRATITVNHSGELACAQGVVFNVE

SEQ ID NO: 42148 - DNA, 2766 bp, DROSOPHILA
acaaaggtgccgaactcgtcgagcgcctcctttgtggtctcacttatgtggatcttgagcgcttcaccattggactccattcgggaggcagtgttcacagtgtcaccaaacagacagtagcgtggcatcttcaggcccaccactccggccacacaggcaccggtgtgcaggcctatccttagcttcaaccgatcctccggacgatggtggatgcggaaattgtgcaccgcctccaagagggccagtgccaaacgggcgatctcccgggcgtgctgattgccatttcgaatgggcagtccggacacaaccatgtacgcatctccaatggtctccactttgtaaacatcaaagttctccacaatggaatcgaaacaggtgtacaggtcgttcaggaactgcaccacctgcatgggcgtgctctccgccgagatggcagtgaagcccacgatgtcactgaagtatatggtcacctggtcaaaggtctccgccaccactggctgtccgctgatgagctgggcggcgacgctttgcggcagcaattggtacagcagcttctcgcacttctttttctcctcgtggtagtcctgggtgcgctcctccaccagttcctccagattgttggcatacagttccatgcgcttcagcagattgtctacaatgtttcccgtctcgttgtctctgtaaagcagtcaaagttagtgaggaatccataactatggattcagttagtacttacttattaaatctgcgtatcatcgatttcagggtattaaagtccggacgctcggcaggatcctctgcccagcagcgacggattatgccattgatgtccgccttggtatcaccgtttggttcaagttcaggacggaatggtttctgcattctatgaggattgtatcccttcacgagttcgattatttctgatcgtacgacaaacaaaataacgttgaattagccttcaatttggaaatagttttgtgtaaacatgttatgtaaattattcgtgttaagtgcagttttatgttaacaccagactggatcctttggtggattccgaattcggacatctaaacaccgttccgcaatatgagcacgggaatggaatatctggacttggtcagcttctttgcacatgcaaagcctccgaaaccccaggaaatgaggccttgcaaccagcacgagatcctgctgcagctcatctgcaatcgccggcaatcgctgagcaaggcccaaatggctgatctcctgtggaacatgaccagtggtccgaaaaagaagctcaagagaaggcagtgcggcggcatggacaaccggaatccatcagaaccgaccgatattgaggtggtgttcgggtgcagggagaaaacaccaccttccaccatttcgcacagaggctgggaaagatcacgcatcgagtggctgcgcaagctggaggttcagcggaggcagtgctaccaggcgtggcaggaaacacccggacccgatgccagcatcaacgcaggtatgaagtccagcaagaaggagaaggaatgcggaaaatccccaataaagaacacgccatgcgagaaacacaacaaaaaccagaaccaagccggcggtagagagaaggacaagcacaagaagaagaccaggaccaagaggaagctacccggctgctgggccttcctgcccttcggatgcggcttgaacctcgccaacgattccagctgccaggacgtgccccaccgcagagagagttcgtgatttgcctttttcgaccagccagcactttgatttcgatttccagattcgctggcaccgcaattaaattcgcctacagacgtcgtctagtgccagatgccaaagttgcattctgcggcctaaggacgagtctgattcccagtcacggcctaatttgatgaaatcgtcaagtgccaagtagaaggcaaagtttttgaaatcggcgcggaactcgaagttggtctgcggttcaacagggcaatgtgtacttcaaccaggaagatagaacatcataaaggctagcaacatacatacttcaaaatacaagtactttgggtttcgtgcttgatgcaggatctttaattaaatagaattgctaagccgaaggctcctattttggtacatttttattagcagaacatttcgctgactacttaatttggtcttttaagttcgtttataaaatgatttgagtgaattaaatttcagcatccaactaattttttaatgtttaccctgtttaagattatacaaaaatattggcattggacacgggctttcactatttcgactgcgtattttgcagtgctcctccttgctcctccaaccacaaccgccttaaccaccagccgagtggccaactgacgggcgaaataaccgcaacatgtgcaaaaatctggcattaaaattccgcacagacaaaatcggccgcaacacgaaacggccaagtgaaaaggacactcgaaggacgagaggagggtatagaatgtgaaacacttgaatagcataccttgtggcgatttctcgtacgcacatctgcccaggtagaagggtccttgtcgcgtggttatctcgtgcacaatgattccaaaggcgtagacatcacccttctgtgtgccctccggcggacgattgtgctccactctcagcagttcgggggctgtccacaagagctctgtacgggaaaataagttacatatatatttaaaatatatttcgaaacttggaaaataatattaaataaaaaaatttacaaggaaattcttg

SEQ ID NO: 42149 - DNA, 766 bp, DROSOPHILA
ttcgtgttaagtgcagttttatgttaacaccagactggatcctttggtggattccgaattcggacatctaaacaccgttccgcaatatgagcacgggaatggaatatctggacttggtcagcttctttgcacatgcaaagcctccgaaaccccaggaaatgaggccttgcaaccagcacgagatcctgctgcagctcatctgcaatcgccggcaatcgctgagcaaggcccaaatggctgatctcctgtggaacatgaccagtggtccgaaaaagaagctcaagagaaggcagtgcggcggcatggacaaccggaatccatcagaaccgaccgatattgaggtggtgttcgggtgcagggagaaaacaccaccttccaccatttcgcacagaggctgggaaagatcacgcatcgagtggctgcgcaagctggaggttcagcggaggcagtgctaccaggcgtggcaggaaacacccggacccgatgccagcatcaacgcaggtatgaagtccagcaagaaggagaaggaatgcggaaaatccccaataaagaacacgccatgcgagaaacacaacaaaaaccagaaccaagccggcggtagagagaaggacaagcacaagaagaagaccaggaccaagaggaagctacccggctgctgggccttcctgcccttcggatgcggcttgaacctcgccaacgattccagctgccaggacgtgccccaccgcagagagagttcgtgatttgcctttttcgaccagccagc

SEQ ID NO: 42150 - protein, 194 aa, DROSOPHILA
MRPCNQHEILLQLICNRRQSLSKAQMADLLWNMTSGPKKKLKRRQCGGMDNRNPSEPTDIEVVFGCREKTPPSTISHRGWERSRIEWLRKLEVQRRQCYQAWQETPGPDASINAGMKSSKKEKECGKSPIKNTPCEKHNKNQNQAGGREKDKHKKKTRTKRKLPGCWAFLPFGCGLNLANDSSCQDVPHRRESS

SEQ ID NO: 42151 - DNA, 5510 bp, DROSOPHILA
atccgcacgtcatagtgccaccatatgtgttgcacgtaccgccggcttatttggcacatcgtggagtcacttgaagtttctggggcatccagctaagtacttttgacacttggttggatcgagaattttggcttggctgtggccactaactagagtcgtgtgaactgatatcgcgttacgtacgtaatcgtaataagtctgaataaaatggattttcaaacgttatctaacattaatcggctatagagttatgtacagcatgttaatttgacacttaaattgcgttactttggcttatgcgtttatatctgcaaattagatttgaaaccattcgcgcgacttcttttggaaaaagctggacagtttttccattaaaaatacttaagaagagttggcggcagttcgtttgttgaaatgttgaaagactttgagggaatgcaatgcaatggttccctcgggaaatccaaactatatgaaagtataaacgcacctaatacaggttgatttcagcttgaggctatccgaatcggttgggatctattgaaaactacatgtcgtatgtttgactggcgttgagatacaaagactacgagtgagtgttgccgttccataaactctagattctatcgctcggaagtggcagtggtttacattcaattgtatagtgccctagttgtaagtgttgtatatataatataggtttagtctctctatcaggccgactacatgttgtatagatttatgcactagttcacattgtaaatgcacacacatggcgtgtccaagtcgcgggtggagcctacacaaactatcgcacaggtcaatcaatccaacgatcaattaatcgtcagttgcgaatctaccataagtatttaagtactattagagccttgttatcactttcgatttgtaagtcgtttttggcaaggtcgtgggccacttcgtttttcccggtacccgccaatcctccaccgccgtccgcagatgacgacatcgccgtctagatgcgtatggacagcagtgagacattgcgcttgagcaacgtgtgtggccgcagctccatgctgcccgtatcccccatgtccgccatgtccacgcccatgtagctgctgtccatggttccacgatcggcaagggtgtgcaggctctgcgtatcgtagtcgtagttcaaatcctgcatgggcaccacctccggcagaaggtgtcgtatgtgcgtcggcgattgcctcagcttgtattgatttctgtggaagaagggaagcaggacaccaccaggttagtagctcccatcttgaagatcactgatacacagcatgcatgcatgatggatgaagagtagcctgattttactaagatatatctcttagttctagttgggattagtagaatcaggctttgcatgtaatcggatggaatggaagcttactctgcatcgttgttcttttccaagttgctacttctgcagatgtgcaaaacaaaatgtgtagtttaaacaaaaatgagtatacataaacacaatacttatgtcaaaggggcagaagagtaggccaaatcgttgaaaagttaaataacttaaagatctatcttggattaggtctagattacttcaacaagttggttctgtttgaagtattataaaacaaatgtgttccattaatgaggcatacaatctttaaataaacttcataagtccttgttccccttgttataagatttattatttaaccaaatgcatggcaaacacacctgcagtatgttttgctgtgccaaactggctggacaaaaaagcggatatacttgagttcaaggactttagtagcccccagattattacccactcccattagccactttctagataagccagccggataatgctgccaagtgcgctgcgaattggcctatcttctgagccctcctttgaatcgagcaattatgtacgtactttttgtgccggttgccattgaggcagatgcagtggcacgagcacatggacgaggtgttgcttccgttcagagattggccatcgtgtccctcgtagccgctcagaatggatccgttggatgttatcacatcgccctccagcttcacagccacttgcagcgcctgcaaggtggggattagtcatggtgttagacgggtagctaatgggatttccatgggggggtggtgttctgaatgccgagtgggtggagcagtattcgtgtggttgtggtgattggatatacttggtgctctttgtattcagtgtcgtagagtggaaagcagtttgtattttggatttttaagggttttttttttttttttggggagtggtgtggttcgaaagtattggaatctgaaaagccgcaatcacctcgttggtccataaactggacttggacataaactaagctcgcgttttgcattcagttcgttaagtttcgtttcgttaaaaagcaaccgaaaagatgcgaaataagaaaatattttttaattcgatttgatattattatcgggtagctctcgcattttgggcctgcattgaatagattgtatcaattaatttgttcaaacaattgtcaatataagtaaatatcgaaaaagtataaaaaccgttggtgcaagatcaagaattagccaagtgtgcagcaaagtggcaagcagatatgttacgtaaaaaactatagttcacttatgtatgtaacaagttgttggtcgaaaatatatacgagagtatggagacagatggaagttatacgaataaaagttacaaaactgttgtatattagtactatggcatctagggtacagtgaagcgttgctatagggtaaggtaagaaagcggtagagtaaagcgtttagactaccaaaacgaatgggtttggcggtggagggttgggaaatgggccgcctcgcttggccgcattaattgtatgatagatagtaaaatccgagaaaaaaaaacagtcctcaagtctacggtaataggtaataggtaataggtaattggcaaaaggtaataaatggcatgagttgctcgacttactgccgcatcaagaactcggatctcacctgcatggcctgggcctcgtcgcgtcgctcatcctcggtattcatcgtaacaaacctaagtactaacaagttcagcgaggcggccacaatggccaggccaaatagtataaatatcagtgcgaacatcacgtattcgggcttcctgttcagtgcattgtcccgctgcagggctaccatgtcgccaaagcctaaaaaaaaaaaaaaaaaaaaaaaaaaaaattccattataatgcagtagttcatattgcacctattcctcacctatagtggttaaagtaataaaacagtaatatactgaatcgaagtagctccagccctcaaatttggaaaaggccgcagcaccgccagctatcgtcagcgaactgagtgtggtcacaacacagatgaggtccacctccgaggcgacggtcctcttgcagcgcagcgaggagcggaccgccttgataacatagctataaaatcaaataaacaattaatatgccacttaaaggcattaaaactacaatagctagacccacctgctcagtctattcactctttctccgatgctctggaacataacgagacccaggggaatccccacgatggcatagcacatggtgaagagcttcccgcccaccgtgctgggcgtcgagtgtccgtagcctgaaatgtgggtgatagtgatgcggggtcatgtcaatatggtcatgaatccttcacaatgctggccagaaaactcaccaatggtggttagcaccgtggttgcataatagaatgcaccggtgaatttccattgctggccggccttgtgcgattccgatttgagcaccacagtctccatgactttgaagtcctcctgtgagatattgtatttgcgtattatcatatcctcggcatctgcaattagtaacgagcatgtcatgagtgcctgtgcctgtgcctgcatttcacacgaatctcgacggcaggtaatggtagcaaactgtgcactcgaacaaattggggattccaaagtgcaatttaatggataacaaaacagatgatgcaaaaagctaaactgtttggtccttcgagccggattgttatgttgggttcagccagtaactttgttctgcattcaacttttcgtgcaattcattgaacagtagaaatcgtatagctctgaatttgttttataataataataataataataataaaaaagctatagctaatggaactaactgaactattttatccttcgaggcggattaatggacttgggcttagccagtagctttatttttcatactaactcaaccttttcgtgcagtgcaccgtgctgtggcacttgagattcgcactcaccttgcagcgcctcccaacgacgcttttccgtttccgattcgagggcgtcaaagacggcggcgccgacaagcagataggtaaatgtacacacgatcaaggatatcgtgcgcacattttgtttcttcattcttcatttaggcgagtaatgggtgagttgatcctttgttcagtggcgtcgcctccgcttgcggtacagtttgcagggcttttcctggctgctgctgctgctcacctggctaagcgggctgcacctgccgtcgtccatatgaatcctgctcgtcctttccggctgccgcgactcacgctcaaaggacaaactacccaaattgggttacgacccaagccgacacgacggctgcactctagtttcgtagtctctgctgcttttcttttttcggcaaactcacttagcactttgattgcattaaaaataatatcactgggggccaacgggagtggagcaagtgctggtgctggtgctgggttcacgttttttttttttttagtcggttagctcctggcgaggaggcgatggtggcgtttatttctgtcacaggccgtgggcctttgtcctcgtcgcgttcgttgcgccgtccatgtccttgcgttatttatgctgccagtgaacgtagacgtgggtgtgtgtgtgctagagctgctgccagtgcatgtgcatgtgcgggccatgctgcaatccttcatcgggtggcggcatcggcggcgctgctcctgctctcaaggattatggtgccactggtggtggtggtggtgatggtgctggtgctcctgctgatggcgggcgccatcgcgctgcacttgtagtttctgccgccgtgtccttcctgcgtgaaatgactcgaattagggtctttctttttatggccgggctaaaaataacgactgcaactaatctgtcatcatcaataccacgctaccactacactgggttgctcctatggagcttcgcctatcatcccagtgttgtctataaaaggtagtgattttgcaatatgagggatcaataatgttatatctaaggattttcaatgaaactcccacaaaaagatgtggtattaatatctttttcttgctttctcatatgtcatagcatacttttaagcaccttt

SEQ ID NO: 42152 - DNA, 1197 bp, DROSOPHILA
atgaagaaacaaaatgtgcgcacgatatccttgatcgtgtgtacatttacctatctgcttgtcggcgccgccgtctttgacgccctcgaatcggaaacggaaaagcgtcgttgggaggcgctgcaagatgccgaggatatgataatacgcaaatacaatatctcacaggaggacttcaaagtcatggagactgtggtgctcaaatcggaatcgcacaaggccggccagcaatggaaattcaccggtgcattctattatgcaaccacggtgctaaccaccattggctacggacactcgacgcccagcacggtgggcgggaagctcttcaccatgtgctatgccatcgtggggattcccctgggtctcgttatgttccagagcatcggagaaagagcggtccgctcctcgctgcgctgcaagaggaccgtcgcctcggaggtggacctcatctgtgttgtgaccacactcagttcgctgacgatagctggcggtgctgcggccttttccaaatttgagggctggagctacttcgattcagtatattactgttttattactttaaccactataggctttggcgacatggtagccctgcagcgggacaatgcactgaacaggaagcccgaatacgtgatgttcgcactgatatttatactatttggcctggccattgtggccgcctcgctgaacttgttagtacttaggtttgttacgatgaataccgaggatgagcgacgcgacgaggcccaggccatgcaggcgctgcaagtggctgtgaagctggagggcgatgtgataacatccaacggatccattctgagcggctacgagggacacgatggccaatctctgaacggaagcaacacctcgtccatgtgctcgtgccactgcatctgcctcaatggcaaccggcacaaaaaaagtagcaacttggaaaagaacaacgatgcagaaaatcaatacaagctgaggcaatcgccgacgcacatacgacaccttctgccggaggtggtgcccatgcaggatttgaactacgactacgatacgcagagcctgcacacccttgccgatcgtggaaccatggacagcagctacatgggcgtggacatggcggacatgggggatacgggcagcatggagctgcggccacacacgttgctcaagcgcaatgtctcactgctgtccatacgcatctag

SEQ ID NO: 42153 - protein, 398 aa, DROSOPHILA
MKKQNVRTISLIVCTFTYLLVGAAVFDALESETEKRRWEALQDAEDMIIRKYNISQEDFKVMETVVLKSESHKAGQQWKFTGAFYYATTVLTTIGYGHSTPSTVGGKLFTMCYAIVGIPLGLVMFQSIGERAVRSSLRCKRTVASEVDLICVVTTLSSLTIAGGAAAFSKFEGWSYFDSVYYCFITLTTIGFGDMVALQRDNALNRKPEYVMFALIFILFGLAIVAASLNLLVLRFVTMNTEDERRDEAQAMQALQVAVKLEGDVITSNGSILSGYEGHDGQSLNGSNTSSMCSCHCICLNGNRHKKSSNLEKNNDAENQYKLRQSPTHIRHLLPEVVPMQDLNYDYDTQSLHTLADRGTMDSSYMGVDMADMGDTGSMELRPHTLLKRNVSLLSIRI

SEQ ID NO: 42154 - DNA, 5205 bp, DROSOPHILA
atgtcaaaattaaaatagcctgatttactacagcactcaggtgaagccaaccacaaattgaatgacaggcaagaaaatccaaacgtctatagttatggactatcgaaaaaggtccaaaaatattgttgccacatttagatgattcagcattattggatgcaaatgggccaataaatcgatagggtttgaatccttaaagcgtaaccctataaatccctataatatcgcctcttttgcttcgtagtcctagcaaaaaaccctacttatgcattattagaagaaaaaccccattgatctcataagaatttagttcgtaatacaatccagaaagctaggtccttcgaaaaccggctataatccactgaacatttatggtattcatagaacaaattgttcttggtagtgaaagttcttgtcacttttagatgattcagcattattggatacaaataggccaataaatcgatagggcctaaacccttatacgtaaccctataaaatatcgcccccagaaaataaaatacagctcttgttcttgctagtaaaagttgtactttattgaaaaattcagaaacaaatgaggtgttagtagaataccgactagttaccttcacttacctccgctgtacccaccaagttagccagaagggagccaccaaccaaagtccaccagtgagttcttcctgggccaccgcttgctttgcggtctaaaaccattaactaatacctggtggaaacgaaccggtgcgtggagcagcccagatttcgtatacggacccgggagggagcttccgtccgtagcccggccagtcttgcaaagaaatagtcagtgcattagtatgcggcggtttgcccgggggttaggtggtgggggtctctagtgacggtaattagccctgcccgctaccctgccgatctgggatggatcggaaaacccggattttgctgcagttgctgctcctctttgctagggcattgctcctgtgattatttcgtttcgtttcattttgggtgggtaggtaacattggttaggattttattttgcttgtatctctttgtcgctttcgtttcactcgtaacgaactaattacagaatgtttgtgatatttgtttagcgtttttctttttagtctggcttaacgtagcatctacttcttagggactaacagagttggtatgcatatatggattttgctcgctaggacaccatttctcggccactgtgcagcctgtacacaaatgtgcgtggcattcgcatttcaggagttgggatcttacttgccacaaatcataaaggttcttagttgtacaaaaaaagtgattacaaaatatggtactatttgatttcttacatttcgctggatcgctaaaaacaataaaatcatgaataaatataaagaaagtgctctaccttataacacccttacaacgactgaatctcaaggagaatccgtcgccgctcagttggtagtcaattttgtacaataaaattattgtttaatttatattttgttgtgtttgtttcttttgtttgtttatggttaaaactaagcgttcggggttcttaggaccctaaacataaatcgatcagcgaattattaatggttacaaaagagagatagcagcattcaaactgtggacaagtggcgtcgattggatttcgtttcgtttcgcttttggctgttttgcttgacgcataatcatttgcttggtgcttttgacaagtggattatggctatagcctgcaggttgcggccggacccaaacctgattgattgatttatcgtttgcatttgcgcacggcctggttcttggttctgcatcttgatttcttggttctgatcttgtctgcctggtctgacacacacatgctactgattgcctgcctgtgaatgtgcttgtccctctgcatctgcctgcctagactgcctgtttgtcgtctagcttgaactgacacactctctctctctatgtgtgtttacctagttgcgaaagaggagaaaattttgcattagcttcgaatcgttccgaaatgagtttgattgcatggctaggctaccaactagctgccaataacgaccaaagatccgagcgtttgagattgtacgatgggataggacctgtcgtccaggttatctatatttaccttgtctagtaacgtctattgccgcctcccatatttccaccctggccaccacctccggtgttgtagttgttgccagcaaagccttgacctccaccctggttacctgtaaaaaataaatgcatggtttaagtacattatgtacattatggtcaaatcacttaataacccaacatacccttgttgaatcctccaccaccacctccttgactgtaaggagctggacggttgttgccaaagttgctgttgcgctgtggaccgccgccgtagctctgctggtattcatttccgaagccaccgccaccaccacctccaccaccgttaccgccccagctgccattgctgtttccgccgccgtagccgccgccaccaccaccgttccagccgccgttgccgccaccctggttattccatggaccacctccgcttccgccttgctgattccaaccgccagagccgccgccctgaccgcctccaaagttaccgccgctgttgccgaatcctccgccgccgccagctccgccccagttgcccccaccgttctgtctgttctggcctccccagccaccgcctccctggccgcggtcaccctgaccaccgcgaccgccagctcgaggacctccgcgtccgccacctccgccctgtcgatccatatcctgcttggcaatagccttcttcacgtccagggtcttgttcttgatggagtgggtcttctgaaggatgattttgtcaacgggatcgtagtcatcgaactcaatgaaggcgaagccgcgcttcttgccggtgtccttgtcggaaacaatgttcacgctcacgatctggccaaagtccttgaagtactcgcgcaggcactcttcatcgtgatcgtctcgaagcccgcccacaaagagcttctttaccgtggctcccgcattcggggaatcgatctcctggcgtggcacagccctcttgggctccacggtgcgtccatcgatcttgtgtggcctggcattctgcgcattgtcgatcatgtacgactgggagtacgtgatgaaaccgaagccgcgagagcgcttcgtcttgggatccttcatcaccaccacgtcgacaatgttgccccacttctcgaagtgagccttcaggccatcatctgtggtgcggtagtccagtccgccgatgaacagtttgcgcagctgctctggctcggtgatctgcgggtgaatttcaaatgcattagctaaagacgttctataatttaaataatttctaaaaacaaaaaaaaaacccattgattcgaaaataagttgtaatattaaattaaattaattgatttctttggacaaactttgcgaaaaatgtataaatttatataataaaaaaaaaaatcatactgtatctaaatgaataaatgtataaaaaatatttaaatgtataataagttgctgtaaatttaataaaaaaataagttgctgtcaataagtcaataagtttatgtcaataaaacgataaaagtgcaaaatcatccttgatcaacaaggatttgccattgtttataatagtaatttacctggcgagaaaaagccgctcgccatattttttttttttttttttagtatttgcaccgccatgacagcccgtatatgtgtatgtatgtatgaattttcgttttcttttttatcaaacagccggcaacttttttatcggaaattgcttatatttctcgccaaaagaggtcgataaacttttagctggctaaattcgcacagggatcgatggcccccataattcggtaaaaaagcggcgtgaatgtatattatacacgaatattgtcggcgtcgacattttgcactttcacgcgcgatgaacgatttacaaacagcaattggtcattctgcaactcacctcttcaccatcgtcgtagtttccgttggaatcgttttgttccgccattctctccttggttgttcaagaagatggaaagtttaaacaccgaacgcaggaaatattttttttgtttttgttcttttttgacggcagactggcaataaatgaaatgtacagcacgcacaatgagaatggagtgagcagtatgaccaggtgtcgagaacggggtaaagtcggaaaatcggacgccacgtggaatcggaacgattgtttcggtgcgttaggggtgttcctcgacaattaagctgatgccacacttgattttatatatcttcatataaatttgtattcgtctagtaagggcttaaaaatattagacaagtttattgtatatatttctgaacaaacggatttgaatgtattatctttataaatggattatgataattactaccacgataacccaagaaacatttaatatgtttaactttttagctaaatatgtattattattaataccgcttacataactctttctgcgagcattcgctttagctggggcgatggaaggcttcactttaagagataacttgtaaattattttgtattgaattgtatatttgtaagtagccagctaagggtcaatcaatattacaattacgggatctatgaggcatttgggaataaaaaaagacatcgtgcgaaataaattaataaatccagaaacattttatgtatatcatcaaatcagaaacgttaaaaaatgctaatgagtgcttgctagcagatatcaaaataaaaaggttgttaacagtatattcaaatgctactactaagtatatttaatgtttattcttttcatagcggaacacgaacagcaactggaatacccttaacgcagcgaaacgcattgcccgcccaaaatatcgataggcgaaaaagtatcgttccattccgcctttggaatgactgtcaaacatcgctttcgtctgtcactttcacttccgtttgtgtcgagtcgcttgcgttttttcgtgtgggaaagcctgaaaaagagagagtacggcagcgacttaattgtaaatttgccacaaatatccttcactgaacggtacgtgctagtgagtacgcttaagtgaagaacagcgcgtatttcgcgttgttaaattaactcgtttttgcagcggttctgtacacc

SEQ ID NO: 42155 - DNA, 2248 bp, DROSOPHILA
actccattctcattgtgcgtgctgtacatttcatttattgccagtctgccgtcaaaaaagaacaaaaacaaaaaaaatatttcctgcgttcggtgtttaaactttccatcttcttgaacaaccaaggagagaatggcggaacaaaacgattccaacggaaactacgacgatggtgaagagatcaccgagccagagcagctgcgcaaactgttcatcggcggactggactaccgcaccacagatgatggcctgaaggctcacttcgagaagtggggcaacattgtcgacgtggtggtgatgaaggatcccaagacgaagcgctctcgcggcttcggtttcatcacgtactcccagtcgtacatgatcgacaatgcgcagaatgccaggccacacaagatcgatggacgcaccgtggagcccaagagggctgtgccacgccaggagatcgattccccgaatgcgggagccacggtaaagaagctctttgtgggcgggcttcgagacgatcacgatgaagagtgcctgcgcgagtacttcaaggactttggccagatcgtgagcgtgaacattgtttccgacaaggacaccggcaagaagcgcggcttcgccttcattgagttcgatgactacgatcccgttgacaaaatcatccttcagaagacccactccatcaagaacaagaccctggacgtgaagaaggctattgccaagcaggatatggatcgacagggcggaggtggcggacgcggaggtcctcgagctggcggtcgcggtggtcagggtgaccgcggccagggaggcggtggctggggaggccagaacagacagaacggtgggggcaactggggcggagctggcggcggcggaggattcggcaacagcggcggtaactttggaggcggtcagggcggcggctctggcggttggaatcagcaaggcggaagcggaggtggtccatggaataaccagggtggcggcaacggcggctggaacggtggtggtggcggcggctacggcggcggaaacagcaatggcagctggggcggtaacggtggtggaggtggtggtggcggtggcttcggaaatgaataccagcagagctacggcggcggtccacagcgcaacagcaactttggcaacaaccgtccagctccttacagtcaaggaggtggtggtggaggattcaacaagggtaaccagggtggaggtcaaggctttgctggcaacaactacaacaccggaggtggtggccagggtggaaatatgggaggcggcaatagacgttactaggtgtcagttcaagctagacgacaaacaggcagtctaggcaggcagatgcagagggacaagcacattcacaggcaggcaatcagtagcatgtgtgtgtcagaccaggcagacaagatcagaaccaagaaatcaagatgcagaaccaagaaccaggccgtgcgcaaatgcaaacgataaatcaatcaatcaggtttgggtccggccgcaacctgcaggctatagccataatccacttgtcaaaagcaccaagcaaatgattatgcgtcaagcaaaacagccaaaagcgaaacgaaacgaaatccaatcgacgccacttgtccacagtttgaatgctgctatctctcttttgtaaccattaataattcgctgatcgatttatgtttagggtcctaagaaccccgaacgcttagttttaaccataaacaaacaaaagaaacaaacacaacaaaatataaattaaacaataattttattgtacaaaattgactaccaactgagcggcgacggattctccttgagattcagtcgttgtaagggtgttataaggtagagcactttctttatatttattcatgattttattgtttttagcgatccagcgaaatgtaagaaatcaaatagtaccatattttgtaatcactttttttgtacaactaagaacctttatgatttgtggcaagtaagatcccaactcctgaaatgcgaatgccacgcacatttgtgtacaggctgcacagtggccgagaaatggtgtcctagcgagcaaaatccatatatgcataccaactctgttagtccctaagaagtagatgctacgttaagccagactaaaaagaaaaacgctaaacaaatatcacaaacattctgtaattagttcgttacgagtgaaacgaaagcgacaaagagatacaagcaaaataaaatcctaaccaatgttacctacccacccaaaatgaaa

SEQ ID NO: 42156 - protein, 385 aa, DROSOPHILA
MAEQNDSNGNYDDGEEITEPEQLRKLFIGGLDYRTTDDGLKAHFEKWGNIVDVVVMKDPKTKRSRGFGFITYSQSYMIDNAQNARPHKIDGRTVEPKRAVPRQEIDSPNAGATVKKLFVGGLRDDHDEECLREYFKDFGQIVSVNIVSDKDTGKKRGFAFIEFDDYDPVDKIILQKTHSIKNKTLDVKKAIAKQDMDRQGGGGGRGGPRAGGRGGQGDRGQGGGGWGGQNRQNGGGNWGGAGGGGGFGNSGGNFGGGQGGGSGGWNQQGGSGGGPWNNQGGGNGGWNGGGGGGYGGGNSNGSWGGNGGGGGGGGGFGNEYQQSYGGGPQRNSNFGNNRPAPYSQGGGGGGFNKGNQGGGQGFAGNNYNTGGGGQGGNMGGGNRRY

SEQ ID NO: 42157 - DNA, 3396 bp, DROSOPHILA
ccaccgtgagctgggcgcccagcagagtggaagcaatgctgagcattccgcagccgcagcccaaatctcccaccagctttccctcgatgtcctcgtgctgcgactgcatgtgatgagccatgcacgcggctatgtgcggcggagtggggtactgttccaacaggatcttgggctgctcgaaaccgtcaacgccctgcaggtactcctccagtttcctcagcttcaaccgggccattgtggatccggctatttgctgatactgtggctgggcggagcgttcggagtagtgggcgtggtcgcaggcgacggcagcggctccagacgaggcagcacgggtataaagctatttccaaaatacgaatcctgaggtataaagaagcccaaagtcgtagagctcgttggattaaatgcagagcgggcggtggatgtggcattggtggcaatgcccacgcccgcctggaagtctggattcactgtcgtcggctgtcccagcaactggggtgcgggcatctacgatagaagaccaggtaaacacattttccgatcggcatgttcccaacgaactcacctggttcggcggactcagaccaaggtttatgatcccgcccgcgagcaactgcttcttcgtctggatctcttcgagtatcttgcggttcgtctcggcttgctgggcacttgtggtgggaaaagccatcaaataaactagtaaaagtctgaactatatcaaaaacttcttgtagactgctgctcctgccgctgcctttggcattttgcgagcagtgtggtcacactggcgagtactgtagtgtggcggaaatagtagcggtattcgaactgaaccaaatgtgcgaataaacaaaaaatctgcaacaaacaagagtgttaagcgaatattgaatttgtgcttaatatatatataatttgtatttaatacaaatcaaatattaataatattggtgaccttttggtgccacttaagtttgaagtattattagcattcctctatttggtcactctgcaagtcttacaacgtgagcagacaacaacaaaattacatgtttatttggaataatcacaaaaaacaaaaaacttaccaacttagtggaataatcttaggaaatatctattaatttgcgcgcaatccgtgcaaaacaagtgaagcaacatgagtatgagcgacgacgaccgcgacatagacatcgaaagtgacgtaagcaaggcgtagaggaaaatactgatacgtgtgtttaatattgattttaatgccaaattaacgactttttaggaggacggggactcggacactggcttgggatcctcgcgacacacaaacaccgccaatttcacccaggtgactatccatcatgcataaactgagtgggaaaaagcgactgcgcacattgccttttgttgataaacagaacgcacacgtgttgttgttgctgttacagaatcgtgattacgatacagcagagttcacagcaataggattcgtaatcgaaaataatcttagagggactgaatatattatatattactatttactaacttatctttctgttcatattgctttgagaccattttgttccatttttgttattatttccatactctgctgtatttacgatggaatttcctatatgctaattttaatgtttgtttcaaggccgaaaagcgggcgcaccacaacgctttggagcgaaggcggcgcgatcacatcaaggagagcttcaccaacctgcgtgaggcggtgcccacactcaagggcgaaaaggtaatccagaagagcaacaggtgacacagccgggctcattttctgccaagaaaatcccataagtccataccagttcgttttacaataaactacattattgcttgtcaaattaagcaaatcgcataaaatatattaaaaaaatccacaccctgtgtgatgaagctaataagaagtagtaataagttaataatacatatcttttgttacaggcgagtcgagctcaaatcctgaaaaagaccaccgaatgcatacagacgatgaggcggaagatcagtgaaaaccagaaagacatcgaagagatcaagaggcaaaacaacataatagctaagcagagtgagcaactaactactacaggttattaatgaacttcctgctaagatactttatatactttccagtacaagcactggagagttcaaatggggatcagttcagcgaatttctcagcgacgaggaagtgggcagcgaggaggccgacgacgaagacctcgaccaggacttcagtagacgcaataaaaagatgaagaccttccacgcatagccgctgatccaatccaaagtgctgcttacaggcgtgttccggcttccgttttcaccgacattctgaattcttacgtggatttagttcaactttgagttgtgttatacgaaagcaatagccctcgaaaagttgtgaaggaaacggttccaaattcgaattaaagtgaaaattaaaattatgtggaaatgagaacagtaacaagtccgataatcataatcatcattagctgtaagcccaaaatgtaacccacccaatcgaccttaatttgtatgcgtgcgtcttttctactttcaacaaattgtcactctgtgcgcaaagaataaagtaaactagtaagtacatatttttagaaaaaaacaggggcttcttgttgatgaattctattatggaaattggaaaatataacggaccaattgagtaacatgagtgctgcttttgaagaagtttataaatgataaaaggattgacattttatgcgattagggctaaataaaatcagcaatttttgcaagtaatttgatcacttgatactggaaccttcccttatttatatctggaatctccttttgcttattactcgagaactataaagaacgagctgaaaaaactttaacgtacgtatctgtctttctaatattggtttgaacttaagaaatatatttaactttatggttttaagccaaaagtgaaccgcattccgaaccaaatacaaccttcgactacactaaaccatacaaatatgtgggtatatattttataaaattaccaacaactacttaaactttagggttatccagaggattaagaacacgacgaggatgaagaggaacatgtagcacatttggcgagcaccaccgccctgtttggccagtcgcaccacccgcgtcatcgcgttgcccagaaatccactcgtccggtccatgtcgtcgtcgatgccgcgcagcagcttgtcctggtagcgcacctcattgcctatatcgatggtgagggacttcagggccccgatcttctgcttcaactcctccgccgcctgctcgttttccgcctccaaggcgtcgtggctcgcaggatggggccctga

SEQ ID NO: 42158 - DNA, 732 bp, DROSOPHILA
ctctatttggtcactctgcaagtcttacaacgtgagcagacaacaacaaaattacatgtttatttggaataatcacaaaaaacaaaaaacttaccaacttagtggaataatcttaggaaatatctattaatttgcgcgcaatccgtgcaaaacaagtgaagcaacatgagtatgagcgacgacgaccgcgacatagacatcgaaagtgacgaggacggggactcggacactggcttgggatcctcgcgacacacaaacaccgccaatttcacccaggccgaaaagcgggcgcaccacaacgctttggagcgaaggcggcgcgatcacatcaaggagagcttcaccaacctgcgtgaggcggtgcccacactcaagggcgaaaaggcgagtcgagctcaaatcctgaaaaagaccaccgaatgcatacagacgatgaggcggaagatcagtgaaaaccagaaagacatcgaagagatcaagaggcaaaacaacataatagctaagcagatacaagcactggagagttcaaatggggatcagttcagcgaatttctcagcgacgaggaagtgggcagcgaggaggccgacgacgaagacctcgaccaggacttcagtagacgcaataaaaagatgaagaccttccacgcatagccgctgatccaatccaaagtgctgcttacaggcgtgttccggcttccgttttcaccgacattctgaattcttacgtggatt

SEQ ID NO: 42159 - protein, 161 aa, DROSOPHILA
MSMSDDDRDIDIESDEDGDSDTGLGSSRHTNTANFTQAEKRAHHNALERRRRDHIKESFTNLREAVPTLKGEKASRAQILKKTTECIQTMRRKISENQKDIEEIKRQNNIIAKQIQALESSNGDQFSEFLSDEEVGSEEADDEDLDQDFSRRNKKMKTFHA

SEQ ID NO: 42160 - DNA, 7376 bp, DROSOPHILA
aatatgatctttagatcatccggctgaagtcccaattgtggtgccaccagttcctttacgtttttaatatcccactggggctccagattaacggtcagcgttttgcccgtgttcgtttttacataaatactcagcgtgtgcgtaagggttttccctccaaattgcaacagctccagcattttgcgtacaaaagtggcaataaatttaaaaataaaactcatttgttatcagctgatcgggtttaattttagtgcagtgtatatgcttcagtgttgccaatcgttgtttacttacgcgttgccaaacaccagctggcagccattcggaggaaaacgtggacacgcagaaagcgcacaattgaaaacaatttttgtgaagaagtcggaggagtataaatgtaaaagttttatggaaatgtcaggactaacttacagagagatcaatggcgacctattcaaatgccaaagggattattccatgtgccactgcgtggctgccgatttgcgaatgggcagaggcatagctgtaaagtttcggtaggtaatggcttagtgtttttaataaaatggtaaatttgcctattttccagaaacaaatttggacagttgttgaatttgcagagacaaaatgttcagccaggcggcgtggctgtccttcaggaccagcagcgatttatttactatctgatcaccaagaaatccagctggggaaagcccacctacgaacttctccagagttccttgatcgccatgcgaaaacacatggtatgtttatgtatcttctataagaagttatgatatacgaatctttctaccatttgcagatctcccaccaagtacccaagctagccatgccccgcattggatgcggtttggatggcctaaactggcccaaagttaaggaaataatttgccaggtttttcaagcggattctgttgagctggtcgtttataattatgttgctatgaagtaaatggctcatattaaactaaacgatccattattttccctgtggaggcacaaaattgtagacaacaatctccagcggctcttggccaaaaacgtactcgaggactccgctgactttttcccattccaagccatcaattccgcagccaatttttgggatggccagcttattcacgttgtttttgcgctaatgtaggaataataaaatgtagctcttattaatataacttgtctaagctttatatatataataaataaaagcagggatacattccattcataaaagatatgtatcaggcatgtatttaccatatgctcacgcatctgctccaaagatgcttgtacagattcgtaggtgggctttccccagctctgaggcttggttactaggtagtaaatgtaccgctggtcatccttcagcaccgcaatatctccactgcccgcttgttgggcttgcagctcgtccaaccttccgaataccttcttgaactgcacggcaattccagcacccatcgcaagatctgcgcccacacagtgcgccaaggaataggtcttgggggcggaaaacagatccccatccacttcgcttagggtgtactgaggtttggatgacattccgactacaaaagctcgccgaaatgcgctacgtagttctagaagtttgggagaatacatttagtttaaataagggttttagatctgtctgacttagtgtaacaggcagctactagattaatttttggtcatacgataacactagataatggttcgtaagggtatatatatgtatttatcaaaactccaatctttggttaatatcctctcgaggacgtgttttatttattaatacattaaatacagtataaataaccaaatatggaaactttgtgtgctataaaaacctcttaggtgtatcgttcttatcaactatataagtatttggtgcatatgatgccacaagtcccaagcaaaaccatttcgagtgtcaaacaaagatggctatatacattaaaagggagtcttttcgcgatgaagcgaatttcttgatccactaacggacctcgatggcaaatggatggtcttcatgtgccggcaggtgggacaaaccacgttcaacgtgtccttaaccatttgtggcggtgtgtagaagaatgcaattatgtccacgctatcctcggcgaaaaccagatccagcagactccgcacgcgcaaccaatccaaacggtcgatgccgcatccaagtctgggaatggccaacttggtcactccgtgctccctctgaaagagagaatatagcaagcatatttagtatccagtatcttgctctaatacagtttggtgaacctgatcctaactataatgtttcacctttctctttattttagtaatgcagttttggtctgtaagcccttaaaaatacaattccttaccatatgttcccgcatggccagcaatgcgtagtagagagctgcgtaagtgcacttttcgtggctgcgctccttggtcaccaggttgtagatatgtctaccatcctgctccagaactgccacatttccggtatgcttgtgttggcgcttcagctcatccacttgtccgaatttgcagcggaactgcagatttatgcccgcacacatagcgaagtccgcactgacagagtgcactaaggcgtagttttccggggcgctgaacaggttccccctggcctccgtaatctgacacttgggagcagccagctgtggattatctgagtattaacccactgttctttgttaataagccatgttggatggctcacctccttggacatgtcttcgtgctcacagatgagtatctcgatgggatactcgctctgggagaaggtctgctgcaccagacgcttcacgtgcttccattcaagtccatcgttgccgcagcagattcggggcatagccactttggtgatctcatggttgcgctgcagagacactacagtgagaattgcccaatgcactattttcaaaacctcggacttgatgacaatttggttctgagggcttcacataatttgacggacaggcggacgaggcccgattgattcggctagtcattctgatcaacaatatatgtacgtattgcttatagggtcagaaacataacattgggtataaaaagaagctgactttactttctcttcgctcaattatcattcaacccaatgataatattttataaagaaaaatcgacgctaagatgggaagatccatttgtccgattgctactgtgtcccaaagtccacataaattaactgcatgcccatttcatgaaatcgttttttgactaaacatgagacacaagcgaaattcttttggatgacaaaaggggcgaactgtttttagatactcactgtatcgcaatgtacaaatgaattaactgtaaattgacgagggcagcaccaaagaaaccagtttcccaagcgtcgaattgtgtttactctttggggaaatgtcacttgtttgccgggaaacccccactccaccaccaagacgacggctaaaaagcactcaccatatgctcccgcatgcagatcaaagctgcctggacatcgccgtaagtgctggcctcgtagagactcgacttggtcaccagatagtatatgaatcgggcattgtgctccagaacggcacagttgcctctggaaacacttctttgccgtagttcatccacatccccgtagatcagggcaaactgccaggcgagagttccccgttccgccgtaaaggatgactctacggcatgggccaaggaatgtgtctgcggtgcgtggaatatgtccagcttggactccactatcttcacgttcgccatggcgcactagctctctacagagtattatatatccaactgcaattaagctgaaattattctgattaccagccgaaacagaagctctcaatgccaaaaatgattttcgtacttacgtgcacgcagcgctggaaactttcacgtcgaggtcaaaactcgcgataaaaactttttcgacttcggaatggttttgactgtgtgtttttgggttctgcacagaaacctgcacaaaaccagaatgaaaacaaagctattaacggattctgaacagcaagcggctagttggtagcttgtttattttggcgattcgccgatttcccactcccaatttacaatgccgtttggaggttactatttaatcgactgcctcggccggcggtctgcagcggaatgcgccatcggagctcgatgtggatgtgggcatgggtatggtggtatgggttatgggttatgggtgaagcgacgtgccgggcgaaagcccagcgagaatcttcgagcctcagtgacaacatttcgcccagaggcgccgccgcggggctccaaatgttaatgattgcactgtaaaaaacacatcgttttccacttaatactatacgacttgagttattattttattttatatatgattattaatctattgtgtttatcgtggtgttagaaaattcattttgtcatttgtttgcggagtaaattgccaagcacagatggatttgggttttcaaaatggatcatgttttcagacctagaaagttaaagcgggcgaaagttactgaactcgttttgaatctttttttgaaattttatttttaaatcacaagtatgctgtttttaagctaaattaaaaaaaaaatgcactaatcatatataaccatttctagttttttgaaagatgtacttcctaatttttaaaagttacctgatcaagtactgagaataccgaaaatgtactgaaattgcatattggtcatttttttttttaatttaactgaactttttgggagaaaaatccaccagcaggcatgacaatccactgaatcataacgacgatagtgatgatgattggtggcgatgatgatgacatacatgtgctagcaagtgtgagttgataccgcgtagtttgtttgtttgtttgttttcagcgacaagttgacttggcattgcccgaaatcgtcaaagccgctgtaacagccaattaagaacttgtgcaggcttttgatagcgttttatagattaataacgacggatcgttccgatcgaagcacctgtatgtgaatgtgtacctgtgcgtgggccgctgtcaaaggtaatcggcgctcaagcgctaaatagggattgtataccgactaaagtgcatgtataaatatacatatgacttaaattattcgttaattaaatggcaggtgaaataaaatataccaacacaaacaacgaacaaataaccatataaagtgacaacttgtattctaaaacaaacaaaacaggcagcagagcggcagcagcttttcgatttagtatgaggtaaaaacttaagatttttgtcgattgtagactcggatgacgaaaaaatattttatttactagttaatataggaaaaacttagtagaaaatagaaatgctaaaagaattcagtgatatccatttttaactatcaattgatcatgtattataaataaaacgagaatgttgcttcacatttgcttttcaaaacaaacgtcgaagaaaaagcatcacttgcaactcattttataaatttttatataaactgacaatttttttggtttttaattaaaaatatgtttgtgtcgtagactataaaaacaaatttatgatttatattgccctatgactatatcatagagtatattctttttatgctacacaaacggatattccaattggaatgactagacgcccaattgcgtgggtggttgtctcggctaatgtcttctacttcatcctagaccgccaccatttattttcagcttttcgccaaaaaatagcatcaaaaacaaaccaattgcttatgcttttccttaaatatcctaacaatagcactgatttttaaagtagttaaatgaatatttttgtaaatcataacactttgcctccatatagctttacacatttacgcatgtcaagccgcagctttgaacgaattgttgcattgaaatttagacttcgcttttcctctcgatggggcaccttgtgaggaaaagcgatagctgcgaacgatgccgccagttcacggcagttcagcttgtcgcctcgaacaataaagacgaccgatccgggagccataatatatatataatatagctttatagcacggcactgtttggattttggcgtgccaattggcgctagttgctgccgttgctgttgttgttgttgctttgtttgttgtgctaattacgtaaattgcgtgtttatttgtttgttaatttaaatactttacgtagtagtgaatttgttagttgacgacccgccaggttcgttttttttctgggcaattaatctgcgcgcgagtaaatctcccggagaaaacaagagaagcgttgtgagtcacttgagaattagagaataactaaaaagtgcaagcgaaaaaagcaaagctcacactcgtcacgccagctcagctgattctgattgggattcttactactctctctctctctctctgtctctcttcattacgatacgtaatatacgtatacgtatttgtatacccctctctctcacacactcttctattctgttttggttacctttttgtgggttacgttaccttatttgccgatatgactgctttgacattgctacgacgatcagttacggcggtcagctacgacggttacgcccacgtttgcgttacgaattggcggtttctgccccagcttcaaaggtgccaattgcatttgcacgttagtgggcgacatgctgctgtacttttgtccagcaaaacaacagcaacaacagcaacatcagctgttgcagctgcgcaggcgccaaatgcgtatgctaatgttggcggtaagttcataagcttaatttatgcaaacagcgcgtgcactcggtgatttatgatgctgcagcagattcatgcatcgaaatcgttaaataaaaaccgaatgagagatatgcgcgcctaacgaaaagggagatataacgataccttagattcaaactttcaagagatcttaggcaaaaaaatgtaccggttacaaccgattcgattcaataaactacatcactgatatcatcacctctcataattgtaactcgatgaatggtttaatttagaaataaacaaaaaaaattaaaaatctgttgtaagtgaaaatctaaagtcttccatcaatcgtaaacaatatatataaataataataaatatgtaactaactaaatatgtaactaactagttgctggcattattaagccacagaaaaataaaggtcaaaggtctatcttccgagaataagtttataagtttactccatatcaactactgaagttattcgtaaatacgtttgaatttaagcgcataccaactgcagtattatatttt

SEQ ID NO: 42161 - DNA, 610 bp, DROSOPHILA
tgactcacaacgcttctcttgttttctccgggagatttactcgcgcgcagattaattgcccagaaaaaaaacgaacctggcgggtcgtcaactaacaaattcactactacaactacgtagcgcatttcggcgagcttttgtagtcggaatgtcatccaaacctcagtacaccctaagcgaagtggatggggatctgttttccgcccccaagacctattccttggcgcactgtgtgggcgcagatcttgcgatgggtgctggaattgccgtgcagttcaagaaggtattcggaaggttggacgagctgcaagcccaacaagcgggcagtggagatattgcggtgctgaaggatgaccagcggtacatttactacctagtaaccaagcctcagagctggggaaagcccacctacgaatctgtacaagcatctttggagcagatgcgtgagcatatgcgcaaaaacaacgtgaataagctggccatcccaaaaattggctgcggaattgatggcttggaatgggaaaaagtcagcggagtcctcgagtacgtttttggccaagagccgctggagattgttgtctacaattttgtgcctccacagggaaaataa

SEQ ID NO: 42162 - protein, 153 aa, DROSOPHILA
MSSKPQYTLSEVDGDLFSAPKTYSLAHCVGADLAMGAGIAVQFKKVFGRLDELQAQQAGSGDIAVLKDDQRYIYYLVTKPQSWGKPTYESVQASLEQMREHMRKNNVNKLAIPKIGCGIDGLEWEKVSGVLEYVFGQEPLEIVVYNFVPPQGK

SEQ ID NO: 42163 - DNA, 3707 bp, DROSOPHILA
atcgcaatttccacaactatttctatataacaccacgcatttctagcactgtgaacagggtctaaagcaattttagtgcattttttgtaaaacgaaagtgttagtgttcaaaccttagctcaacgatcagtgctgaaagtgctccgtggccagcaacaacatcatagaaataataaacaaacaaaaaaaaaaataagaaacatgaaaacagcatcaaacaatacaatacaaatcagaggtactaactaaatcgatgtaagagtaaacgaaaaacaaacaattagagttcatgctcatttctaagtaaaccgatgaaatcacaatactgcagtttgtaaagagtacagagaaaaggagggaaacacttaattataatttaatttatatgtgtacaactacaaaataactataataataaaaaccaatcacaaagattcagcgtgtttaccagaaaacttatgattttgtttcatttcaaaaaaaaaaaaaaaaacacacacacacatttgttttggatcggttcgtatttccttttctggtaaatgcgtttaaaagaaacaccaagtcgtagatttagaaatctgaaaggaaaaactcacaaggatatgtaattttacttatcaaggcgactttacttatccagcgactgaatccaattcccatttgcctttgtgttgaaacaactgaagaactactgagcattcagcatttaaatgaaattgatgcgcacaaagccgagcaatcgatagcaatttgcataattttaattaataacaagccagtcgaagaagccagcccacaaaattccagtcacaattcattggtgcgttttatagcgtttcagatataaaacatttgcgaaaaatcaattcactcatgcaatacatgcaatactttaaatggaaacaaacataaaaaaaaaaccaacagaaatagtataaataaagaacaagagtttacgattttaagtctcaaaaggacccgtatgctttattatttattaaatatcttgaacggaatcgcctgcaaattattgtagtaatagcattaaactgtggcagtaaattgggtttaactgcgttccatcgtccgccacttagatacctgcaagaataaaaagatactttagattcttttctctttcttaaattaaatttaaatttaaattaaattttaaggaaaaaaatgaaccgtagggtggtgttgtagcctctttgccgatcttcggaatcactccgttggtcggagatttagctggcttgaagaccttatagtcctgggtgggccacttcttaatagctccaactcccacggcggcaccgccagtcaaacccaatcccaagccagctcccgacatgcgatccgcgtcgccacgggcgccgaaatccagcttgttattgaaagtagctgcctggagttctttcaaatcgattttggcacgatcgttggtcgatgtctgggcatgtttgtgcccggccttcggtccccattcggccactttgctggaagtccactcctgggccgagtagataccggtcttcggataggaggaccacatgtccggaccgtgtccgttgagcgagtgctctgccagctgctgtgacggcaacgaagcagccatgttctgtccgggtgttggcttgggtgccatcggaattacatagtgggcccagccgttagtgaatgccgatggcggcaggacggattgggccagatagggattgtagttgggattgttgtaattgtagctatcagcagtggccggctggggcggaatgtagccggctcgaaccgagctaaatatggggaaccgaaaacgcctgtcggccttctgggtggatctcttcacctccaccaatgtctgaagaatccagtgcttgcgcggtgctgaaaatcaaagcaagcagcgttatcatcagattttaatctatatcatacttaaaggtagttgaaaaaaatgcacgatgactttcaataaatgagaaacatggaaacttacccaatgccttctcggcactggatggatccacgaactcgaggaagccaaatgcccgctgacgtccggtctccctgtccatgagcaatttcacgctggccacagggccaaactgcgaaaagtattcgcgtacgatattctcatcgtggtattccttcaagccgcccagaaagatccttttcgagttcatgaaaccggcttcacagccaaaacttccgacaacggaaccaacgccgccaccccttttgaaatcttgacgtggcagtgcgtgcttggtctccacaattctaaattaattaatcaactttttatagaattagggcagcgaaagattattagagaactactcacttattatcaatggtgtggggacgtgccctttggacaatttccacggacttgggatccacataggtgacgaagccaaagcccctagaatggttgctcaccggatcccgcaagaccaccgcatcggccacgataccgaactgactaaagaatccgcgcagcgtttccacggtcgtctgagtggataggccgccaatgaagatcttgcgcaaatgctcgtagccttcttccttaatggccgtctttccgtcgcctttgcactgcacacacacaacgactttcgttgataattatgaatagtttgggggattatgagcttacatctccaaggcaggccgacgaggcacaatttcccgcatccattttcgaagagatgtcaaaattaaaatagcctgatttactacagcactcaggtgaagccaaccacaaattgaatgacaggcaagaaaatccaaacgtctatagttatggactatcgaaaaaggtccaaaaatattgttgccacatttagatgattcagcattattggatgcaaatgggccaataaatcgatagggtttgaatccttaaagcgtaaccctataaatccctataatatcgcctcttttgcttcgtagtcctagcaaaaaaccctacttatgcattattagaagaaaaaccccattgatctcataagaatttagttcgtaatacaatccagaaagctaggtccttcgaaaaccggctataatccactgaacatttatggtattcatagaacaaattgttcttggtagtgaaagttcttgtcacttttagatgattcagcattattggatacaaataggccaataaatcgatagggcctaaacccttatacgtaaccctataaaatatcgcccccagaaaataaaatacagctcttgttcttgctagtaaaagttgtactttattgaaaaattcagaaacaaatgaggtgttagtagaataccgactagttaccttcacttacctccgctgtacccaccaagttagccagaagggagccaccaaccaaagtccaccagtgagttcttcctgggccaccgcttgctttgcggtctaaaaccattaactaatacctggtggaaacgaaccggtgcgtggagcagcccagatttcgtatacggacccgggagggagcttccgtccgtagcccggccagtcttgcaaagaaatagtcagtgcattagtatgcggcggtttgcccgggggttaggtggtgggggtctctagtgacggtaattagccctgcccgctaccctgccgatctgggatggatcggaaaacccggattttgctgcagttgctgctcctctttgctagggcattgctcctgtgatta

SEQ ID NO: 42164 - DNA, 1310 bp, DROSOPHILA
atggatgcgggaaattgtgcctcgtcggcctgccttggagattgcaaaggcgacggaaagacggccattaaggaagaaggctacgagcatttgcgcaagatcttcattggcggcctatccactcagacgaccgtggaaacgctgcgcggattctttagtcagttcggtatcgtggccgatgcggtggtcttgcgggatccggtgagcaaccattctaggggctttggcttcgtcacctatgtggatcccaagtccgtggaaattgtccaaagggcacgtccccacaccattgataataaaattgtggagaccaagcacgcactgccacgtcaagatttcaaaaggggtggcggcgttggttccgttgtcggaagttttggctgtgaagccggtttcatgaactcgaaaaggatctttctgggcggcttgaaggaataccacgatgagaatatcgtacgcgaatacttttcgcagtttggccctgtggccagcgtgaaattgctcatggacagggagaccggacgtcagcgggcatttggcttcctcgagttcgtggatccatccagtgccgagaaggcattggcaccgcgcaagcactggattcttcagacattggtggaggtgaagagatccacccagaaggccgacaggcgttttcggttccccatatttagctcggttcgagccggctacattccgccccagccggccactgctgatagctacaattacaacaatcccaactacaatccctatctggcccaatccgtcctgccgccatcggcattcactaacggctgggcccactatgtaattccgatggcacccaagccaacacccggacagaacatggctgcttcgttgccgtcacagcagctggcagagcactcgctcaacggacacggtccggacatgtggtcctcctatccgaagaccggtatctactcggcccaggagtggacttccagcaaagtggccgaatggggaccgaaggccgggcacaaacatgcccagacatcgaccaacgatcgtgccaaaatcgatttgaaagaactccaggcagctactttcaataacaagctggatttcggcgcccgtggcgacgcggatcgcatgtcgggagctggcttgggattgggtttgactggcggtgccgccgtgggagttggagctattaagaagtggcccacccaggactataaggtcttcaagccagctaaatctccgaccaacggagtgattccgaagatcggcaaagaggctacaacaccaccctacggtatctaagcgattccgttcaagatatttaa

SEQ ID NO: 42165 - protein, 428 aa, DROSOPHILA
MDAGNCASSACLGDCKGDGKTAIKEEGYEHLRKIFIGGLSTQTTVETLRGFFSQFGIVADAVVLRDPVSNHSRGFGFVTYVDPKSVEIVQRARPHTIDNKIVETKHALPRQDFKRGGGVGSVVGSFGCEAGFMNSKRIFLGGLKEYHDENIVREYFSQFGPVASVKLLMDRETGRQRAFGFLEFVDPSSAEKALAPRKHWILQTLVEVKRSTQKADRRFRFPIFSSVRAGYIPPQPATADSYNYNNPNYNPYLAQSVLPPSAFTNGWAHYVIPMAPKPTPGQNMAASLPSQQLAEHSLNGHGPDMWSSYPKTGIYSAQEWTSSKVAEWGPKAGHKHAQTSTNDRAKIDLKELQAATFNNKLDFGARGDADRMSGAGLGLGLTGGAAVGVGAIKKWPTQDYKVFKPAKSPTNGVIPKIGKEATTPPYGI

SEQ ID NO: 42166 - DNA, 5268 bp, DROSOPHILA
aattataaattaatacaatgctcacaaatctcagttttcgaagtgacacgtaaacgtaaacatgtaatctcacccagcggcagaacagctgttgggatatacgcttcttggctcaacctttgtggttgactgtgcattgacccttgacctcgtgttgtgatttccagaatcggttgactaatgcctctacttattaaacgaaactttttaaattctcatgcaattcaatttttagtcgccgagcagtgtgaccaaagcggagtagcaaaattattccgtagcaatgcgtgtggcagagattacgattttcaattaacccattgcttgccaatacgcttttaatatcgtaagttctttctataagtttccaaaacttactatatatatatatatatattgttttaagatttcataaaaatttgattagggaaatcgggacagacaacgagacagtcggcggtcggcaaaaattcacctccaaataactaaaaaataaataaataaaaatcgtccccatgttcaaaattccacagtttcaccatcgccgctaaaaaaaaatttgtattatatttaggtgttcattaaaatatggtacgtacagttattattacacatattatgtgtaagaattattagtttattatatataatgcaaaaacaatattagtttaatattaattaaatagtaattaggcaattcaaacattatttgtaattatttcaaataaaataaataaaatatattcataaaaatatgggacatatgtaaaatatgtcaaagaattatttaataacaatgcataaaatactgttattagcagttcgttttaatatgcaaacaaatttaatcaaatataaataaagcatgtttttagtagatagtaaaaacatatatggttatatgtggatcctaagtactacttttaaatgttagaaacagtgggttaatccgtgtgcctattactgttagagtcgggtaatttccgtgctctcgcctacggccacactgctccagtgttagtaacttaactttaggtaattttggccataatttggcatgccgctctcgattttgttgctcccgctcgctttcatcaactggccgtgaaatcaataagcataaaatattcaagttcgtgcggtggcaagtgcgtcattatcgagttcactggttcgccgagataatgcgacctttgcatttgaattttcattgaccctgaccaagtgcactcgtttgttgttgctgttgctcttcctcttttcttaatcagcctcccccttgccccttgacgcactcctttgatgatcaaaaaacaatcagtttgcgtaatatgcgccaatgacaacagcaacaattacggcgtgataaggactggagcgcaataacccagcgaatccgaatcacgcgagtagagttcactgatagcactgcaactcttttctcttctagatttagcatggcggaattcgaggaggacttgccccacaatggcctgatggacgggatcgcctcgggagtgggcgttcccgtggaggcactccggctgctactcaccattctggcaggtaagatgccccagcagcagtgctttttggtagggacactgaatactcgaagtatcttaaagtcaagtgattaagttaagatattttctccggatatttatatccgcatatcacgcaaattcattgcacatatacgttatacatatgtttgcacaggtgtttataaattatgtacctatcattgaagactgtgttatttttgattttttttttgtcagtggtcatatacaacttgcatggttttaattgaaatgtatcgttaaatgaactttttcacaaactgcttagtaacaataagatttaatgcttaacaatgttcctaaataaattacaaacccctttaaaattttaccatgactcccaaaattccataaaaatgtgactcattcctattagataggaatttgattacagtcaggctatgcaaaaacgttaactaaacgtgaaagaatcgttgaagcttccaaattagttgaaaatgtttactacatgatttaaactttgtattgctaaatcaatccaactaatgtatataatttgtttcaggttatccggtggcagcattatatcaaaaatttatttctgttattgccgataaaacagtgcatcacatgttctttgctggatgcggcgctggattgtgttactttaactatgggctcgacacatatcactcactgatagccatcctaaccacctatttcctggtactcctcctgcgaaagaagacgcagatatttctggccatcaacttcgttttccatatgagctacctgctgctgggatatttctacacgtccagcaatgattacgatattctgtggacgatgcctcactgcattttggttctacgaatgattggctatggttttgacatcaccgacggcctgaaagaggagtcggaattgtctaaggaccaaaaggaaactgcgctgaagaaaccgccctctctgctggagctcctggccttttcctacttccccagtggatttttggttggaccgcagttcccattccgccgttacaaggcctttgtcgatggcgaattccgtcagcacgaaggaaatgtggaagctggcgttcgtcgctttggagctggtgcgttctatctgattgtgtgtcaagtgggattgagatatctgcccgattcgtacttcctcaccccggagtttgcgcaagtttcattcgtcaagaggatttatttactcggcttctgggccaaattcagtctgtacaagtacatatcctgctggctgctcaccgagggcgcccttatttgcattggtctgacctacaagggcgaggacaagaacggacagcccgattggtcgggctgcagcaatgtgaagctaaagctgctggagactgggaacaccatggagcactacgttcaaagcttcaatgtaaacacgaaccaatgggttggacagtatatctacaagcgacttaagttcctcaacaaccgcacaatcagctatggcgcggctttgggtttcttggcggtctggcacggataccacagcggttactacatgacattcctcatggaatacatggttgtgagcaccgaaaaacaagtgagtacgcaatttgttgctaaaacggaagtgaattcagaagaagtagggtactcatttggtgccttcaaatcggttaaaattatacaaccggctaataaaaagtcaatcaaagtttatctttatcaatcctcacaatcacaaactaatctgttccttcaccccttttctagataacccgcttctacaccaaagtggtgttaccccagtggggccacattctgaacaactcggacatctacaagctgctttatttcatcaccctcaagtcgtacaacgttgtgtacatgggctggtgcctgaccgcatttgtgtttctgaaatacgagcgctggatcgtggtgtacggagcggtcagctactatggattcactttcctagtactctgggctgccttctatcataccttcaatcactttttccggagcagttcccggaaactagctggagaggatcagaagttgcaggacagcaacacggacaaactcgtagaggaaaagaaaccagaagataagaagtctgagtaggattgaagcaataggaggaagtgactggcagttatcaaaatttttggtttgccttgagaattgtttggaattggttttttacacataatcgaattgttcttactaaccaaataagattaccaaataagaagccaccatgtaataagagatttgttaactagctattgaatcacactttgaacatatatatatattgtctgcctagtcaaggtggagtcatcccctagtatgcagtgtggattttggcgataagatattgttttatcttgcctaagaacacattctcagtcgtatatatatatatatatataaacattatggaattgtaaattgtataagagtataaacccgttgagttcatctaggaactagacagatcactcgagactataacgatacaccagggtctttgaaaatcaaactcaaatttcatttattgaaaggggagcagcgctcaaggagactaactaagccataaagacagttttataccaatgtaaagatgatgcgacgatatattttgatatgctcacgctaagttttaatgtcagtaaattgaaatgcgaaataaatgcaatgaaattatttttaggtacaagacgcgtggctgtttttctagttatttcctaagatagctcaaactagaaattagtgagaattgtagtaggaatcgaataacatgcgcattaagttcatttctgcgttttattgattataattattattttgcaagctactaaacgcaatttttaagttaattattgaaaaatttgtactatcttgattcccttgctacaatgagaagaaaaatgattttatttttagccaatgctgtatttaactaccccaattggccatttgatatccttttccgaaattataaaactttgaaaccatatgctgataatggtttattaattacaatcgttataaaaccatgaccaaattcgtaggcatttaatttaatcatagatacaaggaaacttatttattgatcataaaatagtcatgagaatgtactggggggttgctgcgatgtcagtttagactctagtgctccatgggctgggcatctcctccgccgccctccacgcgacgctttgccccgcctccagcggccgggtccctttccacctcctcggtgatctcgctgaacatgtagtcatcctggtactccttgaggatcttgctcgagcgattctcgtccaggaagagcgagtagaccttcttcacatcctcggtattgacttcggtggccttgcggcgacgacagaccaagttggctgtggtaatcagttggatggcgtagcgtaaactggtatctgtggcgatgcgtgtaagaatggtcagggcatccgggtgcatgatgcagtcctcctcctcgcagcgaatctttaggatctccttaacctccttctcggaatacggtacagtgcgtatgatgatcatgcgatcgagtagatcaatgggtatgccgtgcggactgcgatagttagtgcccctaatacgagtgatgccgcggttggtggccatcaccaccaccggagccatgtccgactccagggcgcgattcaggaaggagaagcactcaatgtcca

SEQ ID NO: 42167 - DNA, 2247 bp, DROSOPHILA
gccacactgctccagtgttagtaacttaactttaggtaattttggccataatttggcatgccgctctcgattttgttgctcccgctcgctttcatcaactggccgtgaaatcaataagcataaaatattcaagttcgtgcggtggcaaatttagcatggcggaattcgaggaggacttgccccacaatggcctgatggacgggatcgcctcgggagtgggcgttcccgtggaggcactccggctgctactcaccattctggcaggttatccggtggcagcattatatcaaaaatttatttctgttattgccgataaaacagtgcatcacatgttctttgctggatgcggcgctggattgtgttactttaactatgggctcgacacatatcactcactgatagccatcctaaccacctatttcctggtactcctcctgcgaaagaagacgcagatatttctggccatcaacttcgttttccatatgagctacctgctgctgggatatttctacacgtccagcaatgattacgatattctgtggacgatgcctcactgcattttggttctacgaatgattggctatggttttgacatcaccgacggcctgaaagaggagtcggaattgtctaaggaccaaaaggaaactgcgctgaagaaaccgccctctctgctggagctcctggccttttcctacttccccagtggatttttggttggaccgcagttcccattccgccgttacaaggcctttgtcgatggcgaattccgtcagcacgaaggaaatgtggaagctggcgttcgtcgctttggagctggtgcgttctatctgattgtgtgtcaagtgggattgagatatctgcccgattcgtacttcctcaccccggagtttgcgcaagtttcattcgtcaagaggatttatttactcggcttctgggccaaattcagtctgtacaagtacatatcctgctggctgctcaccgagggcgcccttatttgcattggtctgacctacaagggcgaggacaagaacggacagcccgattggtcgggctgcagcaatgtgaagctaaagctgctggagactgggaacaccatggagcactacgttcaaagcttcaatgtaaacacgaaccaatgggttggacagtatatctacaagcgacttaagttcctcaacaaccgcacaatcagctatggcgcggctttgggtttcttggcggtctggcacggataccacagcggttactacatgacattcctcatggaatacatggttgtgagcaccgaaaaacaaataacccgcttctacaccaaagtggtgttaccccagtggggccacattctgaacaactcggacatctacaagctgctttatttcatcaccctcaagtcgtacaacgttgtgtacatgggctggtgcctgaccgcatttgtgtttctgaaatacgagcgctggatcgtggtgtacggagcggtcagctactatggattcactttcctagtactctgggctgccttctatcataccttcaatcactttttccggagcagttcccggaaactagctggagaggatcagaagttgcaggacagcaacacggacaaactcgtagaggaaaagaaaccagaagataagaagtctgagtaggattgaagcaataggaggaagtgactggcagttatcaaaatttttggtttgccttgagaattgtttggaattggttttttacacataatcgaattgttcttactaaccaaataagattaccaaataagaagccaccatgtaataagagatttgttaactagctattgaatcacactttgaacatatatatatattgtctgcctagtcaaggtggagtcatcccctagtatgcagtgtggattttggcgataagatattgttttatcttgcctaagaacacattctcagtcgtatatatatatatatatataaacattatggaattgtaaattgtataagagtataaacccgttgagttcatctaggaactagacagatcactcgagactataacgatacaccagggtctttgaaaatcaaactcaaatttcatttattgaaaggggagcagcgctcaaggagactaactaagccataaagacagttttataccaatgtaaagatgatgcgacgatatattttgatatgctcacgctaagttttaatgtcagtaaattgaaatgcgaaataaatgcaatgaaattatttttaggtacaa

SEQ ID NO: 42168 - protein, 497 aa, DROSOPHILA
MAEFEEDLPHNGLMDGIASGVGVPVEALRLLLTILAGYPVAALYQKFISVIADKTVHHMFFAGCGAGLCYFNYGLDTYHSLIAILTTYFLVLLLRKKTQIFLAINFVFHMSYLLLGYFYTSSNDYDILWTMPHCILVLRMIGYGFDITDGLKEESELSKDQKETALKKPPSLLELLAFSYFPSGFLVGPQFPFRRYKAFVDGEFRQHEGNVEAGVRRFGAGAFYLIVCQVGLRYLPDSYFLTPEFAQVSFVKRIYLLGFWAKFSLYKYISCWLLTEGALICIGLTYKGEDKNGQPDWSGCSNVKLKLLETGNTMEHYVQSFNVNTNQWVGQYIYKRLKFLNNRTISYGAALGFLAVWHGYHSGYYMTFLMEYMVVSTEKQITRFYTKVVLPQWGHILNNSDIYKLLYFITLKSYNVVYMGWCLTAFVFLKYERWIVVYGAVSYYGFTFLVLWAAFYHTFNHFFRSSSRKLAGEDQKLQDSNTDKLVEEKKPEDKKSE

SEQ ID NO: 42169 - DNA, 3011 bp, DROSOPHILA
tagcatatatattttaaaatatttaatttccataatttctcactaaaatctaaactattgatggaacgtgctgcatcttatccacatactttatgtgtaaagcagctgcaggcagttgggaccgctgcggcagcaaccacccccgcagacaggaaccactgcatctctgggaatgcggcggcaaaggctgggcggaccgcggtagtctcttcggaagcacagtctctcgcacactgtcccgccagcggacactcgaatgggggtgagacggcattggccgctgcccaggatttgcgcatcagtgggcatgggggccagaagaatcgccagcaccacagtgatgattagaaggctacgtgagaggatcatcttgctgctgacttctagttgctatctgtaacttgttggtgtttctgcggcgttttatagttgtgagcagcgctcttaacaaaacaacaacaaaagcagaaacagcggtaaggaagcacatttaccgaaaagcgggtacaattgtatctcttgtttactgtgccaataacaaaagattgcgcatctgtttataccagcagatattcttaaagtataaatctgcatatgtacattcatatgccgaatattgagtatcaatatattttaaaatatatacctatatatagaccagtaagcatactacttgagtatctgtttaaccaagagatctacactattaaacaagagagaatggtataaccaagatttcgaatatcagatacgccgctcatctagagggattgctagagaggaattccaaattttgtttagatatggatagaaattgtaaaggaaataagataagttatatcaaaagattttttcaaaacgttggttatacacggctggtaatcctaattaaaaatatactttgtaaagcggaaatcgcttccctctacctgttacattctttgcaagaaaacttaagttttcctctacgaatatcgattataatcaattttatacagacttaccgtgttgacgtcttgtgtagggagtaaactgctctgttggccaaccgtagggccacctccagaaaccgcatgtccatgccggcattgtgtttcgtgccgaatgggggattcatcagcaccgtgtcaaaggacttctcccacttgctgccgatcagctgcagcacatccgcccgcacgcagtcaacattgggtagctccatctccaccacattgcccctaaaggtgtccacggcatcgccgtccagttcgaagcccaccgtgagctgggcgcccagcagagtggaagcaatgctgagcattccgcagccgcagcccaaatctcccaccagctttccctcgatgtcctcgtgctgcgactgcatgtgatgagccatgcacgcggctatgtgcggcggagtggggtactgttccaacaggatcttgggctgctcgaaaccgtcaacgccctgcaggtactcctccagtttcctcagcttcaaccgggccattgtggatccggctatttgctgatactgtggctgggcggagcgttcggagtagtgggcgtggtcgcaggcgacggcagcggctccagacgaggcagcacgggtataaagctatttccaaaatacgaatcctgaggtataaagaagcccaaagtcgtagagctcgttggattaaatgcagagcgggcggtggatgtggcattggtggcaatgcccacgcccgcctggaagtctggattcactgtcgtcggctgtcccagcaactggggtgcgggcatctacgatagaagaccaggtaaacacattttccgatcggcatgttcccaacgaactcacctggttcggcggactcagaccaaggtttatgatcccgcccgcgagcaactgcttcttcgtctggatctcttcgagtatcttgcggttcgtctcggcttgctgggcacttgtggtgggaaaagccatcaaataaactagtaaaagtctgaactatatcaaaaacttcttgtagactgctgctcctgccgctgcctttggcattttgcgagcagtgtggtcacactggcgagtactgtagtgtggcggaaatagtagcggtattcgaactgaaccaaatgtgcgaataaacaaaaaatctgcaacaaacaagagtgttaagcgaatattgaatttgtgcttaatatatatataatttgtatttaatacaaatcaaatattaataatattggtgaccttttggtgccacttaagtttgaagtattattagcattcctctatttggtcactctgcaagtcttacaacgtgagcagacaacaacaaaattacatgtttatttggaataatcacaaaaaacaaaaaacttaccaacttagtggaataatcttaggaaatatctattaatttgcgcgcaatccgtgcaaaacaagtgaagcaacatgagtatgagcgacgacgaccgcgacatagacatcgaaagtgacgtaagcaaggcgtagaggaaaatactgatacgtgtgtttaatattgattttaatgccaaattaacgactttttaggaggacggggactcggacactggcttgggatcctcgcgacacacaaacaccgccaatttcacccaggtgactatccatcatgcataaactgagtgggaaaaagcgactgcgcacattgccttttgttgataaacagaacgcacacgtgttgttgttgctgttacagaatcgtgattacgatacagcagagttcacagcaataggattcgtaatcgaaaataatcttagagggactgaatatattatatattactatttactaacttatctttctgttcatattgctttgagaccattttgttccatttttgttattatttccatactctgctgtatttacgatggaatttcctatatgctaattttaatgtttgtttcaaggccgaaaagcgggcgcaccacaacgctttggagcgaaggcggcgcgatcacatcaaggagagcttcaccaacctgcgtgaggcggtgc

SEQ ID NO: 42170 - DNA, 846 bp, DROSOPHILA
gcaggagcagcagtctacaagaagtttttgatatagttcagacttttactagtttatttgatggcttttcccaccacaagtgcccagcaagccgagacgaaccgcaagatactcgaagagatccagacgaagaagcagttgctcgcgggcgggatcataaaccttggtctgagtccgccgaaccagatgcccgcaccccagttgctgggacagccgacgacagtgaatccagacttccaggcgggcctttatacccgtgctgcctcgtctggagccgctgccgtcgcctgcgaccacgcccactactccgaacgctccgcccagccacagtatcagcaaatagccggatccacaatggcccggttgaagctgaggaaactggaggagtacctgcagggcgttgacggtttcgagcagcccaagatcctgttggaacagtaccccactccgccgcacatagccgcgtgcatggctcatcacatgcagtcgcagcacgaggacatcgagggaaagctggtgggagatttgggctgcggctgcggaatgctcagcattgcttccactctgctgggcgcccagctcacggtgggcttcgaactggacggcgatgccgtggacacctttaggggcaatgtggtggagatggagctacccaatgttgactgcgtgcgggcggatgtgctgcagctgatcggcagcaagtgggagaagtcctttgacacggtgctgatgaatcccccattcggcacgaaacacaatgccggcatggacatgcggtttctggaggtggccctacggttggccaacagagcagtttactccctacacaagacgtcaacacggtaa

SEQ ID NO: 42171 - protein, 261 aa, DROSOPHILA
MAFPTTSAQQAETNRKILEEIQTKKQLLAGGIINLGLSPPNQMPAPQLLGQPTTVNPDFQAGLYTRAASSGAAAVACDHAHYSERSAQPQYQQIAGSTMARLKLRKLEEYLQGVDGFEQPKILLEQYPTPPHIAACMAHHMQSQHEDIEGKLVGDLGCGCGMLSIASTLLGAQLTVGFELDGDAVDTFRGNVVEMELPNVDCVRADVLQLIGSKWEKSFDTVLMNPPFGTKHNAGMDMRFLEVALRLANRAVYSLHKTSTR

SEQ ID NO: 42172 - DNA, 6048 bp, DROSOPHILA
tccgtggtacttcgtagagcgcaaagcagctttcccggatctaccattgccacatcccgcttggcttaaaaaggatttcgaaacgtgtgtccttaatggcgatcaggagtgcacctatactcaaggagttaccgtggagggaatcggcgatcatcgcaggcagagcttattcttctgcggtcacgactacgaatgcacgtacgtttttttaacattttccttaaattaataatattctaatatgagaagagatttctaaacatatttatgtgcttaaatttctagacccttcaacacagtgggtgccctggaacgagccaagtttgccgtagaacaacagtacgcggtggttggagtgctggaggatctgaacaccacgctctcagtacttgaaaaatatgtaccacggttctttgagggcgttcgagatatttatgcaagtaagttgatagtaatgaagctcagcgtcacctacattgaagtcgaatctaaaaatatttgttcaatgcttttgttttcattttacacttcaatgtagtacaaagtattaagttataaagccacttgtgctctacgtatacaatgttgtatcacacttacaattgatatcgttctgtgaacttggcaaaactgagctacaaccatcttaatggtacacaattcctgactcatgtatttgtttaaaattcccattttagccagcgcagagtacttgacgaagatcaacaagaacaacttcaagccgccggtcagcgagcatgtgaaggacatagtgcgtcggaactttacgaacgagattgagttctatcaattttgccgccagagactccacaaacaatatctggctgcccacttaccacagcggattataacagactcagcacatctgcccggcctgattggcaattgaactgtactcttcacaaatcacgaacaaattgtaggaacaaatatgataaacaaaatcgtactcgaaacctgtagtcagctaagttccccattattgttttctcttgtgtatatttcaaagcggttatcaaaaatatgacaaatgcatcttatatttatatagattagtaagtaccttatgttataaagacctgagtttgaattgtgatgtcttcaagtgaactgttgaaatttttggtttagtattttagttttaagtcgattatgataaacactgtataaactaataaatgaatattttaagaacatattgtctttccactgatttcacagttttaactataaatggaaacgaaaaataaaaataaagaacattaaataactaaaaaaaactcaacgactatgctggataacaaaatgtaaatggcaataagaatggccgcactacgaacgcaaccgttggagtatttgtacatctttttatgaaatatagtttattaaatataagaaaacgaagcgaatggaaacaataacatacgtttgtttgttgacttaacatgaactattctctggtggatgtttctactctaacttaaagcacttgttgactatcgtcgggcttacacatcgggtaattggacgcttcttgctggaaataaaaataattaactcgtgatctatagttatcggagtaaacatatgtataccgcttattgccaaagaaagctaactcccttgcggattttataagctcccaaggtccaggtatgaccctgttcacccgtatgatgtccgatccggaacagtcgttgctggggacttctacgagtcgatgaggttcttttacatatctcgatataggatccttttcaatgacatttaaaacatactcgtcggtcaattccagccactttggatcctttgagcgaatacttagtagttctggagcaatacgttgtactacactgacaaaaataacatccatggcacaagttagcggatattgataggcctttacgtggagcagcgatcgcgcctcgaacaagcgatatacccgatgatagtcagcataacgatactctatgcgttgaccatcaggtgatatgcgagcctgaagaaatacatcatcaaagtccatttccgcagagctgagtattttcaggcgcttgttatcacgccgcagataatcccatttatccacatccaatccgcagcgacgattatgcacaatatcaaagatgtaggtatgtcccagcatggggaacggcagattctcactggatcccaatatcaaagcctttatcaattgaacacctcgcccgccaccatcatctctcaaggagactagctcctgattgagggcatccttaaaaattttatccacacaggccattgcgttttcctcgtgctataatagaaacaggaatatcagttgaccacctcaggaattgctaggggtgccagtacagataacttacatcaaattcatggtgggtcaccaactcccaggcatgtgacattggtccgtgaccaatgtcgtgaaggagagcggctatctccaccgcctgacgacaccaatccggaagctttggctcgtaatgcgaattacgttcgatggccctaaggtgatcctgcgcgcttttgtaggctctaagattaaaaaaaaaaaaacaaagtttacttataaatcaatattacttcttgtgtttcttacccaaggcaatgatcgtatcgcttgtgatcggccttcttatcgatggcccacggaaggagacccaactggtggacatgtttgaggcgctggaagagtggatgctcgacgatctcttggatatggctcgacagttcgattacaccgtgaacctcatcctcaataagcatctaaaggaaataaacgtgataaaagttttaagcaaagttcaaaagcaaagaaacttattgcaagagccatattctatatggcttactctgcctgacccaaataattaaaattatccctttacttcttatgtagattattattatttgtgggccaaagatgggatatacatataatttaggtacatcacagaagtaaggctacctgccaccagtaccggtgctacagccactgctgctacccccactgctacctccactgctacttccactgctacttccttcggagcttccgaatcctccacccaggcacatggagactataaagagacttaggcctattatgtctggaacaagccccagggcggccatagcacactcctgcctctcgagctggccatcgatcatccggcggatgttaaggatgagcaggacactacggacgagtatgatttcaaaatgatttgtatacaaatagatcggtcttaccaatatggaagggttagcacttgggctgctgcatacaaagtcattaaaaccagaatgcttgccggcttgcaaaaaattagtaaattaacaatcagcatgtaaatcaaggatgcgataaccagcttctcatttttcgacaacatgtaagcggcattattgttaaatacagcaacaacaattgctgttatcaatgtcacaaccgtgccgatctgcaatattcaatcttaaaacaatccacattggttcaaacactcatttctcacagtcgctgggcggatcttcaaacgatggttttttaacagcttcaatggatatggacacggactgttgcttcccagaggaagtgcgaggatcaagttagcaagtattttcatttttgtcagaatgtcgacgaagtttgtactatttttgtctgcacttaaatttaaatcagagtaatactttaaatcatgggtcactttaatttatgaaaatatatataaaaaaaaagtgtttggatcgtgtaacgtataacctgctgataataactttatgtggtagtagagttatttgcggaactttcttatctttctcaacaaacatagcaaaataaatataaccctatcaaagtaccaaaaaatgggggattccacataatagaaaagatctaaagtccattctaaaattcgtgttcgaaatgaaaccacatagcattctacaaatattaatttaaacagtgtttgtaacagttatatgtcatacattttcttcttgaataataataatgagagaaacgtaagttgtcttgcaactgcacctctatcaacggtcaaactagaactagaactggagcttgatagtttggtacataagctctgtattcttgaactcaagaacaaaatcaagttttggcacagcattaagtttacacgtttctcataaagctcttgattttctgatgtttatatttacaaaaattttttaattttaaaatggcagcaatgttatggagaccaattaaaatctttatatttttaatacttggggaagaaactaaatggtggggaaaagtctttaaaagaatccagctttcgaattaccaaaatactttagatttccaacccagataatttacgctcctttttaagctagtgatttttattaaatttccgcagtaatagattagcgtacggttttgaatagaagaaagtttataacaaccatttgattacaaaggcgactgaaaaatacgttattgctaaaacattgatgtgctcaacatattgatgtgccatgacttagtacttcattatttattttacaatatgtggcagattgtagcattacactagtgcaactaatttataagcctcacgcaatgcgcaaagtttagtaggtcaagagctattaatgcgctctttttttgcaagtgcaatcagctgtcatgcttcactagcaacccataacaaacggttaactcacagatgggcgttgttgttgttcgtggtgtccatgctgctgctgttgtagttgttgttgggaaagcgggagtttcgagttctttggttcgttggagaggggaagagaaagagagcgccgtcgctgagcgagggagtgaatcactgcgctggctgacattctaattggattcctgcttatcgacaatccgcgtccgaagcaaacccgaaaatgcgcacagcacgacgtcttgaaggctgtcttcccgccgatttgtgcgaatatataacatccgggtatttttttacattttatagcgactccgattcgtcaagcagaacgtacacaactgtaaatttggcgatggtagcgcacagctgattgcagctatcgaccagggatgcgataaaagctgcacaggaatggcgacgctttcaaacggtaaagctattcattttgacgtagacgcgaatgtagaaaaaatacaaaatatgtgccagtatcacttcattgttaaatttaataatacactttttgtaaagtatgtagagaaaacattaaaggtaatttagaaattaagagtttttaatatattttggcagagaggcatgcgccacctatgcggagtgcggcgaaacttggttttaaggtgtgtgtctccgctttttagatatctgccaatgctgatttatcgattagagttgagtactcatccccaacagtcaggatggcagctcccaacatccttgaaaaagggatggcagcgctatgtatccttagaattagggaattctggatggaaatactacaagcatttctatactcgttaatcgtagtataaaaggtagtatactagattcgttgaaatcattctttattaggatcaatagcatagtcgatctgttcatgtcgttttttatgtccgtccgtataaacgcacagatttcaggaactataaatgttgccacgcccccactataacgcccacactttttaaaaatgttacgatattttttaatattattaaatttctatcgatttgacaaaacccaaaaataccgcgcccacacttttgaaaaatattttgatttttttgtgttttaatggatttattgccaatttctatcggtataccaaaaacaccttgtagcacatacagaacgccccatagacagttctattaattatcttaaggccttaaaaaaagggataatctatagcattcaaagttttcagcttatctattaaatgttcacgcagtattcgctaaagcttatttaatatttaataatttttttcgtgatatatccgacttagtgcacttacaaaaaaagc

SEQ ID NO: 42173 - DNA, 1909 bp, DROSOPHILA
cttgacgaatcggagtcgctataaaatgtaaaaaaatacccggatgttatatattcgcacaaatcggcgggaagacagccttcaagacgtcgtgctgtgcgcattttcgggtttgcttcggacgcggattgtcgataagcaggaatccaattagaatgtcagccagcgcagtgattcactccctcgctcagcgacggcgctctctttctcttcccctctccaacgaaccaaagaactcgaaactcccgctttcccaacaacaactacaacagcagcagcatggacaccacgaacaacaacaacgcccatctatgcttattgaggatgaggttcacggtgtaatcgaactgtcgagccatatccaagagatcgtcgagcatccactcttccagcgcctcaaacatgtccaccagttgggtctccttccgtgggccatcgataagaaggccgatcacaagcgatacgatcattgccttggagcctacaaaagcgcgcaggatcaccttagggccatcgaacgtaattcgcattacgagccaaagcttccggattggtgtcgtcaggcggtggagatagccgctctccttcacgacattggtcacggaccaatgtcacatgcctgggagttggtgacccaccatgaatttgatcacgaggaaaacgcaatggcctgtgtggataaaatttttaaggatgccctcaatcaggagctagtctccttgagagatgatggtggcgggcgaggtgttcaattgataaaggctttgatattgggatccagtgagaatctgccgttccccatgctgggacatacctacatctttgatattgtgcataatcgtcgctgcggattggatgtggataaatgggattatctgcggcgtgataacaagcgcctgaaaatactcagctctgcggaaatggactttgatgatgtatttcttcaggctcgcatatcacctgatggtcaacgcatagagtatcgttatgctgactatcatcgggtatatcgcttgttcgaggcgcgatcgctgctccacgtaaaggcctatcaatatccgctaacttgtgccatggatgttatttttgtcagtgtagtacaacgtattgctccagaactactaagtattcgctcaaaggatccaaagtggctggaattgaccgacgagtatgttttaaatgtcattgaaaaggatcctatatcgagatatgtaaaagaacctcatcgactcgtagaagtccccagcaacgactgttccggatcggacatcatacgggtgaacagggtcatacctggaccttgggagcttataaaatccgcaagggagttagctttctttggcaataagcgcaagaagcgtccaattacccgatgtgtaagcccgacgatagtcaacaagtgctttaagttagagtagaaacatccaccagagaatagttcatgttaagtcaacaaacaaacgtatgttattgtttccattcgcttcgttttcttatatttaataaactatatttcataaaaagatgtacaaatactccaacggttgcgttcgtagtgcggccattcttattgccatttacattttgttatccagcatagtcgttgagttttttttagttatttaatgttctttatttttatttttcgtttccatttatagttaaaactgtgaaatcagtggaaagacaatatgttcttaaaatattcatttattagtttatacagtgtttatcataatcgacttaaaactaaaatactaaaccaaaaatttcaacagttcacttgaagacatcacaattcaaactcaggtctttataacataaggtacttactaatctatataaatataagatgcatttgtcatatttttgataaccgctttgaaatatacacaagagaaaacaataa

SEQ ID NO: 42174 - protein, 420 aa, DROSOPHILA
MSASAVIHSLAQRRRSLSLPLSNEPKNSKLPLSQQQLQQQQHGHHEQQQRPSMLIEDEVHGVIELSSHIQEIVEHPLFQRLKHVHQLGLLPWAIDKKADHKRYDHCLGAYKSAQDHLRAIERNSHYEPKLPDWCRQAVEIAALLHDIGHGPMSHAWELVTHHEFDHEENAMACVDKIFKDALNQELVSLRDDGGGRGVQLIKALILGSSENLPFPMLGHTYIFDIVHNRRCGLDVDKWDYLRRDNKRLKILSSAEMDFDDVFLQARISPDGQRIEYRYADYHRVYRLFEARSLLHVKAYQYPLTCAMDVIFVSVVQRIAPELLSIRSKDPKWLELTDEYVLNVIEKDPISRYVKEPHRLVEVPSNDCSGSDIIRVNRVIPGPWELIKSARELAFFGNKRKKRPITRCVSPTIVNKCFKLE

SEQ ID NO: 42175 - DNA, 6429 bp, DROSOPHILA
gtggacggcaggagaatccaaaaaatatatcaccatatatattgcgcgaggttttgccgtcaaaaaagaatttctcgcccacttcggtacgcgcgcgttgccggaattgaactgaaattcgcggtcgctttggtaaactgttcactttgttattttttgttcttcattattggccaaactatggaaaagctcgtcgaaggcgttttggtggcacatttcaccaacgcctcgaacatttcaccaatgataaggagacagtccgataacagctggacataacagcggcgctgttagctcggcacgctctgttatctgaagtcgaagtcaattggctgatggattgaaaatcttcgccataaaacgcccccaaattagagcgaacattccagtctttaagatctaaaaaatatatactcaagcaaactattactgtacacttttgcaaaagcacacttaacaattcctttgttctattttgtaatttttgcagcgccttccttccaaacgcgctttttcatatgcaaatgctctcatggcgtatacgcaatgtcaccatgcacattgtttgccagctcacgcatttcggctaaaacagcagcagtttttcccattttccgcactcgccaccccaggcccccttatgagcatttagatccactgaaattaatagcattttcaacgcggtcgcagctgagcgatgtttgcaattgtttgcccaacttttagtgggagctgtggtggtggaacatcatgtgcggaaatggttttcaagtgtgcttaaatgctttctgcgttgtcctagttatgagtgagtggacaattattttaattatgatttcatgtggactgacaaaccgaaacaatcgagatactctatggtttttggacacaatttcggacaccatttgaaagtatggtgtttcatatgagataataatataacagcaccataaaagcccggtcgaaatattacaaagccacttacaattgaatacgatatgctttcaaactggattttatttataagctttcttatttctcctttgctgattccatgtattgtttgctatcaagtgcttaaggctgacaatgggttaaagctttacagagcaatgcaagtgcgggtgtatgtgtgtggggtgtgcgcgtgtgtcagtagctctacgcagacataagttttcactgtgtgtgtatttttgttttggacattcgcattcattattacaaaacgagaatagctaacatttatcaattacttagaactacataagctgtgcatgtgttgcaagtgccaccggctggcatcagttgcatccttccgcggattcggttgcatctccacctccagctgcctcatctacttggcgttgccgtcgtcgtcgatcgccttgaagatgattccgtagacatggtccaccagcttggcccacgtggccgcttgactctcgtccagactgcaggcagctgtcagcacatccaggataactcctttcagttgctaaaaaaaataaaatgatgttttaaatgcaattgaatttttaaatgtcatatagctttcaacttccactatctcaccaacaggtatctcaaagtcgagagctcgactgcagtgttcaacttacgttgtaagactccttggaaacggtccgcggaatgtgactaacggcaattttggtccagatctcgtccagcttctccagatcgccatcctggcccaggacctggatggactcgtcaaagacccttatgattctgccggcatgtgctcggaagcgagcatttccctgaaagaaaacagatcaagttaatcttgagttaattgaagacctatgtgtaaggtacaactcacacttagctcctccaaaggaacatcgcggaaggggaacttctccaagttggacggaaagcggttgaaaaactgcgtcagtatcgccgctccagaatctgttggtgttgccacggggatttcccaggtcttcttgatcagttgcacctcatcgctgttcatgtttatgctccgttttggttcttctcagctttcactctatagctctctataagcgttcggccctctcttaatggcttttaggctgaaagtgagtgagggagaaaatggaattaagtccatttacttcggtctctttttggcgctctaattgaaattgacagttttacaatgcaactcaacgagcccggcacaagcaaaatcaaaatcaaaacaacaaacagtgccttagataaataagcgcacagcacgtgctaaaagtcaatgccttcgccgccaaacaacagaagcaaaataacatcattatcatcattgtatccgagctcaaattaacgtctgtcagttaagccgcagcaaaaagcccagcaaacctaccttcccacacctcaaccctcattctatacaattttcaacatacccttgtttttagagatggtaacgtgataataaaaagctgatgatattaattataatttgtacaaatttaaattgatatctgtatgaaatatgattaaaacttaatgtagagctgagtattttcaagatcttttctattggtttaaagtccctaaagtttagtcctttgtctgcataccattattaaagttgcacatgatatggtgaaatttctttatcttttatgttaataacttgtttccttaaccgcatatctgtttatataatagttgcccatctccagtctgcttggcctgctctcgagttcattagctgaccctacccccgccctcgaccagcaccgagttgacccccaatccaccgagctttgtggctggctctcggctgcgaaaattatcataccccctgtgttccacggagagctgaggaaaatgagaaagctattgcgaatgggagattgcgggagaattctctgggcgaaaggcggaaatgtaaacagcaagagctcacagaaattgcgatataatatgcagaccacaataaaaatggcgagacatcaaatcaaatggaattccacaaaaaaattaaatatttttcgaattgctaaacgaattaagtgagaggaaaaaaaatttccatgcaaaccgcacatgaaaaataaataattagaaaagcactacaaaattctcatgtaaacaacggaatttgatgaacaataaataaagtatttagagttcttttcttgacttttccactttatccgaatgacaaaaactttttaccacagggaaaagcagcaaaaacagcagtcaagccaaaggaaagttatgtctaaaaagtaaatacaaaatacaaaactttattaaaaatgcacaaagtgacagacagacaaacggaatagacatggtaacaggggaaataggaaaagggaaagagaaaaggaaaataaaacagggaaatcgactcaagtgcagccgcagcaggtggccgccatgttattgttgctttttgctggaaaatgtgggtgcgatgtggcaggaggtaggtgggtggtgggtggtgggtggttgccggcgcaggcagtgcagattccactataaaaaatttgccatctctcagtaaccttgtctacaagacccctttggggagcaaaccaacaccaacaccagcaccaacacactacatatgccaggatgtgcgcgtctgtgtacgttctataatatccttcatgccaaaatggcctgtggcttttgcggttcaagtctgtgcctgtaagtgtataagtgctggccactgctgtgcgagtgtatgtgtgtgtagtcgcgcgagcttgtgagtgtgagtgtctgctgcagtcaagagtgaaaaaaggcagcaacaaatcaagcgttaccttgtggttcagcactcggagaaaatttatcctccataagattagttttcattctcaaaaacatattctttcaatcgttttcatggaagttcaaacgttgattggtgatttaacggtgattggtgttaagcccttcttttaacacttagcttgatcgaattaagtaattaatttttctctgtgttatctgccattgagagtgcgagtgtgagagtgttgccagtaaggacattgagcgcttaattaaattaaggcaagcttgatggacagctactagacagtcagccgtgtgcagcagctcctgggggcgttgggcggtgggtggagggcggatcaggtggaacagatggggtaggcgtggcaggcaggcaggcaggctggctggcaggtcaggtgttggcaaagtgcctcctacaggaggactgtgtttgtgcgagtgtacgtgaatatttgttttgtgatgctgccactcaagtgtcgctatggatttggttgcaattctgttcctgtctctttttttccccggcatgtgaatttattttatagaactcaaaaacaacattctgtcgtttggcaagtgccagatgtgaagtgttgtgaactctcgaaacacgagctggtttttttttacaattttaaaacaatttcaaaggactttcaaagtatggggcttgaagaaagaatatttggataaattggtttctggcaaatatcagactccataaaatgtttctgggttttaataaccaaagccgtgttcaaattaattattttttatgggtcttataaataagtaaatcatttaattttaattttaaagacgcatgtatgggtaagtactatggataagaactgtgtatttgataacaatgacgaagctttagtaatcggataataaaaagagggtaaacaaatgtaaattacgatgattgctacatatgatgctttcgctgatttaattaaatgaattcccaactcttttgagcctctgaaattgtctcttaaagccacaatgcctgacttaaacacacacagccacttaaaacacacagatgcacactcatgtcctcatcacgggcattaaggataatgactgccacaacaacagaaacaacaaatggtaatcacaaaaaaacaacaataacaatctggttctgccagaggcgacacttgttttgcaaggacaccacagaaatccataaattccaagcccgctgctttgcggctcttttatttcttatggctctgaaatgcaggaattcaacgaacccgaaaaatccgagatttaaatatccaatgtaggaaacacacagaatgggcgtttaatcagctgttggttgcctgcctgttgagcgccgtcgatggggaagatagcgcgtatttacagttccgttagtcgtgcgctcttattcaccgaattctttcataattctgcaaggctttcactatggtataaatttctcctaccaacgtattattttcacatatatatttcccggatttcccagttttgattactacttttttaattggcgcacttgattggtttttgtgccgtggaaaaccaaataccggaccgttcagtgcgaactttcggggctacaaagaaccgcacactttgcgttcaggttgaaaactgagcgcgggcaaattgtggggccttttatgggagcgaactcaccagattcgcactctctgccggcaaagattcgctagagagagcccgccaaaaccaaaacgctgtggagcaaaagctgcccatgcaggagagtgagagtttggacagaggcgtagttcaacgggggctttgaggtgtgtcatttgcccaaaacaattgatattccgatcaggcgtagagcccacttatggacactcccccgatttgctgtcacatttcataacaaattcaaaatgggacgacacctgtcgaaccaacacgcccaaatcaaacattttccagtgacacctgtggaccttccgacgttttaaaggagcgtagtcaaagtgctggccccaaaacaaagctatctcttaaaagcttgggcttagaacaggaaaagcttacttaaccgttgggcagtggctttcttcaaatgcgcaatgtaatctaagctttaggagctataaacaaatatttgttgtcgtgatgtctaagctatcttcaaatataattatgtaattaatccagcaaaacaaatgaaagcacattttgtattagaaatgaaaaaattcaaagatttttaaaactagttaggtcgactcttaatatttcgatgtttaagattcgcaatatgacaaatcttttcaaacactccattcagttgttttgtttatttgtttattctttacttcaacaataatcttctatttgttcttatcaatatatcacatgcacaagtgaaagatttagccttatcgtggcgctgtactatttttataaatgtttattcactatcactaccttaataagcctccatcagtaattttcaataaaccaagtggcggacaaacaaacaagcactgccaatttatacccaacaaaatgcgttgcattcaaatatcacaccgcacacggattgtttattttgctactatatgaacgggaattgtaagc

SEQ ID NO: 42176 - DNA, 1246 bp, DROSOPHILA
tgcggttctttgtagccccgaaagttcgcactgaacggtccggtatttggttttccacggcacaaaaaccaatcaagtgcgccaattaaaaaagtagtaatcaaaactgggaaatccgggaaatatatatgtgaaaataatacgttggtaggagaaatttataccatagtgaaagccttgcagaattatgaaagaattcggtgaataagagcgcacgactaacggaactgtaaatacgcgctatcttccccatcgacggcgctcaacaggcaggcaaccaacagctgattaaacgcccattctgtgtgtttcctacattggatatttaaatctcggatttttcggcctaaaagccattaagagagggccgaacgcttatagagagctatagagtgaaagctgagaagaaccaaaacggagcataaacatgaacagcgatgaggtgcaactgatcaagaagacctgggaaatccccgtggcaacaccaacagattctggagcggcgatactgacgcagtttttcaaccgctttccgtccaacttggagaagttccccttccgcgatgttcctttggaggagctaagtggaaatgctcgcttccgagcacatgccggcagaatcataagggtctttgacgagtccatccaggtcctgggccaggatggcgatctggagaagctggacgagatctggaccaaaattgccgttagtcacattccgcggaccgtttccaaggagtcttacaaccaactgaaaggagttatcctggatgtgctgacagctgcctgcagtctggacgagagtcaagcggccacgtgggccaagctggtggaccatgtctacggaatcatcttcaaggcgatcgacgacgacggcaacgccaagtagatgaggcagctggaggtggagatgcaaccgaatccgcggaaggatgcaactgatgccagccggtggcacttgcaacacatgcacagcttatgtagttctaagtaattgataaatgttagctattctcgttttgtaataatgaatgcgaatgtccaaaacaaaaatacacacacagtgaaaacttatgtctgcgtagagctactgacacacgcgcacaccccacacacatacacccgcacttgcattgctctgtaaagctttaacccattgtcagccttaagcacttgatagcaaacaatacatggaatcagcaaaggagaaataagaaagcttataaataaaatccagtttgaaagc

SEQ ID NO: 42177 - protein, 153 aa, DROSOPHILA; identical to SEQ ID NO: 20634

SEQ ID NO: 42178 - DNA, 4431 bp, DROSOPHILA
gcccaccttctgtccggtacccgaggcggggcgttcgatctggatctccaccacttcgccctcgatgatctcggtttcctccttgatgcgaacgccaatgctcttgcgcagtgcctgtgacagagcctcggtcttgctcatctccagcgagtatatctccgatccggacatgctagtgaatggggtctcggtgcccagagcctgcgccattcccacagcaatggccgttttgccggtactaggctccccggccaataggatacatcttccggcgatcttgccctcgcgaaccatctgcaccacaacgccggcggcacggcgcgcgtccttctggcccaccattccctgggataccagacgagcctccagcacatcgtccagtcccaatccgcggatatgcgaatgggcgccaatgcgctcgatgcgagtcacgtcgcgaacctcgattttctcggtctcggccattttgtgcttttgattctgtctactgtatcactggtcgggagttgtactcttgtgcgatcttttcagtggcttactagttgtttactgggcttaaataagttgctaagcataaaattcgtatatgaaattaccggcctgcttggagtagtgttgaaagttcgatgattacacagcactgttatgcgcagcacatgctgtcagtgatggcagcgtgggagaacattcgctagcggcagctaggttttacaagtacacaagccgctaaatataatacgattaaattaaatgtaaaggaaaccattttccgaaatatctgcaagtgtgcggtaacttattgttatttattgagttgcttcaagctttagtcgtactagctattacaagctatttctgaaaatgtaacagggatgttaacgtgcgcatgctaacacagctgttcgaaaacgcgttagtgttattcacattttgcctatctgccgacattaaaccgatccgatttatttatgtacttttgagttaaaaacaaagccaaacgatgtcctttctagcgcaaactatgcgtcaaatgctacgccacgtgcccaatcgcagtttgttgacggcaggtaagtgaatattaaatagcatcgatgtaaacaatgtgacataaccaggtcccaatgaaatcccattcttttgtaggtgccatgcgtccactgagcatatcgccggtaattgggcagcaaaacaagccggcgacggaatcggtggatttatcggccatagctaaggatcagcagaaggagtgcctgagcatctgcgagcgcatcaaccggcaggtgcaaaaatccgagcagggacgactcttcgcggttgtccacctgtgcggcaagcaatttaaagtaactccaggagatatcatcctggtggagggatactggccgccaacgataggcgacgagatcagcctggataaggtgctcctggccggtgcccgcgacttcacgctcgtgggaaggcccattttggagcccggactcatcttggtgaaggccaccgtcgtggagaagacgctcagccacacgaagacgcactttaggaagaagcgcaggaagcagtacatgcgcatcaacttccagagatctccgcacaccatggtccggatcaattcaattgaactggctcgtccagtggacgggaatggcgagggggagtcttcctcgaggcgcttgttttagtttaaaatgctgttgatcacgaaaaataaaccaagtttttggaaggtaattaagaaaacacaaaccactttgaactggaagaggataactttattcagatgctgattttgtatattttctaaaacggttgaaacttttctagtgatatttgtatatttgcccttaattcattaataataaatgtcataaaaattcaatattcttaggactttgttacaatacagataattaagataaaacccattttgtaattgatgaaatgttataaagttcttgttttatctaagtcaccaaaatcaattgtaagcatcagtttggttttaactgcagtcactgatatcagtgttaacagtacatatagttctatagttcagtatattttaagctcatattaacttttaaaatatggctagctacagtttctaagttttggcagaatgttcagcaagttatctagcaattttaaaaaccaagcaaatgttttaccaattttcattcctatttttgcctcgtggaattttgcagatattgcccttctgctgttgctttttgtctttccattagaaattccactttcatcttgattcaatgactctgcccgacagtatttacccaaaacggcaacctagtttggaatacgagctacccagctcccgactcttgcaccgcgacaaagaagaggcgcctgctctaatgaagcaaccagtagaaccactgcaattttaatgacaaccttttatcgctcatgatgttgttgccatctttcattaaaaaagacgtcgctgcaccatccaaccaaactaccaaactacctagccaggtcggaaccacccaaccaggcagcccgaccacgatttataacctatggacatggctcacatgggatgcctgctgttttctttatcagcagatgtaagttgctcccgagtcggcggctgtcgtatttgtttacgctgctctttcacttttcactaaccaaaggcgtttactttttagcctttgcctggtaaagctgcttttgcttttccctggccccattttctagtttggcctttccggtttcagtttggccgcgggggaaatgaaaattgaaagaacacgcgaggtcaaagaattccactatgattgggcctgcgagttaaatttattgcagttaaactatttctatatatgtcttttctaactcacatatgtctgaaaagacacagctacttttggaaaactttttctaagtcgtaagctaagcaaaaggattttaagtcgaaattataatatggttattacaagtgtaacttttgactatatctgaaaatcttccatttttttttagtttactagacagaaatacaaggattacaattgtttttgaccttaaatattttagtctaacgtaaaacttaaaactgtggcatttaaacaaccgtattgaaatagattgttgaataaagaagcgttttttttataaaaataaattctttaacaataaatttttttgttgaatcttgaatatatcttacttataacattttctgtgaatttatattagagaaaccaacccatttccccccactcctttctcattgtagaggcttggttataaattcgaggagtttccttcgcctcatcacttctggcggcatccgtgttgacaccttctaaataaaatcactttcgctccatataaaaacgccattaaaaattatggtttccatccagggaaggccatactccaagtgggaaccgacgtagatgcttctaatggtgccacatcaaatttcgcaaattgcacaagcagcacaaattcaattgtcgacacttcgggcaagttttgctcaaatatccatcacaagaatgtgtattccagctgcactttgccggcgacaaatcaaatttcaatatgggaggcgcaaaataaaaagagttggcggaaaatagaaacacaaattgaaagcattttggtgtgataaaatttcacctgactgcctgcactggttgcttggccaagcagttttgggcaccacgccccttctactacttttccctgatgattatgttatttgcccaggaaaattgcatttgatgtgcgttaagtgacaaaacggaaattgccaccaagcggatgctgggtttgtttgtcttcttatggcgccccatgcccttggcccccttcccctttccgtttccacccactgtcgcacgtccatctaagccaccactttttggcaacccttactcccttgtgcccgccgtgaaaatcccatgtaaatgcggctcaagttggcccaaattttccaaatttatgcgtggaagcgtgtgatgtatggggcgcagaaggcagaagacagaagaaaggggaatgtggacgcaggcactgaaagaaaaagtgtgcaagaatgtaagcagtttctcaggcacatagctaagctgtattataatataaaaaagtcaaaatctaccattggtgtcttatttgaagtaatttacttaaatacttatcatgctaaataatgtattaaattacagctacatatattaactttaaaattaatgaaattaatagtttagtatataataacttcattttgatgagagataagtcatcatataacttcaacaagtgtgtctgattttcttcgcgtgtaactaggacgaaggatactgtgttatgaccacccatccatcatcagcatcactcagttttgacatatcattgaaatcttatgccaacgtcgtcatcatctgtgacgtt

SEQ ID NO: 42179 - DNA, 591 bp, DROSOPHILA
atgtcctttctagcgcaaactatgcgtcaaatgctacgccacgtgcccaatcgcagtttgttgacggcaggtgccatgcgtccactgagcatatcgccggtaattgggcagcaaaacaagccggcgacggaatcggtggatttatcggccatagctaaggatcagcagaaggagtgcctgagcatctgcgagcgcatcaaccggcaggtgcaaaaatccgagcagggacgactcttcgcggttgtccacctgtgcggcaagcaatttaaagtaactccaggagatatcatcctggtggagggatactggccgccaacgataggcgacgagatcagcctggataaggtgctcctggccggtgcccgcgacttcacgctcgtgggaaggcccattttggagcccggactcatcttggtgaaggccaccgtcgtggagaagacgctcagccacacgaagacgcactttaggaagaagcgcaggaagcagtacatgcgcatcaacttccagagatctccgcacaccatggtccggatcaattcaattgaactggctcgtccaggaaggccatactccaagtgggaaccgacgtag

SEQ ID NO: 42180 - protein, 196 aa, DROSOPHILA
MSFLAQTMRQMLRHVPNRSLLTAGAMRPLSISPVIGQQNKPATESVDLSAIAKDQQKECLSICERINRQVQKSEQGRLFAVVHLCGKQFKVTPGDIILVEGYWPPTIGDEISLDKVLLAGARDFTLVGRPILEPGLILVKATVVEKTLSHTKTHFRKKRRKQYMRINFQRSPHTMVRINSIELARPGRPYSKWEPT

SEQ ID NO: 42181 - DNA, 4085 bp, DROSOPHILA
ttttcgtctgcactaaagccatgcgtttgcagccagcagagcccgtcaaatttaataaaactcactgattttgattgatgctcctcttggtcagcagcagttccagaatcggaatcggaatcagagtcaccagtatggaagggacagccctgaagcgtcagcaaatattggcggaagggttgacactctatatgagcggaggaggacaggagtgggggatcggtatcggaaagccgtggtggcgggtggctgaagtgctcgagtgcttgacatgtgacatggacatgtcgtccaagtgtcgccgcgctcaattgaaacaaatgaagcgcaaaagttctccagggagcgaatcagaaacagaagcaggaaagagcagttgcaacttgtcgccgcctcatcagcgatccaccataacgactgtgtccgtctctcttcctccgtgtgacgtctgttggaaaatggtgattagaaaatcagttgaaattcggcagttggatcggcagaagctaaaaataatttcaataatatcagtgcaacatgtgctagctgagaacacacactatcaggatctagatttcttatcgaaggagtcgtcagcatggggatttagtgatcataaatttgttacgtgaaaaccatatagtaatttataagcatgataaatctactaatttaattcgaagtatataatattcccattttatataaattgcttagcgcttttaaagtttcttaattctggaaagttacttaattaacaaactgagtgtattaattataaaactaatttgattttctttctttcaattgcagttagaccacgccgtttgtcgagcgttgacgatttgacgctgcgctgtgtctggaaggaaacactacccgcttttccggctctcgaggcgcctccacgaggagtgaggtgcaaccgcagagaaggtcagcaaagaaagagcccaaggggttccaagtcacacaaccgaactaagctaagacgcacaaaatgagacacaatcgactgaaggtcctgatcctgggactcgtcctcctgctgacatcttgtcgagcggatggaccgctgcacagtgcggatcacggcatgggcggaatgggcatgggtggtcacggcctggacgcgagtcccgcacccggttacggagtgccagtcatacccaaggatcccaatctgcgatgcgaggagatcaccataccaatgtgtcggggcattggctacaacatgacatccttccccaacgaaatgaaccatgagacccaggacgaagcgggcctggaggtgcaccagttctggcccctggtggagatcaaatgctcgccggacctcaagttcttcctgtgcagcatgtacacgcccatctgcctggaggattaccacaagccgctgcccgtttgccggagtgtctgcgagagagcccgctcgggatgcgcacccatcatgcagcagtacagcttcgaatggccggagagaatggcgtgcgagcacttgcctcttcatggtgaccccgacaatctgtgcatggaacagccctcgtacacggaggctggcagcggtggcagctcgggcggatcgggtggctctggcagcggttccggctccggcggcaaacggaagcaaggaggcagtggctcgggcggcagtggggccggcggcagcagcggttccacctcaacgaagccgtgccgcggacgcaattcaaaaaactgccaaaatccccaaggagaaaaggcaagcggaaaagagtgcagctgctcgtgccgctccccactcatcttcctggggaaggagcagctgctgcagcagcagtcgcagatgcccatgatgcaccatccacaccactggtacatgaacctcactgtccaaaggatcgccggcgttccaaactgcggcataccgtgcaaggggcccttcttcagcaacgacgaaaaggatttcgccggcctctggatcgccctgtggtcgggactgtgcttctgcagcacgctcatgaccctaaccacattcatcatcgacaccgaaaggtttaagtacccggagcggcccattgtcttcctctccgcctgctacttcatggtggcagtgggctacctgtcgcgcaacttcctgcagaacgaggagatcgcctgcgacggcctgctgctccgggaaagctccacgggtccgcactcgtgcaccctggtcttcctgcttacctacttctttggcatggcctcgtccatctggtgggtgatcctcagtttcacctggttcctggccgctggtctgaagtggggcaatgaggccatcaccaagcactcgcagtacttccacctggccgcctggttgattcccactgtccagtccgtggccgtactcctgctctcggcggtggatggcgatcccattctgggcatctgctatgtgggcaacctcaatccggatcacctaaagacctttgtgctggccccgctcttcgtttacctcgtaatcggcaccaccttcctgatggccggctttgtgtccctcttccgcatccgctcggttatcaagcaacagggcggtgtaggagctggtgtcaaggcggacaagctggagaaactgatgatcaggattggcatcttctcggtgctctacacggtgccggccaccatagttatcggatgttacctgtacgaagcagcctactttgaggactggatcaaggccctggcctgtccatgcgcccaggtgaagggtcccggcaagaagcctctctactcggtcctgatgctcaagtacttcatggccctggccgtgggcatcacctcgggcgtgtggatctggtctggcaagacgctggagagctggcgacgcttctggcggagactcctaggagcgccggaccgcacgggcgccaaccaggcgctgatcaagcagcggcctccgatcccgcatccctatgccggatctggaatgggaatgcccgtgggctcggcggcgggctccctgctggccacgccctacacccaggcgggcggagcctcggtggcctccaccagccaccaccacctgcaccaccacgttctcaagcagccggcggccagccacgtatgacatggagagtcggggggagcatcgaccatgggcggcggtgggggcggcggtagcacccttggcggcggcaccctgggccacggcaccgcgatgagcagcagcacggtcggcatgggccctctccccggcaccctgatgcatggcgcctccggcggaggcgtgggcggcggcaatcccggcaacgtttacggcaatggcaacaacggagtgggcggacagaataccgctcccggctccgtgatcgactcgcgggccgtgtccgtggtggtcacgctgcccggcggcccgggtgcccagcatcctggccaggcgctcagcgactatggtcccatatagttaatggtacgcccggacaccgcgcactgggtctcgaccagcagttttagccagctgtagccgctcaaattggtcgactcgcacgcccggcctctgtctcactcgcacttctaggctctcactcgcacactccatccccatctcgctcgctcccgctttttggttagggcactcttagcaaaggttttccagaaatgccatataaattcgagtagccgtagtttgattgttgagtgaaaagcgccgtttttccaatacccatcgatttggcggaatcggaaatcactctattacgttttctgaatttaacatttatttttcttgcaacttttcgaatctttgaaattatttggaccacaacttttacaaagaaattaaatccaatccaaattatttgtaacactaaaagaagtgattttctgtactatacctataatttttagcgttaataggttcataatttatttcaattccgccaaattgcttctgagttgaaaatggtaataagagcaacaataagcattgagatgtgttagacaaccaatctgcatacaagattctagtccaaaaaaacctttgtcttcaaaagcagatgagcaaagagcttggtcgtagcgaaagggtactagccacagtaaaaattcaagatcgaatccagttgaag

SEQ ID NO: 42182 - DNA, 2085 bp, DROSOPHILA
atgagacacaatcgactgaaggtcctgatcctgggactcgtcctcctgctgacatcttgtcgagcggatggaccgctgcacagtgcggatcacggcatgggcggaatgggcatgggtggtcacggcctggacgcgagtcccgcacccggttacggagtgccagtcatacccaaggatcccaatctgcgatgcgaggagatcaccataccaatgtgtcggggcattggctacaacatgacatccttccccaacgaaatgaaccatgagacccaggacgaagcgggcctggaggtgcaccagttctggcccctggtggagatcaaatgctcgccggacctcaagttcttcctgtgcagcatgtacacgcccatctgcctggaggattaccacaagccgctgcccgtttgccggagtgtctgcgagagagcccgctcgggatgcgcacccatcatgcagcagtacagcttcgaatggccggagagaatggcgtgcgagcacttgcctcttcatggtgaccccgacaatctgtgcatggaacagccctcgtacacggaggctggcagcggtggcagctcgggcggatcgggtggctctggcagcggttccggctccggcggcaaacggaagcaaggaggcagtggctcgggcggcagtggggccggcggcagcagcggttccacctcaacgaagccgtgccgcggacgcaattcaaaaaactgccaaaatccccaaggagaaaaggcaagcggaaaagagtgcagctgctcgtgccgctccccactcatcttcctggggaaggagcagctgctgcagcagcagtcgcagatgcccatgatgcaccatccacaccactggtacatgaacctcactgtccaaaggatcgccggcgttccaaactgcggcataccgtgcaaggggcccttcttcagcaacgacgaaaaggatttcgccggcctctggatcgccctgtggtcgggactgtgcttctgcagcacgctcatgaccctaaccacattcatcatcgacaccgaaaggtttaagtacccggagcggcccattgtcttcctctccgcctgctacttcatggtggcagtgggctacctgtcgcgcaacttcctgcagaacgaggagatcgcctgcgacggcctgctgctccgggaaagctccacgggtccgcactcgtgcaccctggtcttcctgcttacctacttctttggcatggcctcgtccatctggtgggtgatcctcagtttcacctggttcctggccgctggtctgaagtggggcaatgaggccatcaccaagcactcgcagtacttccacctggccgcctggttgattcccactgtccagtccgtggccgtactcctgctctcggcggtggatggcgatcccattctgggcatctgctatgtgggcaacctcaatccggatcacctaaagacctttgtgctggccccgctcttcgtttacctcgtaatcggcaccaccttcctgatggccggctttgtgtccctcttccgcatccgctcggttatcaagcaacagggcggtgtaggagctggtgtcaaggcggacaagctggagaaactgatgatcaggattggcatcttctcggtgctctacacggtgccggccaccatagttatcggatgttacctgtacgaagcagcctactttgaggactggatcaaggccctggcctgtccatgcgcccaggtgaagggtcccggcaagaagcctctctactcggtcctgatgctcaagtacttcatggccctggccgtgggcatcacctcgggcgtgtggatctggtctggcaagacgctggagagctggcgacgcttctggcggagactcctaggagcgccggaccgcacgggcgccaaccaggcgctgatcaagcagcggcctccgatcccgcatccctatgccggatctggaatgggaatgcccgtgggctcggcggcgggctccctgctggccacgccctacacccaggcgggcggagcctcggtggcctccaccagccaccaccacctgcaccaccacgttctcaagcagccggcggccagccacgtatga

SEQ ID NO: 42183 - protein, 694 aa, DROSOPHILA
MRHNRLKVLILGLVLLLTSCRADGPLHSADHGMGGMGMGGHGLDASPAPGYGVPVIPKDPNLRCEEITIPMCRGIGYNMTSFPNEMNHETQDEAGLEVHQFWPLVEIKCSPDLKFFLCSMYTPICLEDYHKPLPVCRSVCERARSGCAPIMQQYSFEWPERMACEHLPLHGDPDNLCMEQPSYTEAGSGGSSGGSGGSGSGSGSGGKRKQGGSGSGGSGAGGSSGSTSTKPCRGRNSKNCQNPQGEKASGKECSCSCRSPLIFLGKEQLLQQQSQMPMMHHPHHWYMNLTVQRIAGVPNCGIPCKGPFFSNDEKDFAGLWIALWSGLCFCSTLMTLTTFIIDTERFKYPERPIVFLSACYFMVAVGYLSRNFLQNEEIACDGLLLRESSTGPHSCTLVFLLTYFFGMASSIWWVILSFTWFLAAGLKWGNEAITKHSQYFHLAAWLIPTVQSVAVLLLSAVDGDPILGICYVGNLNPDHLKTFVLAPLFVYLVIGTTFLMAGFVSLFRIRSVIKQQGGVGAGVKADKLEKLMIRIGIFSVLYTVPATIVIGCYLYEAAYFEDWIKALACPCAQVKGPGKKPLYSVLMLKYFMALAVGITSGVWIWSGKTLESWRRFWRRLLGAPDRTGANQALIKQRPPIPHPYAGSGMGMPVGSAAGSLLATPYTQAGGASVASTSHHHLHHHVLKQPAASHV

SEQ ID NO: 42184 - DNA, 3758 bp, DROSOPHILA
gagcagttcccggaaactagctggagaggatcagaagttgcaggacagcaacacggacaaactcgtagaggaaaagaaaccagaagataagaagtctgagtaggattgaagcaataggaggaagtgactggcagttatcaaaatttttggtttgccttgagaattgtttggaattggttttttacacataatcgaattgttcttactaaccaaataagattaccaaataagaagccaccatgtaataagagatttgttaactagctattgaatcacactttgaacatatatatatattgtctgcctagtcaaggtggagtcatcccctagtatgcagtgtggattttggcgataagatattgttttatcttgcctaagaacacattctcagtcgtatatatatatatatatataaacattatggaattgtaaattgtataagagtataaacccgttgagttcatctaggaactagacagatcactcgagactataacgatacaccagggtctttgaaaatcaaactcaaatttcatttattgaaaggggagcagcgctcaaggagactaactaagccataaagacagttttataccaatgtaaagatgatgcgacgatatattttgatatgctcacgctaagttttaatgtcagtaaattgaaatgcgaaataaatgcaatgaaattatttttaggtacaagacgcgtggctgtttttctagttatttcctaagatagctcaaactagaaattagtgagaattgtagtaggaatcgaataacatgcgcattaagttcatttctgcgttttattgattataattattattttgcaagctactaaacgcaatttttaagttaattattgaaaaatttgtactatcttgattcccttgctacaatgagaagaaaaatgattttatttttagccaatgctgtatttaactaccccaattggccatttgatatccttttccgaaattataaaactttgaaaccatatgctgataatggtttattaattacaatcgttataaaaccatgaccaaattcgtaggcatttaatttaatcatagatacaaggaaacttatttattgatcataaaatagtcatgagaatgtactggggggttgctgcgatgtcagtttagactctagtgctccatgggctgggcatctcctccgccgccctccacgcgacgctttgccccgcctccagcggccgggtccctttccacctcctcggtgatctcgctgaacatgtagtcatcctggtactccttgaggatcttgctcgagcgattctcgtccaggaagagcgagtagaccttcttcacatcctcggtattgacttcggtggccttgcggcgacgacagaccaagttggctgtggtaatcagttggatggcgtagcgtaaactggtatctgtggcgatgcgtgtaagaatggtcagggcatccgggtgcatgatgcagtcctcctcctcgcagcgaatctttaggatctccttaacctccttctcggaatacggtacagtgcgtatgatgatcatgcgatcgagtagatcaatgggtatgccgtgcggactgcgatagttagtgcccctaatacgagtgatgccgcggttggtggccatcaccaccaccggagccatgtccgactccagggcgcgattcaggaaggagaagcactcaatgtccagcatgtgcacctcgtctatgaagagtactcccggatttatctcagctttgccctcctcgcgccactcgagaaccttgttgttgatctgatcgcgaacctcctgcttgatctctccagtatcgccggagaacagggccaagaacccgtgggtgcgactattgataacatcgatctcgtgtagggtcacagtgtgcaccacctccttgcgtttttgaagctcaccctcggggcattggacgaatctggtctgagcgccagtggcgtcgtagtccctggctctggtgaagctgcgacccagcttgttgacctttccggacgccttgtcgatggtgatcacatcgccagcctggatcttctctttcatgaagcactcgatgatcttgttgcccagatcgtagttggtttccatctcggtggtcttgagggtgaccttgcccaccttctgtccggtacccgaggcggggcgttcgatctggatctccaccacttcgccctcgatgatctcggtttcctccttgatgcgaacgccaatgctcttgcgcagtgcctgtgacagagcctcggtcttgctcatctccagcgagtatatctccgatccggacatgctagtgaatggggtctcggtgcccagagcctgcgccattcccacagcaatggccgttttgccggtactaggctccccggccaataggatacatcttccggcgatcttgccctcgcgaaccatctgcaccacaacgccggcggcacggcgcgcgtccttctggcccaccattccctgggataccagacgagcctccagcacatcgtccagtcccaatccgcggatatgcgaatgggcgccaatgcgctcgatgcgagtcacgtcgcgaacctcgattttctcggtctcggccattttgtgcttttgattctgtctactgtatcactggtcgggagttgtactcttgtgcgatcttttcagtggcttactagttgtttactgggcttaaataagttgctaagcataaaattcgtatatgaaattaccggcctgcttggagtagtgttgaaagttcgatgattacacagcactgttatgcgcagcacatgctgtcagtgatggcagcgtgggagaacattcgctagcggcagctaggttttacaagtacacaagccgctaaatataatacgattaaattaaatgtaaaggaaaccattttccgaaatatctgcaagtgtgcggtaacttattgttatttattgagttgcttcaagctttagtcgtactagctattacaagctatttctgaaaatgtaacagggatgttaacgtgcgcatgctaacacagctgttcgaaaacgcgttagtgttattcacattttgcctatctgccgacattaaaccgatccgatttatttatgtacttttgagttaaaaacaaagccaaacgatgtcctttctagcgcaaactatgcgtcaaatgctacgccacgtgcccaatcgcagtttgttgacggcaggtaagtgaatattaaatagcatcgatgtaaacaatgtgacataaccaggtcccaatgaaatcccattcttttgtaggtgccatgcgtccactgagcatatcgccggtaattgggcagcaaaacaagccggcgacggaatcggtggatttatcggccatagctaaggatcagcagaaggagtgcctgagcatctgcgagcgcatcaaccggcaggtgcaaaaatccgagcagggacgactcttcgcggttgtccacctgtgcggcaagcaatttaaagtaactccaggagatatcatcctggtggagggatactggccgccaacgataggcgacgagatcagcctggataaggtgctcctggccggtgcccgcgacttcacgctcgtgggaaggcccattttggagcccggactcatcttggtgaaggccaccgtcgtggagaagacgctcagccacacgaagacgcactttaggaagaagcgcaggaagcagtacatgcgcatcaacttccagagatctccgcacaccatggtccggatcaattcaattgaact

SEQ ID NO: 42185 - DNA, 1758 bp, DROSOPHILA
aactttcaacactactccaagcaggccggtaatttcatatacgaattttatgcttagcaacttatttaagcccagtaaacaactagtaagccactgaaaagatcgcacaagagtacaactcccgaccagtgatacagtagacagaatcaaaagcacaaaatggccgagaccgagaaaatcgaggttcgcgacgtgactcgcatcgagcgcattggcgcccattcgcatatccgcggattgggactggacgatgtgctggaggctcgtctggtatcccagggaatggtgggccagaaggacgcgcgccgtgccgccggcgttgtggtgcagatggttcgcgagggcaagatcgccggaagatgtatcctattggccggggagcctagtaccggcaaaacggccattgctgtgggaatggcgcaggctctgggcaccgagaccccattcactagcatgtccggatcggagatatactcgctggagatgagcaagaccgaggctctgtcacaggcactgcgcaagagcattggcgttcgcatcaaggaggaaaccgagatcatcgagggcgaagtggtggagatccagatcgaacgccccgcctcgggtaccggacagaaggtgggcaaggtcaccctcaagaccaccgagatggaaaccaactacgatctgggcaacaagatcatcgagtgcttcatgaaagagaagatccaggctggcgatgtgatcaccatcgacaaggcgtccggaaaggtcaacaagctgggtcgcagcttcaccagagccagggactacgacgccactggcgctcagaccagattcgtccaatgccccgagggtgagcttcaaaaacgcaaggaggtggtgcacactgtgaccctacacgagatcgatgttatcaatagtcgcacccacgggttcttggccctgttctccggcgatactggagagatcaagcaggaggttcgcgatcagatcaacaacaaggttctcgagtggcgcgaggagggcaaagctgagataaatccgggagtactcttcatagacgaggtgcacatgctggacattgagtgcttctccttcctgaatcgcgccctggagtcggacatggctccggtggtggtgatggccaccaaccgcggcatcactcgtattaggggcactaactatcgcagtccgcacggcatacccattgatctactcgatcgcatgatcatcatacgcactgtaccgtattccgagaaggaggttaaggagatcctaaagattcgctgcgaggaggaggactgcatcatgcacccggatgccctgaccattcttacacgcatcgccacagataccagtttacgctacgccatccaactgattaccacagccaacttggtctgtcgtcgccgcaaggccaccgaagtcaataccgaggatgtgaagaaggtctactcgctcttcctggacgagaatcgctcgagcaagatcctcaaggagtaccaggatgactacatgttcagcgagatcaccgaggaggtggaaagggacccggccgctggaggcggggcaaagcgtcgcgtggagggcggcggaggagatgcccagcccatggagcactagagtctaaactgacatcgcagcaaccccccagtacattctcatgactattttatgatcaataaataagtttccttgtatctatgattaaattaaatgcctacgaatttggtcatggttttataacgattgtaattaataaaccattatcagcat

SEQ ID NO: 42186 - protein, 481 aa, DROSOPHILA
MAETEKIEVRDVTRIERIGAHSHIRGLGLDDVLEARLVSQGMVGQKDARRAAGVVVQMVREGKIAGRCILLAGEPSTGKTAIAVGMAQALGTETPFTSMSGSEIYSLEMSKTEALSQALRKSIGVRIKEETEIIEGEVVEIQIERPASGTGQKVGKVTLKTTEMETNYDLGNKIIECFMKEKIQAGDVITIDKASGKVNKLGRSFTRARDYDATGAQTRFVQCPEGELQKRKEVVHTVTLHEIDVINSRTHGFLALFSGDTGEIKQEVRDQINNKVLEWREEGKAEINPGVLFIDEVHMLDIECFSFLNRALESDMAPVVVMATNRGITRIRGTNYRSPHGIPIDLLDRMIIIRTVPYSEKEVKEILKIRCEEEDCIMHPDALTILTRIATDTSLRYAIQLITTANLVCRRRKATEVNTEDVKKVYSLFLDENRSSKILKEYQDDYMFSEITEEVERDPAAGGGAKRRVEGGGGDAQPMEH

SEQ ID NO: 42187 - DNA, 2566 bp, DROSOPHILA
aaataactgtaaaaattacataaatactgttttttattatttttttaatattcaataatgacttcattacatcatagctgtcacactttaaaatgactcttaaattgtgtaactagcaatttatcccccactgcactctcgactgtattaaagctctttttagtctatttgcactaaaattcttaatcttaagctgttaaattccttaaaccccaactatgcaaagtcattaaatcgctgggaaaaaaaagggaaaagtccacttttaacaaagttcccaaagtataccgtgaaagtgtagactaacaaagccttttacaagactgcgttctagtaacaagaaatttttcacgagccagaaaaaatgaaaagagggtgatggggcaacgagaaaaaaacgaaaacttttatcaatgttggcgtatgacccttgtatgagtgggtgggcttttggaatggttgggttggttggcttcactttgcgcagaggtcaagggataacaaaaggcgtaaatttaaagccaagttaattttttaacaataaaaggggcgcttgtcaaaagagaaattttacagcaagcgtttaatcttaaacgacttttgccatccaacgcgattggcaagttagatagcaaacgccagtggcagcagccgaagcaaagtttcttcaatggactgctttgttataagtaggaaaaagcaaacaaaccgtgaacgaacgaattaaatgctgatttacagtccaagaaaaaaaattttcaaatttatcttcatttttatacgtatacttgtactgtgaaagactggaagtttgaaggctccaaagtttaaatactgtggcatacttttaatcagcttcttaatttagcattgattgcttcaagtcatcctgtttcttttcgtatccacattcattttttttcctagtgcattcacaaacaacatttaaccctgaagaccaatgccaatcactgaaagccatgcaaatgacaaggaaattaagtgaatcaaagaagaggggcaaatgtatttcgaacttaattagagcgtgcttgattgcactttgatttcaaagtctatttctagcgttttatgcttagtcagtcacagatgattgctgcttggtttctagcctccaaatccgccaccgaagccaccgcctggtcctccgaagccgcctcccggaccgccaaagccgccacctggacgtccaccaaagccaccgcctccgaagccgccttgacctccgaatccgccgccttgacctccgaatccaccgcctggacctccgaatccgccgccttgacctccgaatccgccgcctggacctccgaaaccgcctcccggaccgccaaagccgccgccaaactgacgtgcttggcgtgctgccaccggagcctggacacctgcatccacatccagaagttgcgccgccacaggatcatatgtggctgctgatgagccggcgaccaggagaatggtcgccagggcaaggcaaacaaatgtgcgcattttcgaggaaacttctgctactaatcaccggcaaagtttcgatggattctacgaagtctctgctctgcggccggtcaatttatatgattcggaacttatcgactggcaatgggggagcgaataaaagtagaagtggttcgactgggcgcggaacatcaaagttgtgagtgttacgccagaactgaaatgtatacaacgagcagagcgattcgtattaactgtctggctaagcgctatgagcaacaacaataaagctgctccataataataaccaaaacctattaggcaacagaaacggaggcaaactttttggcaaacaccccaccaaatgtatagacgaagggggaaagtctgaagtggccagccggttcaggatgggctttctccggacgactattcaaatgcgcaaaacattcaagtttctttggctcgcacaacaaaacagatcgatagacaagtggccaagccaagtgtagatgggaagcatcatctcaagtgggcctctccattcatctttcgtctgtcggatttcgtaaggcttttcaatgcgggaagttcggggattttgttttgtttgtttgacttaattaaaatctaagggtaaacagtcgacgcaactggttgttattcaaatgtcatcaatgttgtcggtttcatttttggccaacgcactgactcatttcggttattagcttgctcagtggttagcacattttaagatctggttcggtcattgttaatcaagatttagcacttcatttataagtatggaatattcaatactatttacaaaacaaaggaactctgccgtaattaactatacaagtgtacgtaatagtacaagtgtgcgtgttataaataaaaacctagatttaataggtttataagcggagaaatcctaatttatgaaattctcagaaatactaataattaataataatacttagtaaacaaaatcaaaagccagtttgttgttgatcttcaaaacccattttaggcagactcgttatcttacataacaaaaaatggcgaaacatgttttatatttaaagca

SEQ ID NO: 42188 - DNA, 566 bp, DROSOPHILA
tcgtagaatccatcgaaactttgccggtgattagtagcagaagtttcctcgaaaatgcgcacatttgtttgccttgccctggcgaccattctcctggtcgccggctcatcagcagccacatatgatcctgtggcggcgcaacttctggatgtggatgcaggtgtccaggctccggtggcagcacgccaagcacgtcagtttggcggcggctttggcggtccgggaggcggtttcggaggtccaggcggcggattcggaggtcaaggcggcggattcggaggtccaggcggtggattcggaggtcaaggcggcggattcggaggtcaaggcggcttcggaggcggtggctttggtggacgtccaggtggcggctttggcggtccgggaggcggcttcggaggaccaggcggtggcttcggtggcggatttggaggctagaaaccaagcagcaatcatctgtgactgactaagcataaaacgctagaaatagactttgaaatcaaagtgcaatcaagcacgctctaattaagttcgaaatacatttgcccctcttctttgattcactt

SEQ ID NO: 42189 - protein, 127 aa, DROSOPHILA
MRTFVCLALATILLVAGSSAATYDPVAAQLLDVDAGVQAPVAARQARQFGGGFGGPGGGFGGPGGGFGGQGGGFGGPGGGFGGQGGGFGGQGGFGGGGFGGRPGGGFGGPGGGFGGPGGGFGGGFGG

SEQ ID NO: 42190 - DNA, 2685 bp, DROSOPHILA
gttattttcatgttgagctgctcttctgctgcggctcctgtctgtcagtcaagccaaaaaggagccagaagaagtcctggccgtggtcctgcctggctttggtccctggatggcacccgctcgtttgttcattcgccttttttcccacgtaattaaaacttgaaacgcatatgaattagaaaataaaacgaaaaaaaagaagaaaattaaggataaagaaagtagagaacggaataaaatacgagtacgcgacccggaatggagccatttgatggtacagaatgacatcctgtttcccgcagcctgacatcgttaacatcgctgattaagttttcttgtcctgtgctcagtctgcatgtcactcaacgtgatttgaaatgaaatttttataatttcagcttcgcccttgggcaaatccaccccctccgatcaaccctttttagccacagtgcttatatattttaatgtttaactttattaagtcgacatcgactgacgttgagcacaaaatttgtctagcgaccatagaaatgtccaccgaaaccgtagttggctccaaatctgcgatcatggaagtaatgccagtaaggttgaacaaagtaggaatttccatatggagccccataatagggattaccgattgaatcaacatgccttcctccataaaatccagcgccaattccaaaagctccaatctgacgtcgtatccgttctatagcttcatctgaactttttacttcatcgggctgaaaatgatgttcatccctttcatcctgaaacttattgttttcagccactgccactccaaaaatcagtattccaaaaagaataacaatgcagcaacgaagtgtactcatcttaattccatttaaaaaaaaataacattttttaaatgcaagcaactctatttatgagaattatccgtcttaagcagagtaaacaagtacttgttttgataattacagaagagacttcttttgattttgactaaaagctctgccagtttgcaacttatcattagaaatctagatttgtctttctaaaaggagttataaattgaatatttaaacttggccaaagataaagtgctcttgttattttatgaacatttccagagatattcatataccgcatccgtttaacgcccataatatttaatacagctgagcacttcttgtcatggatataaaaaaaagagtgcttaccacataaaaactcgttctgcacttggtaagataatgagagcagcagctcgtgttgatatattagtagctaatcctggtctgatcgtatcacatatatatatgcacattaaattaagaacacctagccgtaaaaggggccgccgaagaagggcggtggcggtgggtagaatccgccgaatccaccgccaccgaaaccgggtctccggaatccaccgccgcctcgccttccgccaaatccgccgaatccgccgcgtcctctgccgaatccttcacggccgaatccaaattgtctggccaggcgaacagccggcatctcctgctgctcctccgcctgatttacatccgccagagtcagttgctgtacatcctcatccgcctggggggccgtggtccccgactgggccagcaggaccagtaggccggcacttagcactaatagattcaggtggtaaatacgcatcgttccgtctccgttgtcttgttcacctaaagttcttactatagtcgagctgatcccccgcctaggctctttatatagctttcgacctgaccgcgatgactgtggggttctaaacgagttctctgtgccgacgacctccagcaattaaatttcctgagcataatcaaatggcgaagaaaacccccgactctcaagagcccccagctgaaattgtaaacaactgggtggaaaaaataaagaaaataaaaacatcatttctacgcagctcgaacaacctgttttgggttttacccactcattttcgcacctcattcgctaccaattatgttctataaaaatgtgaataagtttgttaatataagataagccaattaataagtttccaattccaaattattgctcaattagtaagagcaaaattgaaatttaacaaaaaacgctgctcaagtgcaaatgtgaactgaatgttttaaaacctccgaataaaaaggtatatatataaaaatgtaaaaatacataagttgtgataaccataatcaagagcatatttttaacataatgctatacaaccttctgttccatgagtaagaggtataaataactaaaaccttaagatgaaatcatcactttactacgtaatttgatatttctagaaaatgcactaatcatatctgtatcttgtgttattctctgtggtactcaactattgtttgaattacgtagaaatcttacctgcatatttaattagaagtaatcacaaatgttccgcagaattggcagaattatacaatctcgaatcaaaatgtacagtcatttggatgacgggaacagaaaatgtaaggcgtctcaaatccaattaccaacacaaatacaacttgcacatatgggtaatttcatttgccgacatctaatgctcattaagagatttcttaagtgcgggccacatgtgagttgtttacaattcagaaatgacgccctcagcgatatgccatcccctttgccaaaaacgatacgtattta

SEQ ID NO: 42191 - DNA, 685 bp, DROSOPHILA
aagacaacggagacggaacgatgcgtatttaccacctgaatctattagtgctaagtgccggcctactggtcctgctggcccagtcggggaccacggccccccaggcggatgaggatgtacagcaactgactctggcggatgtaaatcaggcggaggagcagcaggagatgccggctgttcgcctggccagacaatttggattcggccgtgaaggattcggcagaggacgcggcggattcggcggatttggcggaaggcgaggcggcggtggattccggagacccggtttcggtggcggtggattcggcggattctacccaccgccaccgcccttcttcggcggccccttttacggctaggtgttcttaatttaatgtgcatatatatatgtgatacgatcagaccaggattagctactaatatatcaacacgagctgctgctctcattatcttaccaagtgcagaacgagtttttatgtggtaagcactcttttttttatatccatgacaagaagtgctcagctgtattaaatattatgggcgttaaacggatgcggtatatgaatatctctggaaatgttcataaaataacaagagcactttatctttggccaagtttaaatattcaatttataactccttttagaaagacaaatctagatttctaatgataagttgcaaactg

SEQ ID NO: 42192 - protein, 112 aa, DROSOPHILA
MRIYHLNLLVLSAGLLVLLAQSGTTAPQADEDVQQLTLADVNQAEEQQEMPAVRLARQFGFGREGFGRGRGGFGGFGGRRGGGGFRRPGFGGGGFGGFYPPPPPFFGGPFYG

SEQ ID NO: 42193 - DNA, 8105 bp, DROSOPHILA
gcctagtgctattgatgattaatcttaagttaaaacctcttgctgccctgccatccaaagaaaaccgaaggaaccgcgattgtaacagcatgtattatacttatattaatatttattggagagccgcttgatggcgctgaaggaggagttgaggagacacaagaatgcaaaattttacagttttaaaaataaattatactagcatcctctataaattaaatctaaattttaaacgaaacgtatcttttattcgctgcaagcggcatgctatgcgattatttttagcgacgcacaggaaattacgaaattttgcacgcccactgcaaagagcgaaatctggaggtggatctcctcgactggggtgcacatacatatgtacatatgtggctggggatgagcacggtaatcccagcatagacgcctccaagacagtccatttttgcccattgccagtcggtgcaggagctgcccccctcgtcgtggatctaaaaatacagaccaaaggaaacaacaaaagcggcaaatcaacatgccgaagtattaacaaatgtcttctaagactacagtcaacccacagtagattgaacaaatatgtgactttgaatgtcagaatatcaactttaaagggattcgaaaatatatatttttaaaactaaactaattaggaatacaagagctcgctgaaaacagtcttcgttcaagacctagttaagtatattttaggtatgttccactgtaacaatgtgtgagatggccgtttttttggagttaacatagccgctgggagaagcgaccgccggctgtcttttaaattgcagtgccacgacctcgggggctgcaaaaatatcttggaatttcaagtacatttgtgtggctggtccgggacgcttgtacttgaagatcgagcagacagacgacaccaggcagatgggcctcctcgggactcgggattcctggaatggggtgcccaaatcgaaaatagacgagatacgggtagggtatgttgtactgtatacatgatgcataaatgcactttttattgaatattttatacatttaaatgcttcaacatcgttgctgtatgcttagacaaaaaataattgagtggattgcttgcacttaacatttcgttggtgtgtggtaagtcattttttcggttctgggacccccggcggacaatacatttacaaaaatactcgcacaattacattcaattcagctcatttcgatttgtatactttcagtcaattttgtggctgcagtttaaaatttcgttgttcttagtggtctgctagttgttaattggaatactgcacattaaacggtcctcacatctcttagctataatataagcctagtatattaagcagaacgcccaacatcacgtttttattttctgttaaaaatccagtctatacacttacagttagcggttgaatactttattaagtacacggtttagcacatttcgttcctcgatatcgcatcggtgtatatgatatatgtaaagtatataaatatagatcattaaggcacatttagggacagtatgcttttgattggacctgctctctcattgtctttttgtcgttgctctcgcttggaatgcttaaaactcgtctaagtttgtctacgataaaatacgaatacgttacgtctgcctaaatttccatagctaccgattataaattagaacatttagcttatacgcggagtaggggttactgttaaacaataattacaactgggttgtaataacggattttcgaatgatggccgactcgcgtcccttgggtgccgataccacctccgaggaaaccagccagggcgataccatgtctttgctgttgctgctggacggaaacggaatgcgactgctgtccggataattgctcggagttttctgtgccaaagatcaaaacgagtgttaatacggcaggtcaagtgggtcaatggccttaaaatggttagtggagtgcagattgacatgaaaacgaaaaaaggcgagacagacatctgcggcaagccgcagctcatatacccttgcagatgattatatgtttacatcagcttattattatgtgattcgactagggtaggtaaaattgttgttttctaaatgaattcaaatgatgaagtcaggaaggggccttcatattaaaaagctattttaggttatagatccgatcacaaatttgttttaagtactaaagaaaaaatacttgttgtaccttctgcaagagtatagcaaaacgttagttaatagttgaggccagtttaaagacagacagtaaaagcgtagacataagctcgcaggtgctcaaaccttttcactcggcggcgcatcgacttcactgtggttttgattcagatttagactctgattcatctgctggttggttttctgcgattccaagcgctcctgttcactgagcgtggagaagagcaaggtgccggcactgggcgtcgagctgcccgccggcttggcagcagtttcggcagtgatactgccgctggcattattgtttatgatgttgttaatgaatatttcattaatgagtatttcggcggccgaggcgttgctcaaagcgggagccactgactccgaggcggtcgtgctaacggtggcggtggggctgctgggcgtgctgatggtggtcacactggtaagggttgtattgcacccgcttccggtattattcagattcgcaggcagcgacgacggcggagtgagtggtgcactgaatccagacacaaaggtggcattactatagggtccatttccattggtggtggtggtagcggtgctcgaagtgctggaactactgctactacccgtcgacggcttctgttccggtatgctgagcgtcagcttatcgcctccctatttttgtggtttagcaagcatacagacacaagcacatggaaacaacacacgcaataccacggataaacattaagtgcggacaacgaatggaaataagaacgtataaacagaaggcatgaaacgagtgcaatgcagtgggcttaaactggttcgctggccaacaacttaccactgatatgtaggtggcgttcagggaatccggtccatcgctgtgtgcatggttgttgctgctgtttgtgttgctcgtgtgcatgttgctgctgtgggcggccggtacgaacatctgattggtaagcttggcgttgcctccggcacccagctcctcctcaacgcgagctgcaggatttgttaattaatatttccttagtattaagccaaagagaaaatgcttgcaaaatatgtaggcgtgcaagagcttttcaaccaattaagttggtaaactcaccctttaaaatattgcacttgatgttgccaggcggcagggccgtggtgttcacattggccagtttcacttggttattgggtttctcgttggcgttcgagaggcgcttcagtgtctccgtgttgtggtccatgtcgaaggtcttgttgatagtcaccctgccaaaatatcacactgccgtcagtatattttttaatatctaaacatgggttacgctacctgatactgttagcatcattaatggcttcgtttgctagcactgatggggatggatctttgacaatggacttaagcaatgagtctagctctctatctttatccgacaagccgctcttaacactgcacaatgatggacacaacacagaaagacagatgaaaaacaaacacagaaacaggcgaattagttaatcgggacgttaaagcaataaatatatataaggtacaatgatagtataaatacaccaaaggtttacctgagctgaccggagctaatggaagccttgccaaagctgccgtggtgggagctcgttgcatttctaaatggattggtttcatcaaagttcttagtggcgttcggtgagtatggtggtgtgtagtctggatccaatcttaaaaaaaaagttacatttaaaaagggaacggaaaggtaattatagataaacttcttacttcacagtcaatcctgacgccttgccaatagatccaatcttgctgtacgccggatcctcgttgctgaagttggacttgagggagttgcgacccagcgaagcaaagttggctgctgcctgggatgaggagctgatggagccgctgcaagccgcatccggttcaataatggcagagttttgaatgacagtaagcaccgaaggcgaaggtgtaacagtgatgaactgatccgtggaaatgagcgagtcgaaggcgtcgttattgttatcgttgttaggagtcggtgtcgatacttgggaagatactaagggagtagccggtgcaggcgattgggatgcggctgcggcagccgcagcggcagcagctcgagcattaaccgaggccacagccgacaccgccgcctcctgggaagccttttgacgttcgcgcaacaggtgcgactgacggctagcaaatctctgcgatggtcgtctctcaaattggaccgttctcctggctcgactctgctgcgtggtctggaactcggtgcgaccggaataccggaagcgagagcccatacggaagaagttttgacgggcggaggggcctttgaccggcgccctaagccggaagaaggtgtggtgctccacggcgcacttccacaggtgtttgcacgccttctcgttgtacagccggaagacaaaggtgtgctcctgctctcttccctcgtcgtcatcctcgatcacaataagagtcaatttctttttcttgaaatccagcttactgatcttgggccagaagaacaggccgatcttctgatcgcgttcgaaaacaagtattccggtgggcgtaaggccaaggtggtattcgcagccatcctttccgagcaccgtgtgcatgtcaacaccgtacatatccagccacttggccttgttcaggaatgccgtttctgcttgagcaggtgtgagaccacggcacgtcttgtactcgtctagtatggctatctccaggtcctccgtttgctcgggcacaaaacggaactccgagacggtggcggcggaatgctcctgattgtcatagtcgcccagttcagctgtgagtgaaaaataaacaattagtcaaatagttaaggaaactcgtgctatatcgatgaactcataaaactgtttttaaagatgagtgaatccgtcaaattaaatcaatgaaatgaagaaaaacacctacactgcaatgccaaagcacagagttcggtggccttgtcctccggacagtcgagtcgcccctcgagaagatcttgtttcagttgcaagaagaacaggtagcgggtcagctcttcgcgcagtgtattgggttccgaagagtaaaacttcaccttcagccggaacgtgtagggcggcccaactgcgggaaaggtaaaataattagtattgtttggcccacgtaattggtttcacacattaactcacttttgacctgcttcttgatgggcttggtgggatctagccagtgcttgacgtgattggcatccatgaactgcagcccaaagtaatccttctcgatgatgtccagtgcgtagaatacctgttcgtacaaaaagctgcccaatgcctttttctgcaatcgcaaacagcaaagtggaaaattaatgcttccgacggggggcaggtgtaaatcaatgcgaccctgaactaatcacgttcgcttagcgggttaaattatgtgctgatcagcagcaatttgcttatttttatcacacggactgaggcaatgcaagctgcggtagtgtcttcattagggtggaccaataaatgaaatggttaaaacgtttgctacacaattgttttgggctgttttgagaattcaatacttctcttagcagagtgcatttaatggacaataaataccctgacttacttcttaatataaataatatttctgagctcaaatttaaaattcgtataaaggatagagctaaagatgattcgtaaaatttaagacattatttatttagtacgtaatactgagccgccctaccaaccactttagctctatctttatctctaccttgacggtattctcttataagatccaatcgcttgtttgtttgccttccgaaaattactgccaacggcagcagtttaaagggtgaaagccaaaaaatcgaaaatgggccaaatgtaattcgatgtgggccctcctgtactcaccgataattcgatggaaaggtcagtgttgtccagcagaatgacgcggcagtcgattttgttcttgttgaccacgatgcgttgtggctttatttgtgagctgccgccggaggtgatggcaccaccacccccagccacgcccaccgcggaactagttgccccgccgccctctctcgaattatccacatagttgttgcgcaccttgcgacggcttagaaaacggagcatttttctggattttgtttggttttaaacgtgtgtatgtatgtattatatattgcgggtggtcgttattgttgttttctatgtgttgtttttatggaattgttgccaaggcagccgaatgcaccgataattcacctgtgtgctcacctcggctggggaaaaaagacagcgcagacatcaaaaaacccctcacacgcacacacgcgcagccaacttgttctggccaacacacacgtacactgactaaccaacacacttgcaagcgatagacgcccccgttttacttaagttttccttttagttttttgtttttttcttcacttttggttcggggagctgagctaaagttgctggccaaagtgggcgctcctttcgggcggtttctttactacgggttttggctcgtcgcaccccctcccccgcgaaaaaatcactgttagcctggtttttggttggcgaaaaagaggagagagaaaaaacaggccagccaaacacgttagttcccgcttcgcgaggcgactttccgggtattcaatcacttgttttcacactttattttgttggcggtgctgcatcgtccggtcactattatgttttgttattattttgggctatttaagtgcactttcggaatttttttaggagtagaatgtaagaatggccgcagtagttgttgatcttatgcgagcagtgtgaccagatgtggtcacgacaaatataccaagtacacaacaaattgtacatgtcggttttcggtatttctgtgtgaccgtcgaattcaaatcaggtgcagagccacgatattcgttgagctaagacacgaacctccccgcttggctagaaaacagctaattcgtccatttcaattttactttcttaattttccacttggtttttcatgtaacctgtattttgatagaaaatattataaaagatcttacaacaaatgataatttccaaaaattaaacaaatggaagtaaagattgatttcaacaaattttctatacgttgtgcagaaaattctaattaattaaatttatccaaactcatcaagtattttgctacagtgtgattctttcaattcaaaattgttcaacgttatatttattagctaatacacatgggataattaaataaatcagaagaagaaagcacgaatataaatcgaaattatgtagacacagtaaaaaacaattccagccatattttgcatcaaaagagaagctacagacttgatcataatattttgacttttgcctgtggacaagaatcgcacaaaacttgttggcatttgcggtcgcgcaattctttaagtttagtacaagcaactaaactagaaagaagtgcacaataactgtaaaataggaaacacaagtgggttccgtagttgcagccggcatttgcaaaatcctttttatgggcaatttattcctttatttgttagtggatttaaggacgtaacagtgtccactcccgcacatcccaacttccctaacttccccaacttccgcacccattttcctccgattcaccctcgatccccattggtagtcgtatttcgagtttaaaggtaaatgggagatttatcgccggcgatttccggtctacatatatgtgtgtgtgtgtgtgcgagtgtgtgtgtgtagagttggcggtgggtgggtgttttaacatcttggctgcgggccctgtttatatcgg

SEQ ID NO: 42194 - DNA, 4356 bp, DROSOPHILA
atctggtcacactgctcgcataagatcaacaactactgcggccattcttacattctactcctaaaaaaattccgaaagtgcacttaaatagcccaaaataataacaaaacataatagtgaccggacgatgcagcaccgccaacaaaataaagtgtgaaaacaagtgattgaatacccggaaagtcgcctcgcgaagcgggaactaacgtgtttggctggcctgttttttctctctcctctttttcgccaaccaaaaaccaggctaacagtgattttttcgcgggggagggggtgcgacgagccaaaacccgtagtaaagaaaccgcccgaaaggagcgcccactttggccagcaactttagctcagctccccgaaccaaaagtgaagaaaaaaacaaaaaactaaaaggaaaacttaagtaaaacgggggcgtctatcgcttgcaagtgtgttggttagtcagtgtacgtgtgtgttggccagaacaagttggctgcgcgtgtgtgcgtgtgaggggttttttgatgtctgcgctgtcttttttccccagccgaggtgagcacacaggtgaattatcggtgcattcggctgccttggcaacaattccataaaaacaacacatagaaaacaacaataacgaccacccgcaatatataatacatacatacacacgtttaaaaccaaacaaaatccagaaaaatgctccgttttctaagccgtcgcaaggtgcgcaacaactatgtggataattcgagagagggcggcggggcaactagttccgcggtgggcgtggctgggggtggtggtgccatcacctccggcggcagctcacaaataaagccacaacgcatcgtggtcaacaagaacaaaatcgactgccgcgtcattctgctggacaacactgacctttccatcgaattatcgaaaaaggcattgggcagctttttgtacgaacaggtattctacgcactggacatcatcgagaaggattactttgggctgcagttcatggatgccaatcacgtcaagcactggctagatcccaccaagcccatcaagaagcaggtcaaaattgggccgccctacacgttccggctgaaggtgaagttttactcttcggaacccaatacactgcgcgaagagctgacccgctacctgttcttcttgcaactgaaacaagatcttctcgaggggcgactcgactgtccggaggacaaggccaccgaactctgtgctttggcattgcagtctgaactgggcgactatgacaatcaggagcattccgccgccaccgtctcggagttccgttttgtgcccgagcaaacggaggacctggagatagccatactagacgagtacaagacgtgccgtggtctcacacctgctcaagcagaaacggcattcctgaacaaggccaagtggctggatatgtacggtgttgacatgcacacggtgctcggaaaggatggctgcgaataccaccttggccttacgcccaccggaatacttgttttcgaacgcgatcagaagatcggcctgttcttctggcccaagatcagtaagctggatttcaagaaaaagaaattgactcttattgtgatcgaggatgacgacgagggaagagagcaggagcacacctttgtcttccggctgtacaacgagaaggcgtgcaaacacctgtggaagtgcgccgtggagcaccacaccttcttccggcttagggcgccggtcaaaggcccctccgcccgtcaaaacttcttccgtatgggctctcgcttccggtattccggtcgcaccgagttccagaccacgcagcagagtcgagccaggagaacggtccaatttgagagacgaccatcgcagagatttgctagccgtcagtcgcacctgttgcgcgaacgtcaaaaggcttcccaggaggcggcggtgtcggctgtggcctcggttaatgctcgagctgctgccgctgcggctgccgcagccgcatcccaatcgcctgcaccggctactcccttagtatcttcccaagtatcgacaccgactcctaacaacgataacaataacgacgccttcgactcgctcatttccacggatcagttcatcactgttacaccttcgccttcggtgcttactgtcattcaaaactctgccattattgaaccggatgcggcttgcagcggctccatcagctcctcatcccaggcagcagccaactttgcttcgctgggtcgcaactccctcaagtccaacttcagcaacgaggatccggcgtacagcaagattggatctattggcaaggcgtcaggattgactgtgaaattggatccagactacacaccaccatactcaccgaacgccactaagaactttgatgaaaccaatccatttagaaatgcaacgagctcccaccacggcagctttggcaaggcttccattagctccggtcagctcagtgttaagagcggcttgtcggataaagatagagagctagactcattgcttaagtccattgtcaaagatccatccccatcagtgctagcaaacgaagccattaatgatgctaacagtatcagggtgactatcaacaagaccttcgacatggaccacaacacggagacactgaagcgcctctcgaacgccaacgagaaacccaataaccaagtgaaactggccaatgtgaacaccacggccctgccgcctggcaacatcaagtgcaatattttaaaggctcgcgttgaggaggagctgggtgccggaggcaacgccaagcttaccaatcagatgttcgtaccggccgcccacagcagcaacatgcacacgagcaacacaaacagcagcaacaaccatgcacacagcgatggaccggattccctgaacgccacctacatatcagtgggaggcgataagctgacgctcagcataccggaacagaagccgtcgacgggtagtagcagtagttccagcacttcgagcaccgctaccaccaccaccaatggaaatggaccctatagtaatgccacctttgtgtctggattcagtgcaccactcactccgccgtcgtcgctgcctgcgaatctgaataataccggaagcgggtgcaatacaacccttaccagtgtgaccaccatcagcacgcccagcagccccaccgccaccgttagcacgaccgcctcggagtcagtggctcccgctttgagcaacgcctcggccgccgaaatactcattaatgaaatattcattaacaacatcataaacaataatgccagcggcagtatcactgccgaaactgctgccaagccggcgggcagctcgacgcccagtgccggcaccttgctcttctccacgctcagtgaacaggagcgcttggaatcgcagaaaaccaaccagcagatgaatcagagtctaaatctgaatcaaaaccacagtgaagtcgatgcgccgccgagtgaaaagaaaactccgagcaattatccggacagcagtcgcattccgtttccgtccagcagcaacagcaaagacatggtatcgccctggctggtttcctcggaggtggtatcggcacccaagggacgcgagtcggccatcattcgaaaatccgttattacaacccagttgtaattattgtttaacagtaacccctactccgcgtataagctaaatgttctaatttataatcggtagctatggaaatttaggcagacgtaacgtattcgtattttatcgtagacaaacttagacgagttttaagcattccaagcgagagcaacgacaaaaagacaatgagagagcaggtccaatcaaaagcatactgtccctaaatgtgccttaatgatctatatttatatactttacatatatcatatacaccgatgcgatatcgaggaacgaaatgtgctaaaccgtgtacttaataaagtattcaaccgctaactgtaagtgtatagactggatttttaacagaaaataaaaacgtgatgttgggcgttctgcttaatatactaggcttatattatagctaagagatgtgaggaccgtttaatgtgcagtattccaattaacaactagcagaccactaagaacaacgaaattttaaactgcagccacaaaattgactgaaagtatacaaatcgaaatgagctgaattgaatgtaattgtgcgagtatttttgtaaatgtattgtccgccgggggtcccagaaccgaaaaaatgacttaccacacaccaacgaaatgttaagtgcaagcaatccactcaattattttttgtctaagcatacagcaacgatgttgaagcatttaaatgtataaaatattcaataaaaagtgcatttatgcatcatgtatacagtacaacat

SEQ ID NO: 42195 - protein, 972 aa, DROSOPHILA
MLRFLSRRKVRNNYVDNSREGGGATSSAVGVAGGGGAITSGGSSQIKPQRIVVNKNKIDCRVILLDNTDLSIELSKKALGSFLYEQVFYALDIIEKDYFGLQFMDANHVKHWLDPTKPIKKQVKIGPPYTFRLKVKFYSSEPNTLREELTRYLFFLQLKQDLLEGRLDCPEDKATELCALALQSELGDYDNQEHSAATVSEFRFVPEQTEDLEIAILDEYKTCRGLTPAQAETAFLNKAKWLDMYGVDMHTVLGKDGCEYHLGLTPTGILVFERDQKIGLFFWPKISKLDFKKKKLTLIVIEDDDEGREQEHTFVFRLYNEKACKHLWKCAVEHHTFFRLRAPVKGPSARQNFFRMGSRFRYSGRTEFQTTQQSRARRTVQFERRPSQRFASRQSHLLRERQKASQEAAVSAVASVNARAAAAAAAAAASQSPAPATPLVSSQVSTPTPNNDNNNDAFDSLISTDQFITVTPSPSVLTVIQNSAIIEPDAACSGSISSSSQAAANFASLGRNSLKSNFSNEDPAYSKIGSIGKASGLTVKLDPDYTPPYSPNATKNFDETNPFRNATSSHHGSFGKASISSGQLSVKSGLSDKDRELDSLLKSIVKDPSPSVLANEAINDANSIRVTINKTFDMDHNTETLKRLSNANEKPNNQVKLANVNTTALPPGNIKCNILKARVEEELGAGGNAKLTNQMFVPAAHSSNMHTSNTNSSNNHAHSDGPDSLNATYISVGGDKLTLSIPEQKPSTGSSSSSSTSSTATTTTNGNGPYSNATFVSGFSAPLTPPSSLPANLNNTGSGCNTTLTSVTTISTPSSPTATVSTTASESVAPALSNASAAEILINEIFINNIINNNASGSITAETAAKPAGSSTPSAGTLLFSTLSEQERLESQKTNQQMNQSLNLNQNHSEVDAPPSEKKTPSNYPDSSRIPFPSSSNSKDMVSPWLVSSEVVSAPKGRESAIIRKSVITTQL

SEQ ID NO: 42196 - DNA, 7595 bp, DROSOPHILA
tgactgcatgcaaatttcgcagatctgtccaccttgcccctgtgcactttgtttcttgtttttccatcaattactgcctggagcggccgatactatctaatcccaccgacgcctgccaatcgaccggttttggccacaaattattaatggcatttaaagcagaatactgtgtgatgaccgaaactggtcgcttaatttggcaaacttagcaaaaatataagtttaatattcttcgcacatttaatataaccttactctacattgccttcaattcgagaagagtgctaatatacggaatatttatttcccaaattaagtaatattaatagccaacgatgcgtggaataactgccggatgttggcttatcaccttgccagggtatcaaatgttaaccaatctccaataccgtgttccacattgtgtatatctgttaccacactaatctgcaacaggtggcagacttgttccgattttatagttaatgtctttgttaatcatttgagctgtgacactgccattcaatgcatactaatgcgaaaataatccacgataaagtgtcgccgccgatattaacgtttaattaattggtttgaaagtaataaatagtagtatctattgccagcattaatcagactttgtagctttattgctggagaagaaaaactataaataacatttgttagagccataagttaaaagcgaccaattcataatctatagaattccggaatacggattttacaccgattagttggtttttgaactttgaattcatgataggtaataaaatttgcaggcttcgaaacaggaacttgcaactcaagctttttgattgatgactcgttttatagctccacagcaactttggttaaggtacaagtcttacagtcaatacacatgagcagatatgtcataaaaataatttattcaatttacattttatatttacatcagctgatgcgagcattgcgtatacgcagagtgtacgcgagttgtctttcactgctgatccaccgacctcgtggtccgctgatagtagtaaccactgtggcggccgctgaaggcggtgggtggcaccgaaaccactcgggtggtggccgccggagaggtggtgcccaccagggtgtccaaataggaccgctggaagttgtccctggtcgccttgctgggcgggaaggcctctccctgattcaaagcggtaaacggattgcgagcagaatagttgacaatgccgccggtctcgaacttaaagggcgatttggtcgtaaagggcgtggtcagcgccggactggtgaagtacgtttgcagggcattcgtcgaggcctgaccgtgagtattgaaaacgccgtagttcaacaaactattgtgagtgggtggtgcgggtagggcgactcgatgacccagcagcgagttcccagcgggcagttctagcctaacaatgcgattgttaaactcattgggattcaggttcttgaggaagaagcgatggaacttcgaggctatggcatagattacacccggctccgattttgtggtggtgatatcggccacaaactgcaactgatcgcgatcgaaggccaataccgattgctggtttgtcgttggattccacgaggcgatggctgtttcactcaggggactgaagatcaggctgctgtcgaacggggatacggcgaggccaatgccctgggagctcttcttgcccaccagcttcacatccagcattttgccatctggcaaaggacccgcacgcaggacattcttatgcacggagaaaactctgtaaaataaagagatacaattagatattactaatttttgctttaaaatctaaacctatcatagcctatagcctatttacttttttaattatgatcgtccatgtatattttaatgagaaagctaacataactcgaagatatttgaattaatttaatgatcattatttcaacagttaagctaacattgaaactcaaaaggcaatgtaagccattacagataatcataccttcctaaagctacgtgaccaattaccttaagtcaataaaggtatttctatgttttttgtgggtaatttgcaactgaatgaactggttcggttttctactcaaaaatcgaattacctatcaaattttttactgtttaaagttgactcacctatccgtggccaatggctggaagtaaaccacaccggtgcgctcatcgaaagtcaaaccgaccactccatccatcagaacaaagcggtgctcatgaatctcggactgtgcgaagtccggatcaggatacatggctggatgggatacccgccaggtgacgtcctttccactgtcgtacacaataattcccggctccacggtgtcggtaatatagacgaacacatcatcgcatcccttggccgtcgtctcatcaatcaccatgttggtgaacagggactctcctcgcaggacctccggaggaaaatcaatacgtctcaccactcgatccgtcgccagatccacgaccaagatctttggcgggcaagtgatttcgtaatcctccagggatctcgatattccagcatccagcagccaaatgcgattgcaggaatccacacgcaggcggtaaaccgaagtcaggatgagatcgctgcagttgaagtcactgcgtcctgtgttggagaatgtccaatcgggaaaggcgttcagggtgggggaatccccaaactgggccttggaaacccagctcacagtcgagggcactcctgagaagagctttggtgtggccacaaatatccgatcatccgtaacagccaggccggtgatgagaacattttgaggattatagaaattaggatcggagaccggagcctgaggttcgaagttatagcgcaggagtttccactgcttggccacctgcaagccaggggttagagcctggctaaccggcgaccaaaggaccgcacaaatcactccaactaggatgcgaatcatggcaagaggaggtctgcaagatattaaaacaaagaaaccagaattacttgatgttgcagctactgcaagtcgagaatttaaactgctgcaattcagattctgctggggcttatctatcatttctatttccggacgatcgtcatgggaggaaattgcaatcacaaattttcccaacataaaaatcgattcttattgttgctaatgaaagaattagcttgttttgtactttaatgaatgtcgaacccttcgaaaatctttatgaatattaaataaaatctctcaatcgaaaaggttgtttttattaatggctttgaaaatggtctacatttctttataaacaccgtgcttaataatatgattttaccaatattatacttgaaactagataaacaaatattgcaattttatagtatagagatttattttcgtatgtgcatatttttttatgctgttactaattttcttaatcatattctgaattttaccttaatttacgaaactttatttgtagtgtagagactttgaaaaccgcatgcaataaatgcataatcaataggtgaagtaccagagtccctggatcgtgcaattgaatgaattagctccaaacgattagcaagtcgttttaggcaattgcagacgatgcatttttaattgttgagctacaatctacatacaatgccgtaaactatttcatggaattcccagccaattcactcaatttaaatggaaccaataaggttagttagctgtcaaatcagaagcctttctaactaaatgcagaaaagatattctcggtgatacatattacatgtaaatgtgccaattccggtaccgaagccggtatgcggattgtggatttgtggagtgcagacttgaaaatgcggagtgggcttggcaattgtattcaaatgagttcgcaatgcagctgggtcagtccggattgaagtgtccgcatccatcagatacttgcgcttgcatctgcggcgtgcttttatttctcacgccagtcgaatcccactcgtagacacgatctcaatgatcagttgcaagagttgcactaataaaaaattcaaattgtcatgtctcaagaaacaaacttccattgaaaaacatatttggatacattttctatatcaatttgctatttattgaccattagccatcattacgctttagttttaatgtttattaaaatcagttaacatgacatgcattttaaaattgaagtttaatattcagcactcagaaaaaaaacaacatttttttacttttggatatcgcagtagattgcattgttttttaatatatcccaaatccatctttaggttttcgacccgactttctgcagtgtaacggtcaagcgtatgcattttttttaattgctcagcaagttttggttggtgcggagacataaggaacgacactttaatttgctatccactggtcagaggcatttgaatattttggccaattggctgtgggcagttgtctctgatttcgctcaaaacatatactattaagtggcggaggcaactcctagactcgtttggctctggcaaattgcagagaaacatggccaacgtgctgcatgaaactttcattggcgcgtgccacggtaagcagttagagataattgaatttttgtaattttcaagctagcaactggcatttgatgaattacataaaacaaagagtgaaaaagtcaaggctaatcccggcgccacatgcgtaaaatagatttatttctgcgcacctgtgcactttacataacacttgtgcaacgtcgagcggaaactcggaaattcagaaaagaaatgtgaagaagaaaactcgactgaggtttttgtcactagtttattgggctcactgggcggcaagcggaacaaaccgcttacaaaaagtttacaagtcaagagctacaagccataaaacgccaggccacttgttttttatattacatgttattatatgtacttttttttggctcaaatgcgcatttcgcttgatagccattcacgatgatgagctatggcagcccaatgaaatttcgcttaattttcgtttaatttgtccattaactttcagcacgaagtggttcgaaagcgtatgctgaaaacaacttggctgcacgatagaaaaatcttggccaaattatttattgcaatgtagcagtttaataaaatatttggctcagtgacccttggaaaatcgctattttgccgttttagacatgcaattttaatcaatgataagagaatttgtaaatttaactaaattaaaaaattgatgactgattttccaccaaatgttttatagtatttcagcatttcctaggtactgtattgatatgtattttcaaaatgcataaaataaattacattttattatgcatctaggcccaaagcctagaccaaacaaataaatcaatgaaaacccctttaaaaactttgacctaatgaaattttctaacaaaggcctaatattatttacattattcattggaagcataaatctatgcgcaataaaagaaatgtatagattgtgggccacttttggacagcccattaattaatgggtccctttgagacatctccatagccaaacgtgacgtaacgaaaagcgttattcccccattggacgccagaggctaattaagcaaaataacttcaacctagttgcaccaactagtactacacactacgactatgcgattggatggtgtgttgccttatctgaatcacaacgttacaatgttttgcacctcgttgctcggcgaattctcacgcgttccacaatggacatgagaccgaaaatctttaatttcaattgagttgtactattatactttgatcctatttgaatcgcccaatttcggtgttctcataaaccacaaaactgctgcggagttgagcggaaggcatgtttgtcgaaggttgattaacacctggttgtgaattttgtatttttgcaaacggcggaaaaggtcgccgtaacagcttccttagagctagcagacatgtgcacatcgatatgcggtcataaatccagtatagatcggcagtcacgtagagtggctgcactttgcggcagcgatcgattttaattgggcccaaaaaccgaactaaacaaaaatgcgtttgccaacaaaacttaattaacacagttccgttctccgaccgcagcggcttcttttggccacaaaccaaactaaaacacactgacacacgcgattggcgcatttggctaataatttacaatgtgcaacagcatacccttggcttcggctattgatttgccaattaagtcagatgggctctatatatgttattttttgattaggaattcaaacggtgagagtggcattggcaacgcctcataagctgcagtcgagcaggtaactaaatgcacggcaatttgcactttaaccgttgaaaaccgcacttcgcgaagtggcagcaatcggcgcggcgcgttcgttgcctaagtcttttgttttttggccgaggcaatttgtgcttcatctggcatttgcttacttttgatacactttgagcttgctggagctggttgttgagtagtagtggctgctttatattttacttaatcctaaattactgctctttttctttttactgatcgcgcgacacgtccgagcgtagcggttgccgttttgcgactgcgttccgtttgccaggcgcaccaaattttataagagtgggttgtttgttgccttatattggcctaacaacctatcaacttggtcgactcctgctgcattgcaactcttatactctatgggcggacattcagagcagcttttctgctgggcacacatcactcatacgctcggtggtgctagtttccgcaaatttgcattaaagtctgcaggttatgattgctggcaacgcgacggccaattgttgtaattcagttgttatttgctgcggcaattgggctaactctctttacaagttcattatcgccttgccaataaataacttattcggttttattttcgcatttggtgaattttgtgtctttttatcagcatatcagtgcctgtttttgtcaatggagagtccattgtactgcatgatgatgcggctgaatttaaggtaaacagacacttataaattaaatgtactgggttggcaattaaaataccacaaccagttcgaaaggccagttcagctcaaatgaatatttgttttattgatatttttggcatacacaatgctgcatttaaatgctaagtaattgctaagtcaaatttaagatttatacatccccttaaatatgctaacttaaaccatgtccctacttgttagtaaaaactagattcctaactggattttcaagctgtgctgagaatattgcaagcattatttacattttcagagcccccaccgttgataagtaattggccagtcaaatcggtgatttatattccacccttttatttttattttaattataaatttcagcttacacggactggattttctacccagttgtcagactaagctgcatttaaataatctgagcccctcaattgataagcgatagtctttcattcaaattccgccttctgttgactgcatttaattataaatagagtttaccct

SEQ ID NO: 42197 - DNA, 1695 bp, DROSOPHILA
aaaaagagcagtaatttaggattaagtaaaatataaagcagccactactactcaacaaccagctccagcaagctcaaagtgtatcaaaaacctcctcttgccatgattcgcatcctagttggagtgatttgtgcggtcctttggtcgccggttagccaggctctaacccctggcttgcaggtggccaagcagtggaaactcctgcgctataacttcgaacctcaggctccggtctccgatcctaatttctataatcctcaaaatgttctcatcaccggcctggctgttacggatgatcggatatttgtggccacaccaaagctcttctcaggagtgccctcgactgtgagctgggtttccaaggcccagtttggggattcccccaccctgaacgcctttcccgattggacattctccaacacaggacgcagtgacttcaactgcagcgatctcatcctgacttcggtttaccgcctgcgtgtggattcctgcaatcgcatttggctgctggatgctggaatatcgagatccctggaggattacgaaatcacttgcccgccaaagatcttggtcgtggatctggcgacggatcgagtggtgagacgtattgattttcctccggaggtcctgcgaggagagtccctgttcaccaacatggtgattgatgagacgacggccaagggatgcgatgatgtgttcgtctatattaccgacaccgtggagccgggaattattgtgtacgacagtggaaaggacgtcacctggcgggtatcccatccagccatgtatcctgatccggacttcgcacagtccgagattcatgagcaccgctttgttctgatggatggagtggtcggtttgactttcgatgagcgcaccggtgtggtttacttccagccattggccacggatagagttttctccgtgcataagaatgtcctgcgtgcgggtcctttgccagatggcaaaatgctggatgtgaagctggtgggcaagaagagctcccagggcattggcctcgccgtatccccgttcgacagcagcctgatcttcagtcccctgagtgaaacagccatcgcctcgtggaatccaacgacaaaccagcaatcggtattggccttcgatcgcgatcagttgcagtttgtggccgatatcaccaccacaaaatcggagccgggtgtaatctatgccatagcctcgaagttccatcgcttcttcctcaagaacctgaatcccaatgagtttaacaatcgcattgttaggctagaactgcccgctgggaactcgctgctgggtcatcgagtcgccctacccgcaccacccactcacaatagtttgttgaactacggcgttttcaatactcacggtcaggcctcgacgaatgccctgcaaacgtacttcaccagtccggcgctgaccacgccctttacgaccaaatcgccctttaagttcgagaccggcggcattgtcaactattctgctcgcaatccgtttaccgctttgaatcagggagaggccttcccgcccagcaaggcgaccagggacaacttccagcggtcctatttggacaccctggtgggcaccacctctccggcggccaccacccgagtggtttcggtgccacccaccgccttcagcggccgccacagtggttactactatcagcggaccacgaggtcggtggatcagcagtga

SEQ ID NO: 42198 - protein, 530 aa, DROSOPHILA
MIRILVGVICAVLWSPVSQALTPGLQVAKQWKLLRYNFEPQAPVSDPNFYNPQNVLITGLAVTDDRIFVATPKLFSGVPSTVSWVSKAQFGDSPTLNAFPDWTFSNTGRSDFNCSDLILTSVYRLRVDSCNRIWLLDAGISRSLEDYEITCPPKILVVDLATDRVVRRIDFPPEVLRGESLFTNMVIDETTAKGCDDVFVYITDTVEPGIIVYDSGKDVTWRVSHPAMYPDPDFAQSEIHEHRFVLMDGVVGLTFDERTGVVYFQPLATDRVFSVHKNVLRAGPLPDGKMLDVKLVGKKSSQGIGLAVSPFDSSLIFSPLSETAIASWNPTTNQQSVLAFDRDQLQFVADITTTKSEPGVIYAIASKFHRFFLKNLNPNEFNNRIVRLELPAGNSLLGHRVALPAPPTHNSLLNYGVFNTHGQASTNALQTYFTSPALTTPFTTKSPFKFETGGIVNYSARNPFTALNQGEAFPPSKATRDNFQRSYLDTLVGTTSPAATTRVVSVPPTAFSGRHSGYYYQRTTRSVDQQ

SEQ ID NO: 42199 - DNA, 5320 bp, DROSOPHILA
tattccttattgtgactttaaacgaatgtaattaaaagtaaaatacatttcattatttaaataatgctgcaatgagaaaaactgagtggaagtcaatgagagcacagccacttggatcaagatactaaaagaccaaaaggtaatccatttgatacgccgtttgtaggcaaaccagcaaacgatcagttaacattagtcagcagaaaaagtgctctggtcacaattgtgttctaattaaaacttgaaattccgtttgtatggcagcaactataaaatggtaatgaaaattggcaaaagtatcagtcactgaccaaccaacaaacccaaacaaccaactcaacatgaagttcctcatctgtttgaccctgtgcattgccgccgcccaggcaggattcatcgcatctccagtggccacctatgccgccacctattccgcagctgctcccttggcctactccgctccggttaccacctactccgcaccatcatactccacctacgccgctgccgccgttcccgcctacaccgcctactccgccttaagtgctcctgcttacactgctcctgtgaccacatatgccgctggaactgcctatgctgctcccatcaccacctacgcagctcccgctgtcgtcagctctttcttgaagaagaagtaaacaggactcctgcaaaagacataatgactcacccaggcaattgatcaaacaaaataaaattattataaagcaatctattataactaatcatcttaatctacttcattgtgtaaaccacaaatccgactgagaatcccctctctttaaaaggcgcaaaattagttgatgggagaaatgaaaggcactagcttagcataacttcagggggaaaattttaactaaatgtataattcacttcattaaaagcaggaacatccaaagaaaatagataatttgttattattaaaggcacattataaccggacttaccttcaacattacaatagaaaaacgcttaaagtaccatattttatttcaactttattaaattgctactttacgatcagctctttgaaaactaatttctgatacacatattcgagctgcataattggacggcttgcgtttcaattggcctaaaaaacaaaccaacaaaaaggtcaagagcaaaatacagcattaggtgttgagattcccgattgccaaaggtttgagctgacttggaagagttatataaatggaaacatcggagagagtggacagttgagcttagcttagcttagtagaaggagcggataaaccaaagacccagcagggagctaaggatggcgcttacgctggccaaagatggagtcgatgctccgttgtgctggttgcagatgcgcggctgcggggcggatacgtattggcagatggtgcccaccaagttcacctgggcgcgatcattcaccttcttgtcgaattgctgaaagttaaaaaatagcatagattttgttattaaggcttattgaattatttaacttcaaagctagctgtaatagtttatttgttcttttacgatttactgacctcattgaacagaatggtgggcacgctggtgagtggctccttgagccgcatggtgctttcgccggccttccggagcagaacgcttccctcggtggagttggcacaggtcttgatgttctcccagttattgatgtggttctccgaggcgcatcgctggccgggatagacgttgtccgggaaattcttgccggccttcattaggcagttgatgaagtccatcgtgagcgactcgcgcgtgtactccacctgataggagttggcctgaatgtgctcgatggcgcaggcatgcaccttattgccatagcactcgttcggtccgtggtggcaggtgaacgtcacttcggagccctgggtaacgaactgtggagggagccaggccaggagccatgcaaatgagccattgtcctgccgataaacggtgccagagggccactcacctgagactttccgaatggcacgaaagtgagttccaccacatcgcgcagttctcccttcaccgccggatatacctgctccgtaatgaacttggcgctgtccgggcacagggactcgtagtagatagaaattggcacctgcagaaagaaacagggtatggtaagtgagccttatttattacaaaattgttacatatatagatattagcttgtttatccttaaacttcggaacacgtaactaagtttatagactttaaaaaacctgttctcaagttcttgcctttaaatcttaaaacaattttgaatttcaatatattttatgttatctgaaatggttggttgcagtctgttcaatggccacggagggtgcattgcgcaatttgcatttttcgagagtgcagccaagctgaggcatgcaaatcacatgcggctgaatggacagggtccaaatatggctaccctttgtttatcaattgggagacaattgccacatgctccagtcgacgagccaaaatattgttgaacttgggcctgcatacatatgaaagttataaataggaacactaaacatgtacctaagtatatctgcgtagagaataaatcgaggcaagattcagattgaacatttggtaggtagtacatttaatatagactaacaagatcaaagtcaatcatattttctgttgaattgataattgaatatttaatatgggcaatattgttttcacatttgactagtgacacataatatgtgtataaatgtatatatgtacaatttgttttgttatcttaggtctactcccccaatttaaatgaattcagaaattgcgacacattttcgtacgtaataaacagataaaaattgctgactatagcctttctttcaagtattcatcaaacgccaaattagttattatttaagaattgcgtacagtcaacataaaatccgtatttacaataaaatagcttacaaatattccgaacaaatgactattttcaagcttacgtgcttctaatacatatgtttatttattagtggctgtgcaatcaaatggcattcatttaatgtaatttcagttgattattttagcccaaattgaagctttatttagatggaaaatttaagtaaactttgtaaagctcgtgatcgaagcgcaaatgtttgaacaatgccagccgaaaagcaggggcaataaaaaataaagaaaataatcacaaatatgtgcaaacggctatgaatacaaatgcaaattgctttttgttggagttgaagttatataaaagctaatgacacatcgccgaaagaacccgccattcttctcgatctaaacaacaacagcagcagactcagctaagtatatatgtatgtatatacaattcgattgtaccgcacatatgtgcacacaaaaaaattatacctaactttggaacgttctgaaaatgcattgcataaattaacggggttgtgatagtgcaaaaatatagctgaataattgtagaaatctaggtgagcatatatgagtgatcatttttaatacaccaacataaaatgatgaaaaaataccaataaaatcaggaaggtatcgtatatcagaagaattgttagataaaatggaatatgactaatgatcttctgcttgaaattgctgatacttcttggaaacattgtgctcagtgtagaatgaagttgcagttggggctgtgccggcaagctccggttcttctatgagaaatcgaaactggtctccgaaccggttcttcgcccaaatgaaaataacaacagagcaacagggcgctctccaagctcacatacacatacatacacgcatacacatgcatttatattgtcaattatgctctacgcttttccacggtggcggcattttccgatccgacgactacgacgtgtggcacagttcgttaaactctcgaaatgccacttgttgctgccacgaaaagggtgcagctcttttatggatttttttattttgcatttttgtattcctatacccccactatttagttattcgacttaatcacgtcttcacctaaatggtaaaagcaattcggagtgcccctgacacgcttggctgttgtgtaatggcttagttggccccgttggctgatttttcgctagtttggcgaagggtttttccgagccggaaactcaccttagcggcactataagccgtggcaatcaggcagctcatcaagaggcacacagcggcgattttgtgactcatcttcaggcttctcgttcttcagaatttcttataaatgcagttatatagccagcacgtaacgaacggcggtcgtgttgttagcggttcggtggctgagcgcgaactgttgattgttgtagagagcttgacgcttaaaccgccgttccagttccagtcggccattagaaagccgatttccagactgcccaaccatgagtaaataaatgtactatcttttttatcatcaactatgtattatcttcttgaaatttatttctattttcaaactattgtccgccattaaaaaaaaaattacacaaattaacttcaaatggctattaatcggtttatattggatcttttgagtatcacaacattcagcttcgcaattataactccttccagtattttgcagaagagaaaattaaagttttgaaacagtatatttttttctctttcgcattgtaattaagagaattttaaaaaaattgatttattggaaatagatagccaaagcatggatttgcaatatatggttcgcacttacgagttttccatataccatgttcattaagtaaaaatatgttttccgtaaagaatattattaatctctttaaacgtattttacctcatatacttttttagttttcttatattttttattttgagtaattcacaggggagctaagccaattaaacataaacatattccatactttttcaagcatatcctttcaaaacctcaacataatttggccaccaaacttccgacacctggggaaatcagcccccaacaacgcgtccgcccacacaaaatgcggtctagagtaaatttgcgtaatttttgtttttataaataatggaattacagattaacatgcacaagtcctacgagctggaagtctcctaatctcgaaaccgaaatcccttggctatcaaatccttgcgagcctcctgaatttcatcctgcagctccttggcggcctcgggacaatcgttaaaagtcagagttctatatagaacagtccaaacggaatatatctgtgggtaatatatagtagtagtcaataagaggtgttatctgcattgattcatatccaaaaactcactccaaaa

SEQ ID NO: 42200 - DNA, 1105 bp, DROSOPHILA
cagccaccgaaccgctaacaacacgaccgccgttcgttacgtgctggctatataactgcatttataagaaattctgaagaacgagaagcctgaagatgagtcacaaaatcgccgctgtgtgcctcttgatgagctgcctgattgccacggcttatagtgccgctaaggtgccaatttctatctactacgagtccctgtgcccggacagcgccaagttcattacggagcaggtatatccggcggtgaagggagaactgcgcgatgtggtggaactcactttcgtgccattcggaaagtctcagttcgttacccagggctccgaagtgacgttcacctgccaccacggaccgaacgagtgctatggcaataaggtgcatgcctgcgccatcgagcacattcaggccaactcctatcaggtggagtacacgcgcgagtcgctcacgatggacttcatcaactgcctaatgaaggccggcaagaatttcccggacaacgtctatcccggccagcgatgcgcctcggagaaccacatcaataactgggagaacatcaagacctgtgccaactccaccgagggaagcgttctgctccggaaggccggcgaaagcaccatgcggctcaaggagccactcaccagcgtgcccaccattctgttcaatgagcaattcgacaagaaggtgaatgatcgcgcccaggtgaacttggtgggcaccatctgccaatacgtatccgccccgcagccgcgcatctgcaaccagcacaacggagcatcgactccatctttggccagcgtaagcgccatccttagctccctgctgggtctttggtttatccgctccttctactaagctaagctaagctcaactgtccactctctccgatgtttccatttatataactcttccaagtcagctcaaacctttggcaatcgggaatctcaacacctaatgctgtattttgctcttgacctttttgttggtttgttttttaggccaattgaaacgcaagccgtccaattatgcagctcgaatatgtgtatcagaaattagttttcaaagagctgatcgtaaagtagcaatttaataaagttgaaataaaatatggt

SEQ ID NO: 42201 - protein, 239 aa, DROSOPHILA
MSCLIATAYSAAKVPISIYYESLCPDSAKFITEQVYPAVKGELRDVVELTFVPFGKSQFVTQGSEVTFTCHHGPNECYGNKVHACAIEHIQANSYQVEYTRESLTMDFINCLMKAGKNFPDNVYPGQRCASENHINNWENIKTCANSTEGSVLLRKAGESTMRLKEPLTSVPTILFNEQFDKKVNDRAQVNLVGTICQYVSAPQPRICNQHNGASTPSLASVSAILSSLLGLWFIRSFY

SEQ ID NO: 42202 - DNA, 4998 bp, DROSOPHILA
gcatggcctacgatgaggacgatggcggctatcaggatggcccacgcgtccagcagtgcacatcgagttaagcgcccccgctgcgtgttgcatccccggacacacagccctaataataccccaaccaacaagccgtaataatatgtaaaccagctcccggaacactgtaattgcgcttgcaagtgccgaagaactcccaaaagcaccttaaaacaccatccaattcacactaggaggcccaaccaatcgagagatctaaagttatttcatgcaagctacgatatttaggtataaatcaaagaaacttatcagatatatgcactatgtctataacgcgtggttgtttgtaaaccaacatttttctttatgtttatgttgcgttggattgtcaaagaatcgaaaacggaaactgaaactaaactaaactgaaattgaaattagccgccactagaaccgtatctaaagtccgcgccagcgaacacgtctaggaacaagtttaagttatttaattccagcataaataaaagcgttagtttaaacggatataacaaataaataattaatacacaatttcaacccaaatgctgtatattcttcttcccatagttccagtatcacttgccttcctccggctatctattgattccataatcgctgcatagtcacccgcaggtgtgaatcattcgaataatgccaattggagatatcaggcatatggcagtagtttcgtcttgagtacattatttaaaatgctatctgggataagtaaaagataaaaagaaagataaggatagtttgggatatatatggtaatgccattaaatcgttaaggatataatgagggattttgtagttgttgaggattataaagcatcctataaatgaatctgcggacctgcctgtcgcaaggaataacatcaaaagcaaattcaaaatgtaaaatgttttgtaaatttatttacaaaatttcaaaatgaactacaacataatctggtggaaactagtgcgcaaagtttcggagagcggccacaactccagttccatagatgagcttctcctccacacgctgccaagcctcctgctgcacctgggacacagtgcgcagctcctttaccaaatccgggaactccgtcaacccgagaccgtgggatcgcaagaagacgcttagatacgattgagccagctcaaagttcagattggttccaaacatgaacttaacgagtttgaggaactgcagcatggcaaggagtgttcctccagcctccgggtgcagagatttgatctcaaagtcaaccatcgatggtcctagttgggtcaagtgcgccacagccgatgcgaagtccagggagtcagcagtttcctccagcagctggccaaaggcagtaagattgttgagagtagaagccttccgaatccgggattcatcctcctccttctgaccgttctccacatcgaagcgcagttccagtcccgaaaccgtgggcaggaagaatggggcctgtttgggagcttttggtggtgccttgggcttgttacgttgcttgattagctccaaatccaatagattctgccaacgggatgcagccaacccggatagcgttatcagttcctcggacagctgcgttggagtttcgtacttggtgtcaactagctcgccgagttttgactcgtcctcttcgtcgatctctagctccttcatgccatcttccagttccatggcatcgcacacattcgtgggcaatcccacgtacggagccggctccaaaggatcgatggagcgcagggaaatctgattaaacagcgtcttgttggcccacaggtaaatgcccaaaagtccaacatgtgcggtggccagaaagtcgccattaggcgacatacttaacgatacgcaaggcgcctcgacgcggaagtgatccaccatgtaggaggaaggtatgtcccacaccttgatcgtggagtccatggcggcggtgatcagccagcggctatccggactgaaagtgaggtcattcagcttggctgtgtgaccgacgaacttgcgaacaatgaccctcgtgtgcatgtctacgacaaaaatcttgaatgtttccagaccaatggccagcatggagctctctcggtgctgtcgaatcagggcgattccatctgccaggcgtagagtcgctaagggcttgtcaactgaaggatggtatgattttacaaatgttttattaacttatgttgtaggcaattccttaccctttcctttgaatgaccagaacttgagcaagccttccgaacagccagagatgacggtttggttaagattgtcgctggccaagccgcgtactgccatcttgtgggctggagagccataggtagcccgatggagtccagactggatattaaagcgctcaatgtcgccactgctatagccaatgatcacaaagttgccacagtgcgtcagcacaatgcatgtggtctcgttctggaagttggtgcggttgctgttttggaactgtttcggaaccaggcggtgctcgcccatacggttcttgccaaacgaccaggttgtcgtctgaataacgcccgcatggatggcagcgatgttatcccactccttttcgcgagccgtatccgatgtgaactccagtatgggtggcattccaaacttatcgtgctcaaagcgatctgcaaagaagagttgcctattaaaaatattttaaagcgagcaataaaagccaaaacacttactcttcttctttgtggcttttggattgtaggtagccctgcccatgctcttgttcagcgattcggaaatggtggagaagactctcatggtgctgtcctcgcccgaagagagaatggatacgcccgagctgccgtggtagcgaatacaaaacggcggctttgtgtgtccctcgcggatcctcagctgtctggcaccaccatctggcatatcgaaaacaaacatcctcattgaattgtctggtgaagtggtgaagaccacgggctcgctgggcagacaaatggccgtggtcaccgactcctcgtgcgcttgcagctgaccggctaacttgcgctcctccaggttccagaaggccatgtaaccattgctgcaggcggacacaaggattggtgggccgtcggtacggaaggaaaggttggtgacctgaccccaatcctgctggaagctcataagcacctcgtcgaacttaaggttaagcaagataatagtgccatccccgtgtcccacggccacgacatccaaagcaggggacggttcaatgcaggtgatcctgctgtcgtggtgactcaaagtgcacaccacactgttcttctttatgttcaagatctttagttggccctgctgggagcctagtactattttattgatgtacgtgggcggatgggtcacagctgtgatctggaactcctcagaccggaagggcacttccaaatagacatcctcggttgaaatattccacacttttaacacattctgcctatcgatggctatcaaactggaaccaaaaggcagcaggaggtggacatctttctggtggccacggtacacgtgccggatgtgtttgcccgcccgccaggcgtagatacacttgttgctcgccgtgtacgtgtgcagtcgatccgtggccagagccgtaatctcgtccggatgcaatccgctaacgtgcagcaggcgaaagtggttggcggtgtacacctgaaaagatctgccgatgcaggtgatcagcaaagtgtcccgacgacgctgcacgtagcgggtgactgctggaacctggttgctcacatagccgagggctcgattccgccggaagatgcagctgctctccttgaacacagacttccgctcctccgactgtggcttatcctccgaccgcagatgcgtcattttactgtccgaaatgtctctttctgtctttttatcgattttttaagctaatataaacgatttccgcaacatgccgaaaatgtttactgccaaaacacgtgtggcgaagtgtgaccggagcttgaaaacaattcacctaaccatggttaaatatactaaatgaaatttagaaggggtattcgtattttattacactttggcgccaaatgattatttcaaaaataaaataacgattttcatttaacccaaaaaactgcaaactaaaagttacgaaatatttatgtatgcgctttcaagtaagttacaaatattatttggaacaattagaagaaaaatagattatttatcaattctgattatttagaagccaaaaaaagttttcgtttcattggaggattcgggatgaaaattttgtttgcctaaatctattagattatgcaaaaaaacaacaatcgttgaatttggatgcttttgtagcacattttattatatatttaaacaagcatctctttataaataaaactgttgggaacaatttgttagtgttgcgcagccgtaatatacatatacacctataatgattaacatacacagtttacaaagttaatatgtatatattttgtatgttaaataaaattacaactacatatagtctttcgctttcttcgtaaataaacataaataaaatatacgtatgtatttaacatatgaacagtgaaacacgctgtctttgccgttttcttcgatttatttttcgtcgtctgctcctttttttttttgacactgaaatccttaccagcccctaaaaatttcagttgggtttttttttaatgtgttcgatgcttatgcaattagcataaaaattgactgcctggtatgtgtagacatttatcaaacattttatacaagttgcgaaagtaattaacattcataagtaattcatgtgttgtcgctgatgttgttgttgttgctgttactgtatctcttgatgttgttgctcttgtttttgaggcttatttccggtttttaatgtacgttgtggatatttctgtattgataacttttccggccttagttcacgccattcaattcggcggaattggcca

SEQ ID NO: 42203 - DNA, 2875 bp, DROSOPHILA
cgccacacgtgttttggcagtaaacattttcggcatgttgcggaaatcgtttatattagcttaaaaaatcgataaaaagacagaaagagacatttcggacagtaaaatgacgcatctgcggtcggaggataagccacagtcggaggagcggaagtctgtgttcaaggagagcagctgcatcttccggcggaatcgagccctcggctatgtgagcaaccaggttccagcagtcacccgctacgtgcagcgtcgtcgggacactttgctgatcacctgcatcggcagatcttttcaggtgtacaccgccaaccactttcgcctgctgcacgttagcggattgcatccggacgagattacggctctggccacggatcgactgcacacgtacacggcgagcaacaagtgtatctacgcctggcgggcgggcaaacacatccggcacgtgtaccgtggccaccagaaagatgtccacctcctgctgccttttggttccagtttgatagccatcgataggcagaatgtgttaaaagtgtggaatatttcaaccgaggatgtctatttggaagtgcccttccggtctgaggagttccagatcacagctgtgacccatccgcccacgtacatcaataaaatagtactaggctcccagcagggccaactaaagatcttgaacataaagaagaacagtgtggtgtgcactttgagtcaccacgacagcaggatcacctgcattgaaccgtcccctgctttggatgtcgtggccgtgggacacggggatggcactattatcttgcttaaccttaagttcgacgaggtgcttatgagcttccagcaggattggggtcaggtcaccaacctttccttccgtaccgacggcccaccaatccttgtgtccgcctgcagcaatggttacatggccttctggaacctggaggagcgcaagttagccggtcagctgcaagcgcacgaggagtcggtgaccacggccatttgtctgcccagcgagcccgtggtcttcaccacttcaccagacaattcaatgaggatgtttgttttcgatatgccagatggtggtgccagacagctgaggatccgcgagggacacacaaagccgccgttttgtattcgctaccacggcagctcgggcgtatccattctctcttcgggcgaggacagcaccatgagagtcttctccaccatttccgaatcgctgaacaagagcatgggcagggctacctacaatccaaaagccacaaagaagaagaatcgctttgagcacgataagtttggaatgccacccatactggagttcacatcggatacggctcgcgaaaaggagtgggataacatcgctgccatccatgcgggcgttattcagacgacaacctggtcgtttggcaagaaccgtatgggcgagcaccgcctggttccgaaacagttccaaaacagcaaccgcaccaacttccagaacgagaccacatgcattgtgctgacgcactgtggcaactttgtgatcattggctatagcagtggcgacattgagcgctttaatatccagtctggactccatcgggctacctatggctctccagcccacaagatggcagtacgcggcttggccagcgacaatcttaaccaaaccgtcatctctggctgttcggaaggcttgctcaagttctggtcattcaaaggaaaggttgacaagcccttagcgactctacgcctggcagatggaatcgccctgattcgacagcaccgagagagctccatgctggccattggtctggaaacattcaagatttttgtcgtagacatgcacacgagggtcattgttcgcaagttcgtcggtcacacagccaagctgaatgacctcactttcagtccggatagccgctggctgatcaccgccgccatggactccacgatcaaggtgtgggacataccttcctcctacatggtggatcacttccgcgtcgaggcgccttgcgtatcgttaagtatgtcgcctaatggcgactttctggccaccgcacatgttggacttttgggcatttacctgtgggccaacaagacgctgtttaatcagatttccctgcgctccatcgatcctttggagccggctccgtacgtgggattgcccacgaatgtgtgcgatgccatggaactggaagatggcatgaaggagctagagatcgacgaagaggacgagtcaaaactcggcgagctagttgacaccaagtacgaaactccaacgcagctgtccgaggaactgataacgctatccgggttggctgcatcccgttggcagaatctattggatttggagctaatcaagcaacgtaacaagcccaaggcaccaccaaaagctcccaaacaggccccattcttcctgcccacggtttcgggactggaactgcgcttcgatgtggagaacggtcagaaggaggaggatgaatcccggattcggaaggcttctactctcaacaatcttactgcctttggccagctgctggaggaaactgctgactccctggacttcgcatcggctgtggcgcacttgacccaactaggaccatcgatggttgactttgagatcaaatctctgcacccggaggctggaggaacactccttgccatgctgcagttcctcaaactcgttaagttcatgtttggaaccaatctgaactttgagctggctcaatcgtatctaagcgtcttcttgcgatcccacggtctcgggttgacggagttcccggatttggtaaaggagctgcgcactgtgtcccaggtgcagcaggaggcttggcagcgtgtggaggagaagctcatctatggaactggagttgtggccgctctccgaaactttgcgcactag

SEQ ID NO: 42204 - protein, 922 aa, DROSOPHILA
MTHLRSEDKPQSEERKSVFKESSCIFRRNRALGYVSNQVPAVTRYVQRRRDTLLITCIGRSFQVYTANHFRLLHVSGLHPDEITALATDRLHTYTASNKCIYAWRAGKHIRHVYRGHQKDVHLLLPFGSSLIAIDRQNVLKVWNISTEDVYLEVPFRSEEFQITAVTHPPTYINKIVLGSQQGQLKILNIKKNSVVCTLSHHDSRITCIEPSPALDVVAVGHGDGTIILLNLKFDEVLMSFQQDWGQVTNLSFRTDGPPILVSACSNGYMAFWNLEERKLAGQLQAHEESVTTAICLPSEPVVFTTSPDNSMRMFVFDMPDGGARQLRIREGHTKPPFCIRYHGSSGVSILSSGEDSTMRVFSTISESLNKSMGRATYNPKATKKKNRFEHDKFGMPPILEFTSDTAREKEWDNIAAIHAGVIQTTTWSFGKNRMGEHRLVPKQFQNSNRTNFQNETTCIVLTHCGNFVIIGYSSGDIERFNIQSGLHRATYGSPAHKMAVRGLASDNLNQTVISGCSEGLLKFWSFKGKVDKPLATLRLADGIALIRQHRESSMLAIGLETFKIFVVDMHTRVIVRKFVGHTAKLNDLTFSPDSRWLITAAMDSTIKVWDIPSSYMVDHFRVEAPCVSLSMSPNGDFLATAHVGLLGIYLWANKTLFNQISLRSIDPLEPAPYVGLPTNVCDAMELEDGMKELEIDEEDESKLGELVDTKYETPTQLSEELITLSGLAASRWQNLLDLELIKQRNKPKAPPKAPKQAPFFLPTVSGLELRFDVENGQKEEDESRIRKASTLNNLTAFGQLLEETADSLDFASAVAHLTQLGPSMVDFEIKSLHPEAGGTLLAMLQFLKLVKFMFGTNLNFELAQSYLSVFLRSHGLGLTEFPDLVKELRTVSQVQQEAWQRVEEKLIYGTGVVAALRNFAH

SEQ ID NO: 42205 - DNA, 8482 bp, DROSOPHILA
attgttaaatatagaaaatccgattgcaaatgaaaacaataaaatgcctgaatcacgccagcaacatgttgctagtgtcgtcggcaacatgcagcacttatgcagcagcaacatgtgcgcacattaatccttatgcggcccagttagcactttagcccgactttgtagcctggtcatcaaaatcagggcttgtgtgatatcgatttatagaggccacacatgattggtctgccgatggtgtataatacacgtatctcccgagccggctgcccctgacgacgtgaccataacattggcattcttggcccgaaggcatattaccatatcgcacttatgacagttcaagccataattcagtctagagtggagctcattttcaaaggatttccaaaatgaaacaccaacaagttacggtggactattggaccatgtttaagacatcgggattgtgtcttttactggccatttgcggatttgtacttcttaagtaaggacatttactaaactattcaatactcaatacttaatgcgcaatgtacaaatttgtaatgtgatcataatacctggcaccttatagtaccaattatttcttatagaatggtgcagaccattttctggctacctggacatctgaagaagaaccagcagcgcctggaggatctggccaaaatctatgccaaggatattagcgaggaagagagggacgagatcgagaaactgttcaacagtaaggagccgctgactgaagaacgaatcaaccagttgctcgacaagccagagacttcagagccaaaaaaggagcaatagttaaataaattgattcgcatgttttatatatatatacatatatttatgtatattgagtgtataatcgataatttgttgatacaggttctagttcttacttgcatatcgtatatgtaactcgcaacacaatcaatcgtttaaccaatccatcaataatgcctgtaacgctcaattattcagggagggggacaacaaatagaataataactattcacgaaagtcgctcgtctgtggagcggttacaagttatatccatattagctactgatataggcggactcagagccctttcctgcttcaaatcggtcgtttctggtggcccatcgattttgccagcgacctcgacatctcaacctcggaatgtatctaactaacaaactcatatcaaatataagcaagtgcgccaattcgtatgcatatcgacatatggacatatggacatatacatatagatagtctatattaattttaaaagctcaaaggggcgcaagtctctctcatcagttgtgtctttagtttttttgatttggtttggtgatacctgcatctgccgccgactccacctgaccacaaaatatcacttgagtatcttttgctatattacacgtaggctaatccgtaaacgaaggtgaaaggtgccaatcgatcggatgaacttaattaggtcgagttggatcgaagatccgagagagcgcctccccagagtagcgccgatcagtgggtatatgcttgccatttagctgatgcgaattatgcgggttaacatatatatatttataggggtttctattaatctgagatggccgcccaatgtgtctttattggctaggggcgtgtattggaagcctgtaaaatgggttggccagattaacccgcgccgccggcagaaactccggatgttcggtcagggtgtccgacaatgcgctcagcaaaactcctggaaaaattaaaaaatacaaatgaattttacgccttttcataggtaatactggttacttacttaaaaccttcttttgcaagtcgatgggtatgacacccatgttaccctcgcgctctagaaattccgtaagcttctgcagctccatttgggcctcatcggagccatgcgaaagcgattgagcaaacattacctgggcacaacaaaaaaaaaacagcaattatttaatatttaagtttgtgtgttattaatcactgttatacctttgccagtttgtaaaggatctcctccagggagtattcattgtacaagtactcgacaatcttggcccgaccctcatcatagtcattcaaatctgttagtggaacaacatgttggttaagatatgtttctatctctatataagatttggtatatgatcctaatcccaccttgctgtgcctcgctgtccaaaactttgagtttgttccagaaggtgaagctatcgaagctcttcgcgggcaggactcctgcggcgcctcgctcgattcctgattccgaaccggattcgtgcactgctgggaatggcttttctgtggttgtggtggtgcttgttgtcgtcgtggtcgtagtggatgctgggggcgtggtaatggcgggactgtggcgctttaactgattctggcgaacctcttcggggaaaattcgattggcataggaccgctgcaagaactctattcccagccgaatgtcctgcaggaacttcagggcgctctcccgagtgatctacaaaaaagtattgatgtgagtgcatttctttgtcttattaagttgaatctttagagctataaaatattgtttaaatagtttgataagcgccaaagattttatagctgtgcagttatttttaaaataatatattttttactggtcgctattggttttttcgttgatttcgaaccgccagtctccagtctaccgcaaatttttgctcgatgcaacatgttgcatacacttaagggaatttacgagtttgagagaaatttcccgctcgcgctctaagtttccaaacagtttagttcagctatcgatctgataagttcccggagtctgccccaaagcgatatacgcggcttttaaggcattattttctctttgagaagcccgtgaacgcgtcgacgttaatcttagggccaagttggcgaccgcgaagggattccgtaagaaggcagcgagctcggtccggaataatagattaatataagttcgtgataattttttttcttagtgttgttttggagttatatgtgtaagtgtgaatgaaatcgagacgacgcattcaggagacggacaagaaagaaaatgtagagcagcccaagattgattgggtatttaagaataaatggaataagcgagaagagtaaaaaagatcggaagtggcgaaataaaagaaacacacaaacgacggagaaaaatacagaggtggtcaaaagtatatacacaacgagcttttttttccaattgtcaactaattgtaaacaaacgaaaaaaaaaatgcttaaatggccgaaacaacccagaacttaaccaacaacacagcccaattgactggaagtgccctacgttcataaaaaaccaggaattaacagccgttaaaactacacaaaaagttgaccaaaaaactgcctacatataacttgcctacataaaaacgcatatatttcgaacgacacggtttagaaacgagaaacacctatgccaaaacacaaatggcacaacccagatgacaacaaatagtcagtcaccgaatattcacacaaatgcaacccaatcgcaaaatccaaatccggagactacacaccaccataggtttgttattgtgttgtttgtgaacaatcgattgtgcgcacggcaatccgaacatctgtttcaaacagttaatatcttgttagctataatcttttactaacataatggcgtaatcaaaacttactactatcacttgaatattacggtattacggtcttttgcaaaatggcttcttagccacaaaaggtactatagtgccaatgtatgtttatttttaattaattcttggtgtgccatgattgtctctcaactctaaaattatttcatctaagttaattagtgttttaaaggggatcaacttaccgcatgcattaagcgcgggtagctacccgcaataaattagtcatagattattcgagtgggaatcgaaaactgcaaattgcacgattataggcggtccgaatttttttaagtttcgatcagcatgtatgatagccgtaagaaattttaattgcgtcaatctatatttttataatgttttgtaagcctaactcgtttgcctctgactaggatgtatgccctgtgagccgctgttagcgaccaaaaggggccattcagaatggaatatctcataacgccaccctagccttatgaatcgttactgtatcatcaaagtaacatttttctgacaccgtaaaattcattgaaatacataaaaaaaagagtaaatctaacaatcgaaccggttgactaaatataactcagacttaacgacgctgttcatttacgccacagcggtgtagtatttcaaatactattccggctaatctttaacgtaaacaaacaaatgttacacaaaaataatttagtattactaacccgtttgatatctaaaaataggcacaagctcaatgaggcatatcttatattatgaaagctattaaagttgcatcaatgaattttcacaaaaatattggcatattactaattaaataaaagctcccactcgataagataaaagaatacaaaaaaaaaaaacatatcgctgattgtgtggcccagaggaaattagcaaactgaatataaaagctcttgctttagcgatgggaaatcagttcaccgccaacaattaaacagaaaagttccacaaagccaagctataaaaataataaacgaaattatgcagccagatatggaagctcctaaacaagaaaatcgtaaatttgtcttctgtggcctgcgtaaggatccccaggaaaaccatgaacattgtggacaccacggccatcattggcatcatgggcatcatggatttcatggacaccatggtcaccatggacatcatgaacatcatggtcatcatggacactattggcaccatttcggacatcgctggaatcacccagcataccaacaccatcatggtgcccctccattttgctcccatcatcaccgcaaccgcgagccgccaaaatattttggacccaccctcataaagagcaatggattcagtctttactattatgatacaatgaaatcctaaatgaatgaaattgcacccagataaagagatgccacaaaacttaatgatgaaatcaaaccacaatattgctaagtaccggaccaaaaaacgacaaagttatttgacatgatctcattttgagaagtcatttatatataatttgaaaataaattttaaagacaaattataattattacttatacttaccactttcccctcaaccagttcttccacggcttttaccacagctgtttcatctccagtccaaaaaatatactgggccatgtcgaacgaagagtactgaccattcggactacgcaagaagcttttggcgttctgaaaaacaaaaaaacaataggagagacgagatcttaaaaacaatgcacggtcataaaggaaattctaaattttatgtgaaatatcggaattttgcaagtgcctgccaatcatttcaattttgtagctgtctgctcgtctaatagtaataatttgtatttgagttgccaattacttgtaaggaaatcagtccaaatgtgtaatgaaactgattcaagttataagaaccttggccgttatctttggcgtgatggatcttcgctccgtggttcgggccacaacatcgaagacaatgtctccgatggtctccttgttggactcatggtgattctgtttggatttgggcgtattcagggcggtcagttcggtttcggcaacgtcgccgacgggatctaccgcttccactggttctccggccacatcttgagcggtttccgtttccggttccgtttgtttagcttccggttcctgttcggctggtgattgggaatccccttctggctcggtttcagttggaggagctgccgtcgtagtcgtggtagtggttgtggtgcttgttgtggtggtcgttggtagcacctctggattttggccaaaagctagacgagccgccccgtaaaatgcctgttgatttttgggtggtttcgtagatatacacttggattttgcaaaagaggagtttggagtttaccaagcgctctagactgggattctcgcagggattggggctggccacttaccttcgcatgggccgtcggctccactacggttttgatctgcgtcttcggctcctccagctgggacctttcgccctcctccttggacgtcgccgtagtggtggtggccgacgtgctagtggttgtagtggtggaaatcagaggcgtcgccacctccaactgcctctccaagtcgggcataatattcgcatttggttgtgcacctggctcgggaacagcggcgacctcctcgacactctccttggtggtagtggtggtgcgggctgtacttccatcgtgctgacgcttggccatcaccgctcccggttcattccgcagctggtccagttcacttacatcgtcctcgatttgggggaaagccgtatcaccgctgcgcttggaaggatctaatttgggagatgattattaatccaaacgagcgagttaagtgaacctatactatcacattatttaagattaattactatataaataaataaaagtccgcaagggtatagaattttcggcattctgcttctaaatcttagttgcttcaaatgcaaattagctttggagagcggaataaataagggtcaagagatgtgggggagttttggctactcactgtagatgtagggcaacaaagccggatatgcctgggtcatgcagatgctggccaaaagaaggatggccaacagattcctcgtcgccatgatgttctagctgtaaaagactgaaagtgacacaagacgtaattcatttgattagagcctaagattcgattgcaccacattcaaagcacaaaaatataaaggaagagcaaaaaggaagcacaaaaacaagcacacacacccacgcaactagagagcgtgacaggggggagaaagcaggcacacatacatacatatgcaaatcacgctaaaaataacacacgaaatcgataagacaacaacaaaagcaggcacagtaaggcagtggagaataataagaacgccaagaagcaggcaacacaaaataacacgccaacattgatgcgaatgcaaagcaaacacacacacaagtgtaaattgagtaaattggccgcatgagcgaattatcgatgcattcggggaacacttaagcacgtttgggaatccattgaattaaaaggccaccggagaatagctcaagtatctgcacttgctactttcacacacctacacacacacaagcaatgtcaataaattcctatataaaatttactttatagaaagcacacaaaaagtattctgtttcttttattataaatcacttctttaaaaatcgacctgacttgtaacttgttttatctctcagatttctagtttacgtgaaaaggtaggcaggtctgctgcgttcgaggaaagaaagtattctgagccgtataccgtggaacactgcggccacaaaagcttcattttgtctctcctgccgcaaaaagctatctaagttattctcataaagagagaaaatcactcaaagcacacatatggtactcaacagcaaaattctaaccagaaaccgttttctgcatccgaaactgttttcataatgacatttttaaatagttccgtaatatttgagagctctgtcgctactagcataaaaaattgttcttttgatgagcaataaattgattaaaaattgaataaaactactcagaacaatgttaaaaataagaataaatagcttcgacagtcctaacagtcttgaacagttgtatgtgaaatattcgtggatcaacatgttgttcggacttataggatcatttttgcttatgctgcaaataattcttgtgccttattcaaatggtgcaggtaactttcagcatgcataaactttgtacgcaatttaaaatctatccttccttcagggtgtcaatttgatacggaatgcgtgaatctggataagtgtcccaggaccagagcagttatgaactcatccaggaaaaatataataggtcttagaagatgcggcactaataaagtgtgctgccccaagtgggaaacgtatctgccacacgatacttgtggacaatcaagaagaaaacctacgaagggcaaaataccggcgctgaatgagtttccctggatggccatgctgttatatggaaataaaaacaatttgtcccagaagctggtaccaaaatgtggtggatccctaataaacaactggtacgtcctgaccgcagcgcactgcgtggagtatccatttatggactatccgtatgccctcaaaacagtgagactgggcgaacataacacgtccacaaatcccgatcgggctattgtgaatggaagaagacagtacgctcctctttatatggaaattgaagtggaccaaattattacgcatgaa

SEQ ID NO: 42206 - DNA, 2450 bp, DROSOPHILA
aacgcagcagacctgcctaccttttcacgtaaactagaaatctgagagataaaacaagttacaagtcaggtcgatttttaaagaagtgatttataataaaagaaacagaatactttttgtgtgctttctataaatcttttacagctagaacatcatggcgacgaggaatctgttggccatccttcttttggccagcatctgcatgacccaggcatatccggctttgttgccctacatctacaatccttccaagcgcagcggtgatacggctttcccccaaatcgaggacgatgtaagtgaactggaccagctgcggaatgaaccgggagcggtgatggccaagcgtcagcacgatggaagtacagcccgcaccaccactaccaccaaggagagtgtcgaggaggtcgccgctgttcccgagccaggtgcacaaccaaatgcgaatattatgcccgacttggagaggcagttggaggtggcgacgcctctgatttccaccactacaaccactagcacgtcggccaccaccactacggcgacgtccaaggaggagggcgaaaggtcccagctggaggagccgaagacgcagatcaaaaccgtagtggagccgacggcccatgcgaaggcattttacggggcggctcgtctagcttttggccaaaatccagaggtgctaccaacgaccaccacaacaagcaccacaaccactaccacgactacgacggcagctcctccaactgaaaccgagccagaaggggattcccaatcaccagccgaacaggaaccggaagctaaacaaacggaaccggaaacggaaaccgctcaagatgtggccggagaaccagtggaagcggtagatcccgtcggcgacgttgccgaaaccgaactgaccgccctgaatacgcccaaatccaaacagaatcaccatgagtccaacaaggagaccatcggagacattgtcttcgatgttgtggcccgaaccacggagcgaagatccatcacgccaaagataacggccaagaacgccaaaagcttcttgcgtagtccgaatggtcagtactcttcgttcgacatggcccagtatattttttggactggagatgaaacagctgtggtaaaagccgtggaagaactggttgaggggaaagtgatcactcgggagagcgccctgaagttcctgcaggacattcggctgggaatagagttcttgcagcggtcctatgccaatcgaattttccccgaagaggttcgccagaatcagttaaagcgccacagtcccgccattaccacgcccccagcatccactacgaccacgacgacaacaagcaccaccacaaccacagaaaagccattcccagcagtgcacgaatccggttcggaatcaggaatcgagcgaggcgccgcaggagtcctgcccgcgaagagcttcgatagcttcaccttctggaacaaactcaaagttttggacagcgaggcacagcaagatttgaatgactatgatgagggtcgggccaagattgtcgagtacttgtacaatgaatactccctggaggagatcctttacaaactggcaaaggtaatgtttgctcaatcgctttcgcatggctccgatgaggcccaaatggagctgcagaagcttacggaatttctagagcgcgagggtaacatgggtgtcatacccatcgacttgcaaaagaaggttttaagagttttgctgagcgcattgtcggacaccctgaccgaacatccggagtttctgccggcggcgcgggttaatctggccaacccattttacaggcttccaatacacgcccctagccaataaagacacattgggcggccatctcagattaatagaaacccctataaatatatatatgttaacccgcataattcgcatcagctaaatggcaagcatatacccactgatcggcgctactctggggaggcgctctctcggatcttcgatccaactcgacctaattaagttcatccgatcgattggcacctttcaccttcgtttacggattagcctacgtgtaatatagcaaaagatactcaagtgatattttgtggtcaggtggagtcggcggcagatgcaggtatcaccaaaccaaatcaaaaaaactaaagacacaactgatgagagagacttgcgcccctttgagcttttaaaattaatatagactatctatatgtatatgtccatatgtccatatgtcgatatgcatacgaattggcgcacttgcttatatttgatatgagtttgttagttagatacattccgaggttgagatgtcgaggtcgctggcaaaatcgatgggccaccagaaacgaccgatttgaagcaggaaagggctctgagtccgcctatatcagtagctaatatggatataacttgtaaccgctccacagacgagcgactttcgtgaatagttattattctattt

SEQ ID NO: 42207 - protein, 556 aa, DROSOPHILA
MATRNLLAILLLASICMTQAYPALLPYIYNPSKRSGDTAFPQIEDDVSELDQLRNEPGAVMAKRQHDGSTARTTTTTKESVEEVAAVPEPGAQPNANIMPDLERQLEVATPLISTTTTTSTSATTTTATSKEEGERSQLEEPKTQIKTVVEPTAHAKAFYGAARLAFGQNPEVLPTTTTTSTTTTTTTTTAAPPTETEPEGDSQSPAEQEPEAKQTEPETETAQDVAGEPVEAVDPVGDVAETELTALNTPKSKQNHHESNKETIGDIVFDVVARTTERRSITPKITAKNAKSFLRSPNGQYSSFDMAQYIFWTGDETAVVKAVEELVEGKVITRESALKFLQDIRLGIEFLQRSYANRIFPEEVRQNQLKRHSPAITTPPASTTTTTTTSTTTTTEKPFPAVHESGSESGIERGAAGVLPAKSFDSFTFWNKLKVLDSEAQQDLNDYDEGRAKIVEYLYNEYSLEEILYKLAKVMFAQSLSHGSDEAQMELQKLTEFLEREGNMGVIPIDLQKKVLRVLLSALSDTLTEHPEFLPAARVNLANPFYRLPIHAPSQ

SEQ ID NO: 42208 - DNA, 6792 bp, DROSOPHILA
ggcttggtccttcgacaatttgcgacgtgaatgccaaatgagcgaatacgaatttgtggcctcgccacaggctgtaaacacttgccgaaactgcttaaagaagtaccacaaaaattacaggcatttaaaatagaatccccattaatcaagggcaagacattaactcgtcatcgtgtaaagcataaaatatcaaatttccttctggacatttccatcaaagtctgtcataaagtgtttagggatagcaaaatttcaagtaattaacaaactggaaagccattatgctagtcggtaaaacctaatccaattcagggacaacacagatataaataaatcttcctccggctggaccccaaaaactctttgcaaagcgaagcacatttctggcagggactccccaggcgtagttaatcaacttttttttctttggttgtatggtttggaaaaattcaattgcccgcttttattgtcggcaacgtcatttagcgtttatgtgggcctacgagtttaggcaaacttttctgacgctgacttgggttaccgccgccttgattcgtttttactggctccttattgatcgtgaccagacataaattcatcaatacttcgccatttagggtgacgtcaacagatgctaccagataaagaacgcacaaaggccatttgattgaacaaggaggagcaatgaccgccaaagaaggatgactacctctattattgagtccttttaacaaatttaaattaaatttaattttttttaatttaaatttaaattaattttaattcctacatctagcctaggaaacagaatgacatatttgcaaaaatataactaaaatatggttccaattacaagtctaatcgcttgatttaccatttcaaaatttgaaacaagcactgtatattccgacgcaatatgaaacctttgactggctatgtttggaatatacaaaaaatggctttattaaaattcatacaattatttgagcttatgcagcctttagactttgaccccaatttcgccgggtgcaaagaccttgacgttgcgatcgttgaccttgtagagcacctccttgcgtgtctcctcgcaggcatagtttccttcgtccagaacgcgttcgattagcagcttgccatccacctcacggaagacaccgctctttaaacgcaacacctggatgcgcacctgaccgagcttggcgacattgttgtccgtcagctggtagatgtcgctgttgctgagcttggtgatcaccgtcagcttttcgcgctccttgcctagcgcagccaggtcctggcagaactgctgaacctgcagcttgcttgctcccaaattgaacaatatggacagattgtcgatcagaaccgtatatgagttgcgactggcatagttcctctccacctgggcgcgaatatcctctactagctggtcggttaatgtctgaccctcggtattcgttagccatttggaagccaatccctcgccggccatgtcgctcagaacatcgataacacccagagttttcccctggaaaatgttcgtattatagcccaacctcatgccagcattaaaataatgctggtagtgatgctgcaaacagacgagcagagttccagcatttgagatgcgcaatctctgacccaaaacgcagctgatcaaaaagctggcatccacattggactcctcgctgatgtggacaaatcctggcaatttctgctcattgagtccacaggctagcaggactgaggtggccattgtttcgatctgaaatggcataaaaagaacagtcatgagtcaatttgcaaatgtcatttgtggagttcaattaattacaagtaagtgcgcagtattttgtttgttttttttttcattcgggtcaggtcacgtggctaccaagccaatgaggttaaaaacacttgagcggggccaacaacttgaaatttattggccaaaatcggggagggaaaatgaataaggagggaatttccatcttgtcacttcatcattgctgtcagcggcacacgtggccaccattcaagaaagtgtacttaatacacaaagagagagtaaacaagccaagagtaataaattattgagcaattatatagggggaaaggagtttttgttcattatttatagtcgaggtgtcactggctttctagcttttaaactaaactatatattgttaactaactgataattgacaatatttagtttagtttacttatttaaaagtaaaataatcttgtatgcacttttatgttgggtaaggtggtctaaaatgtacttataaattcaaaatggtaatttaaaattgaaaaaaaaaatttacaaaaaaataaaattacatcccaaattgaagattgaacccgcgtttatagtaacaaaattgggatataagatggggcaatacaacccctgagccaaaatatcgttgttagaagcgctgccaaatgctcagttagactccaatgctcctaaaactcccatgagggatgaaaagctttgcgacaaagctttatgaggctatttttatactatagcactttactagagttctttttcattgtatttaatgaaaatttaacactagggatagagttgctaaaatagctaggagatacaaattagtgttaatggtgggacatgcaccgaaaacgtgcgagaaaatatttaaataagaattaagcactatggtaatacaagttggagaaaatatttgcgcattcattctcgctatggactcttatcacggccaagattaccgtctaggcaacagattttccgcttcgaagcgttaactactcaaagtgcaggcaaacaaaaacattctaattaaaccttgacttaaaagtgcagtaacacaacgcaatcgatttaattaggcacaaaataataatgtttcgttaattagggtacaatgattaatgggtctcggcagacgcacgcccggattttcttgaaattacataaatgttttctgaatggaaaatttgagtcatttgcacatggcattttcatgactattaccccatgaccatatgggaaatgcgccattgaatggataccagatattagcaaagctcacaattacaccgtaattcccgagtgttatgatttcttatgccaaaagataccatcatcaccaccatcaccactcacacacatacagtcacatacacaagtttggtgtgtgattgcgttgtcaataaaaagctctcaccagtaccagttgtttaatgttgacgctcgactcaatgggtgtaccgctcgcgtaccgctttctcccgctctcgctctctctcgcagtgtcgccccgctgaccgccaaccactgactaacccagtcgatcccgctccggcgtcgagaatcaagtccccgtatcccggtgacagtcccagtgccaaaacacttccgaattgcccgccttgaccgcgcgataaagagcagacctcattcgagttcagagcgcatggggacactcacaaaaaaaaatgttttgaataaaaaatattatttaaaataactttgtatttcattgatattggtttatgttgattataggatttttaaaataagcaaaactaaaaatctttgaaaaatacttatgcaggaacttaatggatcaatcaaagaatgagtttttcaaagggatcttttaaactgcaaatcaaatttgtttaaaatggagtacgattttgttaaacgttttagcacttccacaacttttcaaaaaggtctcaaaaaaattttattgcctttataatattgctttttttttgagtgtacggtcgacttttgccggcagttgtgtgggatctggcacgctgacgctgcgcggcgatcagtccgctttcggtgctcaagcgttgcgtttcgtttgcctccagcagcagcagcaaggcccctgtccaatcccattacccgaaacccagaccagtttgtgtggacaacgatgacgtgctgaggtcgctcgctctctctctttccctcacactctctatctggctctccctctccaacgcgctctcctggtgtgccaaaaaaaattataaacctattaaatagtttttcttcgcggaaagcagacaaccaacaacacccggaaaaccagaggcagcgttttcttgttcaaggtaaatatgccatcagctgtggccagaattcctctcccattttttttgcctaattagcagtttagcaattgcaattgcagtgccagttttattattcaatttgcaaggcaaacgtgcggcttcaaaatgggcaaacacccgtagagatagtgtttcagacggattatgttagtgaattatcacgcgatgtttcgtgccacgaaaggttatagaacgattccaatagtctgtcccaaatcagctgttcatttgtagtaaaatccattatcaactaatcttttttgggggctcggttaagcgcgaaaacaacttaaagaatgcccagtgatcatgtgatattcgttattaattcgactttgaccactgccattcatttttatattcagataaaattcagacgaaaaaaaaaaacgaaacaaaaagtgaaaataaaataaaacgagaagagaatagatttgtgctgcatataatttatgaagcaatcgacgcacgtggatgttcccaaacaaaaatagtaattgaataaataaataatggcgggctgttaaaaaaaacacagaatctaatacaacacatgccagcaataatgttgtgcaccgggatttcgatcgatagtaaacatgttatctatctataaacacgccccggtaaccgggttcacttgataaggcaggcccaacaaacaggcctataaagattggtactactcccgggtctcgggtgtataaatggtttcaaaacaatcgagggaaagggctattggccgatatggatggataccaactttaaacacacctaattgtaaccgaataccttatgcccttgactttcattataaagccgtatggtataaagttggcaccagaacaaaatttttatatcgactgataactgaaatagttattcgcttagctaaatacattaagatttcaacatacatagaataaatggtttagtgtttagtgtgaaaaagtaagggcaaaggccttggactcatgcgattatataagatctgagtttcataagatcggacgaatttttcatatatttattcaaaatatttaatttataacaatcatacgaaatgcaaagattttgtaaaatagtttctaataacttcaaggttataggttcaaggttatatcatagacaattcattccgaaaatgtgtgttcgttaaaggtgattcattcactaagaattcaaaaccatttttaaagttactgaagcgcaagtcacttaattctgtaaatatgctaattttgcaagtaagggtattgaaaacagatagtcgaacttgctccccaatcgattcagttttttggtccgaattccgcattaccacgctttgaatgtgagatcatgaccgatatgttggcaatagttgccaaaaattataaacaaaatgtaaacaaaactcgagacgcttataaacaaatttaattagagaagttgcagattgacgatgcccggcaatagcgacttgttgcgcaagttagtggggttccaaaactgagctcaattactcacccgttggtttggaggactgccgggcttagatatcaattcaatggtggcaagggattcactttctcggtttagtttacgaaacaaatatacaattttgacatgaaaaacatgttataggtgctagtatgaccgtaaattcgtaatgatcagctgtgtgaaaacagtgttgttaagcgcagcaagaccactgttgtgggctaacagaatgttatacgcgtgccaaggcaaacaaaaatacatggtcgttttcaaaaaggggacaaatatttattttgaaactattaacaaattcataaagatgccccaaaagtagccagaagaaccgaaatattctattcgaatcattttggttcatatgaattaacttagttactcatgcttctgctgcctaagtgatgtcttcacttccatcattgtttgtgtagaaataaagttttttatttttttaatgagttgactataaaatgattttattgcgtttttggttaattccttacaaatttaaagcttatgtcaggtgagttatacactaacatcattaagtataaacaaacaattttttagaaaagagttaaaattgaaaggtggagttacttacatttttcaagtagttattcaaccttaaaatgattagaatcaaaacatgattttgaactagaattatttcctaaccaattaccccactgtaagcattttcggctacgccccagacaacagttattaatatttccgacgaaagctttcaagctaagctttcgcgcaaccgcccagatgttttaactgtgggtccttcaattccgtcagttccttatagacccaccggcatgacataacacagccgacccactgaaaatgccgcccatcgcaaaagaaacgacttagccgccctatctatcacatttgcaataggtataggaaatcatatcaattggcatccaaataatatacatatgtatttgtatcttttaccaccttctagctaaagataactaacacgcaaaatgccccaccaagagagaaaatcgatgtggttctttggcggattggcgagcgtaggtgcggccatggtgacccatccgctcgacctcatcaaggtcacgctgcagacgcaacagggtcacctgt

SEQ ID NO: 42209 - DNA, 890 bp, DROSOPHILA
actagcacctataacatgtttttcatgtcaaaattgtatatttgtttcgtaaactaaaccgagaaagtgaatcccttgccaccattgaattgatatctaagcccggcagtcctccaaaccaacggatcgaaacaatggccacctcagtcctgctagcctgtggactcaatgagcagaaattgccaggatttgtccacatcagcgaggagtccaatgtggatgccagctttttgatcagctgcgttttgggtcagagattgcgcatctcaaatgctggaactctgctcgtctgtttgcagcatcactaccagcattattttaatgctggcatgaggttgggctataatacgaacattttccaggggaaaactctgggtgttatcgatgttctgagcgacatggccggcgagggattggcttccaaatggctaacgaataccgagggtcagacattaaccgaccagctagtagaggatattcgcgcccaggtggagaggaactatgccagtcgcaactcatatacggttctgatcgacaatctgtccatattgttcaatttgggagcaagcaagctgcaggttcagcagttctgccaggacctggctgcgctaggcaaggagcgcgaaaagctgacggtgatcaccaagctcagcaacagcgacatctaccagctgacggacaacaatgtcgccaagctcggtcaggtgcgcatccaggtgttgcgtttaaagagcggtgtcttccgtgaggtggatggcaagctgctaatcgaacgcgttctggacgaaggaaactatgcctgcgaggagacacgcaaggaggtgctctacaaggtcaacgatcgcaacgtcaaggtctttgcacccggcgaaattggggtcaaagtctaa

SEQ ID NO: 42210 - protein, 251 aa, DROSOPHILA
MATSVLLACGLNEQKLPGFVHISEESNVDASFLISCVLGQRLRISNAGTLLVCLQHHYQHYFNAGMRLGYNTNIFQGKTLGVIDVLSDMAGEGLASKWLTNTEGQTLTDQLVEDIRAQVERNYASRNSYTVLIDNLSILFNLGASKLQVQQFCQDLAALGKEREKLTVITKLSNSDIYQLTDNNVAKLGQVRIQVLRLKSGVFREVDGKLLIERVLDEGNYACEETRKEVLYKVNDRNVKVFAPGEIGVKV

SEQ ID NO: 42211 - DNA, 19058 bp, DROSOPHILA
gcgtcctctacttactcctactccttcctctacgtccttcatcatcatctgcgctaggcgtccagatatatatagtttttatatatgcaatttacagtataccgtttcagttaattatatgttttgttgtttccgtcgtgtgggccgtttaatgcgtgtgttcggtgttgttttacactttcttcttgtataatttaaatttaaactaattctcgctttgcacaaaaatttacacaatttattgatttaatttattagatttaaatagggtctcctcttctgctcctccaatttgttgtaaactaatttctaattgtataattacacttttgttttgctttgttgttgctgctggtttgctgctttcggcgaattggttgtaaatatgtacaaacttttttacttatgctaatatgtttctcgcgttaactccactccgctattgtatatatatgaactatatgcttatatgtgtgtggttgtttgttgttgtttgctttttgctatctcattcgctcccctttgtatatttataaatattaaacactaatcgaacgccagcctatgtatatatataaaaataaaattaaacaaacaattcttgcacttgacacttttacaaattctcgacgactaataaatagtaatgctgttgctgttcaagacttatcggtagacgataatgttttatccgccgctttcatcggttcatcggtttatgtttagttttcctgttgattatgctaagtaatctgtgcgttgcgttaactgctgctgctattgctctggttgttctgttgttgtttttcgattctgttaacttctattcagggttacttggtgttgattcagcttcagatcctttcggttctgtattctgttgttctttgaagatgtgatatagctagttagctagtggaagttctgcaaacggaagcatgcgactgcgtttgattgatttagttttttagatgatccaaaggatctgagatcccggaccttaggctattgcagccgtcagatagtacagatccattagcgtctggacattgatgggcagacaggagagacgatcgtgtgtgttggagtcgagcgccagccaggaaagggcattgtatccctcgaggacgaagcgcagcacatccgctgtgagattggagtcaagcggatgatcgttgcctgactgatgggcattggtcgagttgagaatatcgtcggcagactgtatgctgggcacatggagatggagggctgtcttcagaaacaccggacaaacgtcttctagatgcggacaggcggaccagaaccaagcaggcatgcgaccggttggcgccgtggacaccatgtaacccactgatatgggctgctggttgagtgaaccaacctgaaatgcaaaggaaaataagtaaattctttaggtcagtccaatataatggatcacccacctcctctacttcctggggcggcgtgcacttgaaattattaccgccagcgctctgccaactccgattgtcatccatgcgaccgggactaccatgattggatactctgtccatatgagctgtttcaagataaaatttaagtattcgaatgcaaagagtggtgattaaaaacactcactgtcccagaagagatctccaatgtccgcatcgctgaagtcctcgttgccctcttcctcgaatgttagaaagtcgtcatctacttgcggctcgttttggaactggcgcgtaaaaggctgcgagcaagaaaagggaaaacaattataggcaatcgtgttggattaggcttgtaaacttaccgcacagacggcgctagtgggaaagaccaggatgtgggtgcaggtcacgtcctgtggagtggccaacgggttctgcatggaaatctgtgagaagcgctcatctggcgtaaactggtcgggcatcacgcgcagcttggcatccggctccaaggtcacaaggcaagcactcaggatcgtgggtggatacatcaatgtacattgcttacacatatccttaaattgcttggatgccttttgcagctgttgcttgctgagcaaaaaactccacgacttcagttcactgtgtccgatccttccaatgcgtccgataaccaaacgccacatttgcgatgtctgcgagatgattcccatgatgaagtccatcagtttctttagggccacatagcgagcaggggcttttctcctccgagcacgatttggcacatcaatattaatgcagatcttctccagcatctcgcccctttcatcagtggcggtggccaaaagccaagcctgatcctcacttaggcagtaattgcaatacataaccgaataacgatgttcattctggccatgcatacttcccgctgatctggagaagtccgttttgtcattcctctcgtgcattggtgccagaacaaagggagccgtgtacatcttgtaggcccggcgattgggttcatcctttgtcttgagaaacgcctccatattagccgccgtaccaaagccagtaagacttttaacggattgggcatgcaccagatgtcgccggcactgcgaaaatatgtttagagccaggcacctaatctcgtccgagaaacgctttcgattgccgcacggacccagttccattaccgattctagcgatataatctgtatgttcatctgggatcgcactgaatctgggactgctttcagcagttccgcatagcaacgaagtagagcaatcagagctagacgctccagctcgcagctatccgaggcgaaagtgaacggattgaccacataaaggacaatggctgacgggttgatgtcctccaaagtctcgcccattcccaacggatctccgaggatcagagttggtttggtttcacctgctgcagtgcctccttttcccactccgggttcctgttttatttcgttagtctccatcggttggacttgtggttctgtacctggctccagctttatattatccgtgggtaagtccccgcctggcaatccgctgactgaagagctattcgaggagcaagagcttcctcctttagagtgtgagttgccactgccatctggtggattcaacagcgttttatcatttggcactcgacttaggtatggagccaactggtgaataaaggcaactgcataccgacggatttgctccgccagagcagcatgttccagggtacgcagccaatcatccaagggagttgtttcccgatccgcaggcacgttgttgcgagcagcgcctacttgaaggaaaccatcccatcctcggatgggtgtgtgtttgcccagcttgcacatctcgtaggtgctgcttagttcccggaaatagctgcgagtacaatttaccacatgctcgttgtccggacacactaccacgtatacaacatccctggcataggagtacggttccaggagaaacttatcccaatagtggatggagtgcggtgccaccgagatccaatccttctcgtagcccaccaccacggatggtatcggttgcggctcacattgtccggatgcacggcctgccagtcgatggaattggcgccaggttagcggtccactcaccgtattgtacgaactggcatccttggaacctgagccgcccctggatttgcaatggaatgcattctgcagcatcggctgtatagcattcatggtgcgtacaatctccttattgctacgggtgaaaccgacgggaagatatggccacttgtgaaccgtcaaccgcccagcaccaatacctgctagcttgtgacgcaaagcaggtggtggcgcatggaaagctgtcagttgctgctgctgatgcgagctactgctaccattcccatggaagtccatcatgttgtccatccgctggttttcgaatgccaatctcgactgctccagggccaaacttataacgtcgtgtgcatccataaactctagaacatttgcaattgatgccaatgaggcagtgggagctccattgttaccgaagatccttcgttggcgggacattcgcctccgatgagactgaagtgctctgtgcaccgaactgctagatgtttggatgatagagcactgatccaatagcaggtcaaatacagcatgacccaattgctccagttgtccattaggcaatcctcccgctccaattttatccaatgcagagcttgtttctccaggtccctgcttgttttggtttttcctgctaagactctggatgatactgagcaacgtgggctgcttattcctgcccggatcatccgcgatgcccgtgatctccacctcatcttcgtaaaagagtccagcgcgatgagagagtcttcgattaaccactgcactgaaaccacacgtacactccacgggatcatcgtccacatacccggtgatatggggattactgctgggcggcgtgcaagacgacgagttggagccaccatttggaccatggccatgtccggagccagctccgggcatcgaggctgaggctggcgaacccccaaaggcactgatcatccgcatgccgccaaaaccggcggaactgggtccattgagcattcgctgtccagccaaagcgcctccagctccggaagggaaaggattgaagctaaccccgggcaggggtacatatactccggaatccgctccgcgaatattgccaatcttttgcgtatccgcattgcacacacacacactgctactatcaaagttgtgatcccggaagacattcaaggcggtatcgtacagcaggatgttaactaggacagaatttacttctggtaattcctgaagcaaggacgaggatccggctgccatcgctgttccaccactgacaatgcccgcatcgccagtgtacgctaccatacccatgtgcccgccacctcctgttccgtgacccacaactcccgttgctccgccgcccaagccatgcatgtgcggatgctcttgcgagtgaagcggccggttcaagtacgatgatgtggaggtagctggactggccacagccaagtcatacggatatggcggtggcggatgcgtgggggttgccctcgacattggactacttctggcggcatacggacccattccgggtcccggtgaaattggtgacatccccgctcggtgcattagctgctgcatggaggcaccaggtggcgcttgtgggcagttcaactgattcagcaaatactgactgccaccactgctcaacggttgcggaacagtagagggcgttaatggtgtcctcggcgccgctgacaggagatcatgaaggtgctgatgctggtgcttctggtggccaactcctccactagccgccgctgctgctgcggctgccgcttgttgttgctgctgattctgaagctggagctgctgtagtttctgctgatgcaattggatgcgctgctgaagggcctgatgtttctgatgctgctgctgttgagctgccgctgctttagccaaagttgctgctcttgatttgtgactactccaggtgggttgataaaagcatcccgtaggcagagtcagcggcggctgtgtctgactgggcaggttggtcaatggagcatatcgcgtcgagcccacaaacttctcctgttgcggaggtcggtacacataatcccagtcattaatgggctcttccataggactacccagctccaggttatactcctgctttaccattttggagacagtctggatggccaccacggtgacgggagcttgtgcggcagccagcataatactgttgcttgggttgctacaggctgttgtggtggtgttgatactactcgtgatagtggtattgcaagtagtggtgatactactggttataatggttgtggtggtgtccacactgagatccgtcataaccacgtccgtttgacagggactcgagttcgggtgctgctgctcgtgagacggtggtgtgggaaacatcttggtaagatcctccgcctggatattgcccgcgcccgaggccgcagctgctgctgccgctgctacggcagcactggccaccgctgtgctccgtttgaggtcttcgatcgtattggtcacagcactgcagccgccattcgaggggttgttagaatcgggtggcgtgtggatttgcacactgctgcactcgtcgttcgagcttgtctcaaacaactgctccagatcgttgagcgagggattcaagccttcagctgtgaagagattaccaccgctaccacttcctccaccgctgctgttgccgcccgaggatttcgacgtttccttgcaagaaggggaatgcaatccaggctctgtcttaatgttcagtccctggaagaagctgctaccatcagcttctacatcactgccactggcagtactgttggcaatgcccactagaccaccgccggagctgcccgccgcctgtcctccaccgcctctccctcctgcttggctcgctgactcatccaaggaaagcaactgtgagccataaacggatcctggcgaaggcatcacgggcttcacgtggttttgtccttcgtaaaggttcttggcatacctaggtctccgttgcttttccatcttcggacgtttcaccgtgctatagtccctgtagtggtgaaaattcaatgttagagcgctgtttcagaaagacaaaacgacatacttaccagtattcctggtactgaaagtcatagatgacctccttgagccactcctcgtcgtagaagctgtccggatcctttaacgtcagctttggcgggttgtacagtcgcttaaagttgttcaaggcctccgtggtggaggtaacacctccaaccccccgaccttgagcaccaggctcctgcttgatggccatagctgccgatggagtctgctgctgcatctcaagcttcttgacacttatagtaccaaccgcatttgctccaattgcatttgaaggtccgccagatccggcgccaccagctgacgttgctgctgtgggcgtagccggttgctgggcgggcacactacctggacccgtaccaaggccctgcccaccagctggccctccgccggccgcatgatccgtatacgagggcggctccacgcttggcgtctgatgaacatagggcgaggccgtaatgctcttgctgtcgtgctggtccgttggcgttggcgccggtgtattcttgtccagcaggtggtcgataggcgtcggcggctgttggagattggaaacggaagttggcgcatgaggactcatattgagcagctgtgaagtggacaaaagtggacatcgtgttagtgaaacaagctgacttggggtctgtacgttggtttttgggtcgtcactttcactcacttgctcagcgggcggcacggatgtcggttgcgagtgcgccgaattcggatgcggagagggagccggcgttgccggtgattccacggaggccaccggcatcgaggaatcgccgcccaaggagttgcgggagtacgttgaagcgccgccgtgtggtgttccatgaggtgtgtttcccagatgtctgtcggaatagaaaaacatgtacatatggaattagcatattggataagtgttatcataagatcagctggtatcttattatttttcgaaaggttatgtacaatgttttatctacgtatagtgtagctatggattcacaggtatgcgcgtattatttaatatatatattattactcggaatactccaacaggagaagtgctccaaaaatagcaatagcaaaattaatcataaaaccatatccattgttttaggattagatgtattaaacaaaaccgttacagctgcaaaataatataacttataagataagtgcactttgttaaagcttatataagaaaatccaactattgtggtgtcatacaaaatttcaaaataaattttggatatcgatatattctaaatttagttttaaggcactaaattattttgttcttgtaaattcgtttatacatgatgtgctgttgttatttacaataaaaaaaaaaccagcaaataaaaccaaaatcattccacaaaatgcataaaaccttaaggaatcgaaacaaagatacatgcggcaccaaaaccaaagtatttaactgagtactcatactcaatgcagtatcgaatacagagtatcgagtaccgagcttttgcaaatcgagccatgagaaaatgagaacggcaatggggaagtggagtttggggtgtacgagagtggggggcagtagatatactaagctagttaggtactacataacgtgttgtatgtcctcgtcctcgatatggaaaatattatacaatttgttataatgccgttgcttgcagtctttagtgtttgtgtagcgttgcgttataatttattttaaatgttgctagctaatttaccatttaccaagaacgattaagtgaattggaattagaaattgttatttcaagatgacgactcgtgaatgtttgtgtgtggggctccttttttttttttttttggagaggcgtggtgaattaaatgcgcccctattctgattccagtgtatttcgcaaaggtcaaaaataatattctcaaaaccaaccaataaaataataaaacataagaaatcaaaagattaacagagcgtgtgaacagagtggaaagaaaattatataaatgtggataaagagcgaaagtaagtggacgggtggtatatatacagtagcagtcaaaaaagtagcacttgagacattttcattaaatttgaataagccgcatatattgttagattttgaaatgtagatccttatgacatatttcaaatacttcaaaaaccttgtataattttttgggtgcattcagaggcaaagtgaatctttaaaaggtggctcaaccgttctagagtaatagaattcgaaagtaaagatctcattcacgttcatatatcaaattttatcccatagtgctcttatttgatcgcaacggtacaataaaaaagagataaccgaatagcgttaacctaaaatataggcagcactggctataatgaacagacgccacttcacttcactccactcaacacacaaacctttgttttggtatattggtgtctgtggtggtgttgctgtggtttttggctctaaaggtggaggccgtggaggaggcggtggatgccagcgaatggagcaaccgcttatggaacggcacattgtgacgccggggagttgccgcggaagaattggaggcgctagtgttgctcagggaactggaatgatgggatgatgtggccgccgttgccggcagcacaggtgttcccggtcgctgctgctgctgttgctgcagatgttgctggtggtaatgctgctgctggtaggacgacgacgacgacgacgacgacgatgatgaagatgatgacgaggacgacttattgccactgccaccggtaactgctgctcgcagcgcaggcgatcccagcggttgctgcggtcgcttgttgttgctgatgttgctaatgctgctactgctgttgcactgggcgctgaaatttgttttttttttttggttttgttcggatttagacactagcaacacaatatttttaacgcttcactttcgtagctctgtcgcttggctgaagtttttattatttgttgctgctgtgtgggttaggtaactcaaaagaaagttgtatagaaaaaaaaaagaaacgcaaaatatctattgcctatcgcatgcagagataacagtaaacataaggtcaactaccgcctttaactgcatattgtttctagggtaaaggtacttttttttagcatgccatcaaagcgggttcgttttggtttattgggtttttttttctaatttctgaagggagcacaaaatctccactacatcaagttcatatcgatcttatatgcaatataataaaaattgttgttatattagaggcagcaagaagattttaaagggtcacaaaaaaacaaaaaaaaaaaaaaaaaaaacgcgcgcaagtaaaaaaaaagagggtattttcaaaatctctagatgtatgtaagtttgaagttctttttgcaatagctgtattaagctataataaatattttaacagaaacactgtaaacttcaagtatataactttatgttataatactaatttataaagaattaaacttgcgaacagcatacaaactaacagaatgaaatattttctcgagtaatttcaaatttaaaacttctagagattggataaatacccttacgtataaagagataataacatggcagggaaagtcctccatagtttttaaggagctaaaatatcaaaactcacttggtgcatatgcagggtgccttttgcatgggatccacaaagttccagagcttttggcgttgctgttgctgctggatctgctgctgcaccagttgcttggagtcctgtggcggtttattctgctcattctcgtccccatccgcggataatgacccagttcccgaggcgggcgtagacgaagcaactgctgctgccgccgccgctgcatccacatggagcgtgttcatcacgcaatcctgccaggttcgttccggcatttccacggctgccgaggcgggtatgtgagtattgttggtattgaaggtgaagcccgaggtgggccgttgatcgtagtagggctggaaggcgagacgttccagggcgctaaccgcttgtggagctgccttgcgggatatctctttggcggcggaagatgcggtggctccgacacctgctcctgctaaagctggcgcattgagggaagctggacccaagggaaccgctgttgcagatggagctgctcccatcgatgaaggagcagatgctgctcccggtgggcaggaaagcgaggccagaacagctgactcggccgccgctccggccactgagctttgcatcttctgcatctcgacgaattccatgtgctccatgtcgtccaggtctgtgactagtacgtagttcgtgggatgatacatcttatgaccacctggggatgaaaattaaagcaattagattggacacccggagagcaattaatccaaagcttttcactcacccgacaccacttccaccacgggtggcacatccgtgttatccttattgcacagcggaaaaaacgaggcccaatcctcaaggatcttctcggctatgggatcgctggccttatagctattgccggtaagtatgccagcaattccaaagggcgccagcataacctttcgcgcgtgcggaggtggcgctgccttggccgctccctctccgccgtccagtccatccatgctggctccatttggatcctgaccaggattaggcacagctccccctgctgacgccgcagatccatttgatcctggcggagaactggccgctgcaaaggctgccgccgcttcggtcaagtgctccttggtcagcggacgcacggcgggatgctcgcgcaaatctatggaggcacaaacggtgtcgccgtgcacaaagaacgtaaatgagaaggacaagtgctgggagctgcaaagagaatataaatgattagcaattgtggagtaagatcaacctacaagccctatattttcaagtttcaaaaataagtttcattagattattagaaaacggagcattaatgatgataatcgaaaattcaatacaacgaataagctgaacaattatgcgcaattgaatttgttataatagaatcaaatagtttaggaatgtcgcaggaagaacgatgcaatgccacaagctccaatgccattgcacagagttcctgttcattattctaggatattgccatattgtgaattggaaacaattctcagaattttcacaaaagttaaggcatatatccgaacagtctctgtctaaactcttcattacggtcacatacctgcgtccaaagaggcgatcgctggaggtgcagggctgcacaaaccattttccaaagcgcacaatgtccttggtaagcacgaatctgagagaagtgttatttataaacattagattaaatttgatattgatgtattgctgtaaggttctacctctccatgagattgtgcagcgccttaaagagcagcgaccggcactcgtaggtgagagctcctttccaggtgccattccaaagcgcttggttggctgaaaaataaaataaaattatgatttatttattttcataaaatccttaaagaattgtccttcttttaggtgttttaaatatttgaacattctcgattaaaatagtttcaacatctttgtaattggtaaaagtatttggcgaatcaaaaaatgtatgtagcttgtgaatggaagccttataatccaatatattccatatatatatgtatgtaagtacatctttaaagttagaagtcagtgtattaaagtctactcaacttgcgttggagtatgaaaatccctataatcctttatgtaaaacgttctctaagctctagatcgcaatgaatcttcaagaggcgggtgtgtttctctattttgtcaacatctttgatttcgatgtttcatcaaaatgtaaacgaggaaaatacccaaaaccaagtggaagaaataacaagaatttatagtaataatagaaacaatggaagaggcgtctacaaagtaaaacaatcaatctcacatttttgccctctctttcccatccacttttcttctctctttcttgcacgccttaggaaaaacaaaacttttaaggctattcatatttgttattgttttgttttcgttttgcatttgaattgttcttgtagaaaaatgacaaacaaacttcgagcgagatgggtagaacgccagaaagcgagaggcacagagaaggccagaaataaagaagcataaagaaacggtggataaggatgaaaatatgtgtagagcgcaatatgtaaaaatgcagcgtgagaagtgaagagaggtggagacaaaaagccgccaagcaacaaaacaaaaatccaaagcggaagtgctaacactcgaaacataaagaaaaggcagtacgtaaaagaataagagggagggaaaagaggagggagagtatttgtgaaagaaaatggaaagtctagaaatttttggaaaattccaagcatccacccccaccacttacggacacacacacactcacttccaaatatatatacatatgtatggggtaaatctctctttcgctctttctcttcgattcccacgcctgcattgatttccactgcttcttctttttgtcttcgttggtcaacaatgttgcacagataattacgtaaaagtaaacaacacggacaaataacaaacaaagcaaaaatggcttagcagtatacataataactatttttgttgtatttcatggctactactatttcccttcaatgagatcagcgtgagttttttttacaacgacgcttaaaaaactcacacgcacacgtcggcataaaagggcaatgtacgattatgacagtgtgtgtgtgagtgcgtgagagtctgcttcctctctgcatcctcgtcctcttcctcttccacaccactattattattccgtcatctacacgttcccatgcccacacatccaatattcatcctgcaagccggctcttcttcgtttctcttcttctcacaggtcacacaccacaaacacacacacacatattgacacactacccaacggcgaaaagttcaaagctcgccaaaattataaataaatgtccgcaagggtaggccaggcaaaacacaagcaacaacaaccacaactttagcggctctctcggcaaacaagcaaacaaaagaaaatcaagagtcgagtgaagcaaaacgggacgacaaacaaaaataaaataaagaagcaaaagactgaattccagcaatagcaaacaaaagacaatgttgtcacataagattttgggcggtaaaaaatttaaaaaagattttaagaatttcaaaaagcacaaaattatttttttgaaatgatatgcaacattgtatcctatggaaagtaaacgggatttatacctataacctttgattaattcaaatagtttccaataataatccaattccatttaattatctggcttcaaaggtacaattgtgttcgtaaattattgttgaattaattttatttccccatcacagctgctaaatatcctgatctccctctttttccaatttcttggctttggaacaggaattgtaatcgggtaaatcggaatcggggaatcggaatcgacggcgactgctcaatgcaaattccacaaacacgttgaagccgtctgtgtgggtgtatttttttagcacgtgtggtttgtgcacatgttgctgctcctctctctctcccactcagacgtttttaaagagagaggtggaaagtcgctctgtgcaaagtagcgagtaagagagagagagtggttgtttgggagacaaagtgccgctaggcgtgcactcgttcttgttcacccacacactcactagctgctcttcttgtttgtggcccgaaaaaattgctattttaggttaacattttgctatcgcagcagatcttttctttaccgctctctctttctaagaatgtgcgtgagaatttcacaacaactgtaacgtgtaattaagagagcgttatttagcagttttgcatttgcgtgacacataatgaaaacaaaaaacgaacacacatgacaacaagcagcaacaaatgttggatcaaggtcaataatctgagcgcacacacatttaaaaatgtttagtaagcgcaataacaaatcgagaaaccaaaaagcaggtaaaaccacacgaatgcaaaagacttaaaaataacataataaatgagcaagaaagcgcattgtaattaagcccaagcttgcaaaccagtttaagctcattgagagccaagaatcgaaaaagagagaatatctcttcgaatctttctctattattctcagagagcaccgcataattattggctccaattttggagcacacgcacacagctgccccagcactcacacacgcaaaagtgacagctgtttaaggtaaaaatcgtatgctatcgaagtacaacaaactgtttgaatacttgtcattgtcaagtcgtgtgtgtgtgttgtttttttttttgtttcgaaacagtgctagaatacattgtaatttgggatcttatattctacagcacctattttatgtcatgtaaatgttatttttgtgccactgtgctgactggctgagatttgcggcgttgccgttttcatgtacagcaactcagagagacagtaacagtaactacaaggcgctctctcttcgccactcttctcaccctttcagaatttcattcacacgcacttgcgagcacgcacacacacacaccaacaagacgaaaatttttttcgccagttgtgttgtttatggccgaaaaagctataaaaagcatacgaaaattcgaccaaaaaacgcagacaaagtaatgtcaatgcaattagtcaatgtccttgtcattaaaagtgcaataaataaaataacgcaatgacaaaggctaaaacgaaaaacaacgcgaaatctcatcagcgatggaagcgacgtgcatacaactctcaactccagacggtaaaaaaagcgcgcctcaaaaaggggttaatgcatgacggcggaacaagcaaactgtaaacttattgggccacaatgacgtaggcagataacaaaagatacagtcaaacttccttatctcgtatctcggtcggagaacttcaaaagagaaacggtgggtaaaggagaacttctgtagctatacacggatgcaaaatttgtagttctaatggaaactaatgaactattaagataattatgatctcttacgtatgtacgctgtactatttatttataattatgctttatgaaatggataagaagcgtattgtaagatacttttagtttagataggcaatttaattaaacaaaaatgttttaattgaatatttaatttaataatatttaaagaagagggtcttctcagttaaaaacataattggtgggagctccttatctggcgttccactttatgatctaaagtaaaagccttcacatttttgttgttctttattgtttcaatcactggttaataagaaaccatctttgaatctttgaaacattgagaactttttaccaatcatatttaattaaagttttgaaatatctattaaatgggtctgcagataacgggattacggatctcgggcgacctgcggttgcttggtgggtaatggaatttgccgtggaaaagccgaaacttaaattcaaattctactatgaacaatgtacgtagtgtagtacgtagttagtggtcagagataatgaggcaataacaaaaatattgaataaatagtagccgcacgcaatggctgataagagaagaaagaaatggagatagggtgtgggaaagagaacgagcttctttcgaaggccagtagtgtgtattgatattgaacaaccctcgaaggagcgagcgagagggacgctgagcagggggagagcgcgagagcacctttcttcttcgtttgcataattacccgagagcgacggagagcgaaagagagagaaagctagcgaaaacattgcaaatgacaggtgacgtttcggcactactgcttcctctttccttcttttatgcacaaggaaaaaaggaataggatttaaggactttttaggggttttgtaatgtaaattcgtaagccacgttaaaatatttttaacataataatttaatctagctaggaactatatatacattcatgtttataagacactttcgattagaactcggttttggatcaattgcatatttaatttgaacctttgcgttacaatgttccgaaaaaaaatgcatgtgtataacatataggaagaactttttcttttttcgtgtgaaattcggcggaagagagaagacaaccgcctacgattgacagttgttgcttttttcctttagttctttctcttttctgttgctgacggttcaatacgacgccatgtgagttgaatgacgcctaaggaaaatgaaaaggcgagggagaaagattgcgaaacaacgggggatggagaaaaaagtggagagaatcaggagagcaataataataatcatctgccgcaatcgaaatgtatttcgcgagttctctgttgtttgtttgtgtgtcgcatttgttttggcttttctcacacagatacacccacacacacataaccgtcaaagagatggcaaaatttgttgttgcaattgcatgcgatggatgtggccttgaagctttattaaattcatcacccacttggatgtgtgagtgagaacgggtatgtgtgtgcctgtgtgtgtgtgggagagaaagggagagcaagaaaataatacaatcaatcttaaatgtaacacatcgaattttaagtggtaaataggtttacctatttagaaacttctatgaaaatgtcatattgtatacctcgtggctagtaccggtaactagctttcatatttagctttcacattttattcgaaccgtcttcggtctagaaacttacccgctactcggagcagctcggcatcgaccagttcactgagatcgggctcctcgccgtaccagaagatccatagctccttggcggcggccagcgaaaggggcgggtggaccttggtcgacgtggtcatctcgaaggttaaggcattcgggtcggcgtggtccgtcttcgtggattggaccctcctccacacgcacagcatgtccgcctggatgcatcgcgaatatgagcgcaggatcgggtccgccaaaggatcgctcgatgcgttcggtcgctccccgttaacgaacttccgccactttattccacataaatcagtctgtaatgggttaatagagagttagcagtaattagtcataaatgcgtatgtaagcaggtaatggtagccagactaatgccaaataggttctgtaatacactcaactgataactatcactgcactatctacttatacatatgtgtagggtagctcctatcatttgtttaccctgtcgtgacgaaagttccgtgtctgtacaatcttcttataaatgacgtacggaaaatagcgcattcctaatttaagacttgttatggcagctgctggggagaaatcttaaagagactttggataaacttcaccaataacaacctattttatttccgttgcggccttatttagatatttactgatagctgtgatcgcagagaatatatgcagagaaataattgttcctaaagctacaaaatcacaaatatattgcagtaaatgtgaattattccctatacaaacaccacgtttacttttataggctaaagttaaatattaagcacctttagatccctttaataagaaaagcaattaaaaaatggaacttatccaacaagttgattccattcgatcataaactatagataggtaaactgttttttcacactaggtcgcaacagtttgtgaaaacttaactgctctttttacatcgataaatgctgtaggtattaaaaataaaggtttcagcacaccccatctgactcactgagattacgatcttaaactgttttatcggtttttgcattaaacgcaaattctaacgatgacgttagatttaattacgaattgctaattttgtcacgattcgagaaatcaatgaagagtcaagcaataaatggataagcttctttaatgttatatgcaaatgaaataatacagaaattttctatataataccttatattttttatacaacttcaagttttgccgagtgtatttcaatctatgcaaaaacgataatcatcttgaattgttgcccactaatttaccagtgttgcgaaatctttcaacttacacacacacatctgtaaaatacattcctcattgcacttggcagcagcagtaacaacaggcaaagcataaaaagaccaaagcgaagctcgaaaatcttccgctgcctcgcaactcaaaacaaaagcacgaaaaaaacggcagagggtggaaaggaggggtggagaagaagggggaggaaaagaggagctgcagcagagacatgagaaacttggggcaccgaagaagaaac

SEQ ID NO: 42212 - DNA, 7335 bp, DROSOPHILA
atgcgctattttccgtacgtcatttataagaagattgtacagacacggaactttcgtcacgacaggactgatttatgtggaataaagtggcggaagttcgttaacggggagcgaccgaacgcatcgagcgatcctttggcggacccgatcctgcgctcatattcgcgatgcatccaggcggacatgctgtgcgtgtggaggagggtccaatccacgaagacggaccacgccgacccgaatgccttaaccttcgagatgaccacgtcgaccaaggtccacccgcccctttcgctggccgccgccaaggagctatggatcttctggtacggcgaggagcccgatctcagtgaactggtcgatgccgagctgctccgagtagcggcgctttggaatggcacctggaaaggagctctcacctacgagtgccggtcgctgctctttaaggcgctgcacaatctcatggagagattcgtgcttaccaaggacattgtgcgctttggaaaatggtttgtgcagccctgcacctccagcgatcgcctctttggacgcagctcccagcacttgtccttctcatttacgttctttgtgcacggcgacaccgtttgtgcctccatagatttgcgcgagcatcccgccgtgcgtccgctgaccaaggagcacttgaccgaagcggcggcagcctttgcagcggccagttctccgccaggatcaaatggatctgcggcgtcagcagggggagctgtgcctaatcctggtcaggatccaaatggagccagcatggatggactggacggcggagagggagcggccaaggcagcgccacctccgcacgcgcgaaaggttatgctggcgccctttggaattgctggcatacttaccggcaatagctataaggccagcgatcccatagccgagaagatccttgaggattgggcctcgttttttccgctgtgcaataaggataacacggatgtgccacccgtggtggaagtggtgtcgggtggtcataagatgtatcatcccacgaactacgtactagtcacagacctggacgacatggagcacatggaattcgtcgagatgcagaagatgcaaagctcagtggccggagcggcggccgagtcagctgttctggcctcgctttcctgcccaccgggagcagcatctgctccttcatcgatgggagcagctccatctgcaacagcggttcccttgggtccagcttccctcaatgcgccagctttagcaggagcaggtgtcggagccaccgcatcttccgccgccaaagagatatcccgcaaggcagctccacaagcggttagcgccctggaacgtctcgccttccagccctactacgatcaacggcccacctcgggcttcaccttcaataccaacaatactcacatacccgcctcggcagccgtggaaatgccggaacgaacctggcaggattgcgtgatgaacacgctccatgtggatgcagcggcggcggcagcagcagttgcttcgtctacgcccgcctcgggaactgggtcattatccgcggatggggacgagaatgagcagaataaaccgccacaggactccaagcaactggtgcagcagcagatccagcagcaacagcaacgccaaaagctctggaactttgtggatcccatgcaaaaggcaccctgcatatgcaccaattccctgagcaacactagcgcctccaattcttccgcggcaactccccggcgtcacaatgtgccgttccataagcggttgctccattcgctggcatccaccgcctcctccacggcctccacctttagagccaaaaaccacagcaacaccaccacagacaccaatataccaaaacaaagacatctgggaaacacacctcatggaacaccacacggcggcgcttcaacgtactcccgcaactccttgggcggcgattcctcgatgccggtggcctccgtggaatcaccggcaacgccggctccctctccgcatccgaattcggcgcactcgcaaccgacatccgtgccgcccgctgagcaagtgagtgaaagtgacgacccaaaaaccaacgtacagaccccaagtcagcttgtttcactaacacgatgtccacttttgtccacttcacagctgctcaatatgagtcctcatgcgccaacttccgtttccaatctccaacagccgccgacgcctatcgaccacctgctggacaagaatacaccggcgccaacgccaacggaccagcacgacagcaagagcattacggcctcgccctatgttcatcagacgccaagcgtggagccgccctcgtatacggatcatgcggccggcggagggccagctggtgggcagggccttggtacgggtccaggtagtgtgcccgcccagcaaccggctacgcccacagcagcaacgtcagctggtggcgccggatctggcggaccttcaaatgcaattggagcaaatgcggttggtactataagtgtcaagaagcttgagatgcagcagcagactccatcggcagctatggccatcaagcaggagcctggtgctcaaggtcggggggttggaggtgttacctccaccacggaggccttgaacaactttaagcgactgtacaacccgccaaagctgacgttaaaggatccggacagcttctacgacgaggagtggctcaaggaggtcatctatgactttcagtaccaggaatactgggactatagcacggtgaaacgtccgaagatggaaaagcaacggagacctaggtatgccaagaacctttacgaaggacaaaaccacgtgaagcccgtgatgccttcgccaggatccgtttatggctcacagttgctttccttggatgagtcagcgagccaagcaggagggagaggcggtggaggacaggcggcgggcagctccggcggtggtctagtgggcattgccaacagtactgccagtggcagtgatgtagaagctgatggtagcagcttcttccagggactgaacattaagacagagcctggattgcattccccttcttgcaaggaaacgtcgaaatcctcgggcggcaacagcagcggtggaggaagtggtagcggtggtaatctcttcacagctgaaggcttgaatccctcgctcaacgatctggagcagttgtttgagacaagctcgaacgacgagtgcagcagtgtgcaaatccacacgccacccgattctaacaacccctcgaatggcggctgcagtgctgtgaccaatacgatcgaagacctcaaacggagcacagcggtggccagtgctgccgtagcagcggcagcagcagctgcggcctcgggcgcgggcaatatccaggcggaggatcttaccaagatgtttcccacaccaccgtctcacgagcagcagcacccgaactcgagtccctgtcaaacggacgtggttatgacggatctcacgccacctggtgcctccatgcagcagctaatgcaccgagcggggatgtcaccaatttcaccgggacccggaatgggtccgtatgccgccagaagtagtccaatgtcgagggcaacccccacgcatccgccaccgccatatccgtatgacttggctgtggccagtccagctacctccacatcatcgtacttgaaccggccgcttcactcgcaagagcatccgcacatgcatggcttgggcggcggagcaacgggagttgtgggtcacggaacaggaggtggcgggcacatgggtatggtagcgtacactggcgatgcgggcattgtcagtggtggaacagcgatggcagccggatcctcgtccttgcttcaggaattaccagaagtaaattctgtcctagttaacatcctgctgtacgataccgccttgaatgtcttccgggatcacaactttgatagtagcagtgtgtgtgtgtgcaatgcggatacgcaaaagattggcaatattcgcggagcggattccggagtatatgtacccctgcccggggttagcttcaatcctttcccttccggagctggaggcgctttggctggacagcgaatgctcaatggacccagttccgccggttttggcggcatgcggatgatcagtgcctttgggggttcgccagcctcagcctcgatgcccggagctggctccggacatggccatggtccaaatggtggctccaactcgtcgtcttgcacgccgcccagcagtaatccccatatcaccgggtatgtggacgatgatcccgtggagtgtacgtgtggtttcagtgcagtggttaatcgaagactctctcatcgcgctggactcttttacgaagatgaggtggagatcacgggcatcgcggatgatccgggcaggaataagcagcccacgttgctcagtatcatccagagtcttagcaggaaaaaccaaaacaagcagggacctggagaaacaagctctgcattggataaaattggagcgggaggattgcctaatggacaactggagcaattgggtcatgctgtatttgacctgctattggatcagtgctctatcatccaaacatctagcagttcggtgcacagagcacttcagtctcatcggaggcgaatgtcccgccaacgaaggatcttcggtaacaatggagctcccactgcctcattggcatcaattgcaaatgttctagagtttatggatgcacacgacgttataagtttggccctggagcagtcgagattggcattcgaaaaccagcggatggacaacatgatggacttccatgggaatggtagcagtagctcgcatcagcagcagcaactgacagctttccatgcgccaccacctgctttgcgtcacaagctagcaggtattggtgctgggcggttgacgccgatgctgcagaatgcattccattgcaaatccaggggcggctcaggttccaaggatgccagttcgtacaatacggtgagtggaccgctaacctggcgccaattccatcgactggcaggccgtgcatccggacaatgtgagccgcaaccgataccatccgtggtggtgggctacgagaaggattggatctcggtggcaccgcactccatccactattgggataagtttctcctggaaccgtactcctatgccagggatgttgtatacgtggtagtgtgtccggacaacgagcatgtggtaaattgtactcgcagctatttccgggaactaagcagcacctacgagatgtgcaagctgggcaaacacacacccatccgaggatgggatggtttccttcaagtaggcgctgctcgcaacaacgtgcctgcggatcgggaaacaactcccttggatgattggctgcgtaccctggaacatgctgctctggcggagcaaatccgtcggtatgcagttgcctttattcaccagttggctccatacctaagtcgagtgccaaatgataaaacgctgttgaatccaccagatggcagtggcaactcacactctaaaggaggaagctcttgctcctcgaatagctcttcagtcagcggattgccaggcggggacttacccacggataatataaagctggagccaggtacagaaccacaagtccaaccgatggagactaacgaaataaaacaggaacccggagtgggaaaaggaggcactgcagcaggtgaaaccaaaccaactctgatcctcggagatccgttgggaatgggcgagactttggaggacatcaacccgtcagccattgtcctttatgtggtcaatccgttcactttcgcctcggatagctgcgagctggagcgtctagctctgattgctctacttcgttgctatgcggaactgctgaaagcagtcccagattcagtgcgatcccagatgaacatacagattatatcgctagaatcggtaatggaactgggtccgtgcggcaatcgaaagcgtttctcggacgagattaggtgcctggctctaaacatattttcgcagtgccggcgacatctggtgcatgcccaatccgttaaaagtcttactggctttggtacggcggctaatatggaggcgtttctcaagacaaaggatgaacccaatcgccgggcctacaagatgtacacggctccctttgttctggcaccaatgcacgagaggaatgacaaaacggacttctccagatcagcgggaagtatgcatggccagaatgaacatcgttattcggttatgtattgcaattactgcctaagtgaggatcaggcttggcttttggccaccgccactgatgaaaggggcgagatgctggagaagatctgcattaatattgatgtgccaaatcgtgctcggaggagaaaagcccctgctcgctatgtggccctaaagaaactgatggacttcatcatgggaatcatctcgcagacatcgcaaatgtggcgtttggttatcggacgcattggaaggatcggacacagtgaactgaagtcgtggagttttttgctcagcaagcaacagctgcaaaaggcatccaagcaatttaaggatatgtgtaagcaatgtacattgatgtatccacccacgatcctgagtgcttgccttgtgaccttggagccggatgccaagctgcgcgtgatgcccgaccagtttacgccagatgagcgcttctcacagatttccatgcagaacccgttggccactccacaggacgtgacctgcacccacatcctggtctttcccactagcgccgtctgtgcgccttttacgcgccagttccaaaacgagccgcaagtagatgacgactttctaacattcgaggaagagggcaacgaggacttcagcgatgcggacattggagatctcttctgggacactcatatggacagagtatccaatcatggtagtcccggtcgcatggatgacaatcggagttggcagagcgctggcggtaataatttcaagtgcacgccgccccaggaagtagaggaggttggttcactcaaccagcagcccatatcagtgggttacatggtgtccacggcgccaaccggtcgcatgcctgcttggttctggtccgcctgtccgcatctagaagacgtttgtccggtgtttctgaagacagccctccatctccatgtgcccagcatacagtctgccgacgatattctcaactcgaccaatgcccatcagtcaggcaacgatcatccgcttgactccaatctcacagcggatgtgctgcgcttcgtcctcgagggatacaatgccctttcctggctggcgctcgactccaacacacacgatcgtctctcctgtctgcccatcaatgtccagacgctaatggatctgtactatctgacggctgcaatagcctaa

SEQ ID NO: 42213 - protein, 2444 aa, DROSOPHILA
MRYFPYVIYKKIVQTRNFRHDRTDLCGIKWRKFVNGERPNASSDPLADPILRSYSRCIQADMLCVWRRVQSTKTDHADPNALTFEMTTSTKVHPPLSLAAAKELWIFWYGEEPDLSELVDAELLRVAALWNGTWKGALTYECRSLLFKALHNLMERFVLTKDIVRFGKWFVQPCTSSDRLFGRSSQHLSFSFTFFVHGDTVCASIDLREHPAVRPLTKEHLTEAAAAFAAASSPPGSNGSAASAGGAVPNPGQDPNGASMDGLDGGEGAAKAAPPPHARKVMLAPFGIAGILTGNSYKASDPIAEKILEDWASFFPLCNKDNTDVPPVVEVVSGGHKMYHPTNYVLVTDLDDMEHMEFVEMQKMQSSVAGAAAESAVLASLSCPPGAASAPSSMGAAPSATAVPLGPASLNAPALAGAGVGATASSAAKEISRKAAPQAVSALERLAFQPYYDQRPTSGFTFNTNNTHIPASAAVEMPERTWQDCVMNTLHVDAAAAAAAVASSTPASGTGSLSADGDENEQNKPPQDSKQLVQQQIQQQQQRQKLWNFVDPMQKAPCICTNSLSNTSASNSSAATPRRHNVPFHKRLLHSLASTASSTASTFRAKNHSNTTTDTNIPKQRHLGNTPHGTPHGGASTYSRNSLGGDSSMPVASVESPATPAPSPHPNSAHSQPTSVPPAEQVSESDDPKTNVQTPSQLVSLTRCPLLSTSQLLNMSPHAPTSVSNLQQPPTPIDHLLDKNTPAPTPTDQHDSKSITASPYVHQTPSVEPPSYTDHAAGGGPAGGQGLGTGPGSVPAQQPATPTAATSAGGAGSGGPSNAIGANAVGTISVKKLEMQQQTPSAAMAIKQEPGAQGRGVGGVTSTTEALNNFKRLYNPPKLTLKDPDSFYDEEWLKEVIYDFQYQEYWDYSTVKRPKMEKQRRPRYAKNLYEGQNHVKPVMPSPGSVYGSQLLSLDESASQAGGRGGGGQAAGSSGGGLVGIANSTASGSDVEADGSSFFQGLNIKTEPGLHSPSCKETSKSSGGNSSGGGSGSGGNLFTAEGLNPSLNDLEQLFETSSNDECSSVQIHTPPDSNNPSNGGCSAVTNTIEDLKRSTAVASAAVAAAAAAAASGAGNIQAEDLTKMFPTPPSHEQQHPNSSPCQTDVVMTDLTPPGASMQQLMHRAGMSPISPGPGMGPYAARSSPMSRATPTHPPPPYPYDLAVASPATSTSSYLNRPLHSQEHPHMHGLGGGATGVVGHGTGGGGHMGMVAYTGDAGIVSGGTAMAAGSSSLLQELPEVNSVLVNILLYDTALNVFRDHNFDSSSVCVCNADTQKIGNIRGADSGVYVPLPGVSFNPFPSGAGGALAGQRMLNGPSSAGFGGMRMISAFGGSPASASMPGAGSGHGHGPNGGSNSSSCTPPSSNPHITGYVDDDPVECTCGFSAVVNRRLSHRAGLFYEDEVEITGIADDPGRNKQPTLLSIIQSLSRKNQNKQGPGETSSALDKIGAGGLPNGQLEQLGHAVFDLLLDQCSIIQTSSSSVHRALQSHRRRMSRQRRIFGNNGAPTASLASIANVLEFMDAHDVISLALEQSRLAFENQRMDNMMDFHGNGSSSSHQQQQLTAFHAPPPALRHKLAGIGAGRLTPMLQNAFHCKSRGGSGSKDASSYNTVSGPLTWRQFHRLAGRASGQCEPQPIPSVVVGYEKDWISVAPHSIHYWDKFLLEPYSYARDVVYVVVCPDNEHVVNCTRSYFRELSSTYEMCKLGKHTPIRGWDGFLQVGAARNNVPADRETTPLDDWLRTLEHAALAEQIRRYAVAFIHQLAPYLSRVPNDKTLLNPPDGSGNSHSKGGSSCSSNSSSVSGLPGGDLPTDNIKLEPGTEPQVQPMETNEIKQEPGVGKGGTAAGETKPTLILGDPLGMGETLEDINPSAIVLYVVNPFTFASDSCELERLALIALLRCYAELLKAVPDSVRSQMNIQIISLESVMELGPCGNRKRFSDEIRCLALNIFSQCRRHLVHAQSVKSLTGFGTAANMEAFLKTKDEPNRRAYKMYTAPFVLAPMHERNDKTDFSRSAGSMHGQNEHRYSVMYCNYCLSEDQAWLLATATDERGEMLEKICINIDVPNRARRRKAPARYVALKKLMDFIMGIISQTSQMWRLVIGRIGRIGHSELKSWSFLLSKQQLQKASKQFKDMCKQCTLMYPPTILSACLVTLEPDAKLRVMPDQFTPDERFSQISMQNPLATPQDVTCTHILVFPTSAVCAPFTRQFQNEPQVDDDFLTFEEEGNEDFSDADIGDLFWDTHMDRVSNHGSPGRMDDNRSWQSAGGNNFKCTPPQEVEEVGSLNQQPISVGYMVSTAPTGRMPAWFWSACPHLEDVCPVFLKTALHLHVPSIQSADDILNSTNAHQSGNDHPLDSNLTADVLRFVLEGYNALSWLALDSNTHDRLSCLPINVQTLMDLYYLTAAIA

SEQ ID NO: 42214 - DNA, 2832 bp, DROSOPHILA
actcagctcacttgctaaacaaatccgatgaagaccgcacaacgttgcaattcaaactgaatggggaatattcaaatcgtgtgctgacaactggagaatacgatgcgagtgcaatagaaggtgttagtctgggtgcaattaacattactccagccagatgtaaacagacatgctaagtaagtacactgcccgaaaatatggggaggtatttcggcgtgcattatgaataaaaaatagaagctcatacggtgttcatagatcatcatagatttattaagcaattacgtgctaaactttagactttgcaagttacaattttcttggtaacctaagacaacaaatttttctgagtgcataaatatgtagacagtgcgaggggcaatactctcggaaatgtaaaagttagcaataaaaagctaaatttgtttaccttacatgctatgcacttgtatacactgtctacttgattacgtcatctgctgggtgtttgaagagcaattgcttacatttactttaatggcgatttcctatgatgcctcatgttttgaaatgctcgggtattcgatgaaatgttccatttttggagttggaacatttttattgatcaatgccgagaagacaacttctcctaaaagtactcgtttagtttgttaatgagatcccaaaagtatgctacactttcacaacgtgactgtttacgattgattgatcaaattataagcatggatttactttataattagtcagatgtcttaaaagtactattacgaagaagggaattataatttggtatatggtaacacgttctgtatttatttcaatgctgaacaagaacacagcaaacactcttgtgctgaaattgtacgccagccttttcagtgtcaacggaaaacaaatagagcaagcggaataaaatgaatgcctccaaaaattagcaattttaatcagaattctaggggatatcaagtcccataaagcccagagcctctgtgcgaaaaccagagaccactgaaatgctgaagcttacggttctactaattacattgctggtcatagcaaaaactggatggactcgcgaaaagttctccatacaagtaaacgaaggtaatgctatctacgatacatatgtatatataagatgtatattaatgtcttccttacatttgtcactaggaaatacgtttggtgcgctcgtcaaggcggaaccctttaccaaaatcaacgacggatactacttctttggcacggagtccttgaactggtacgaggcctacgagaaatgccgcgaattgaactctgagctggtcacattcgaaacggaccaggagttcgatgccgttacggctttcctgacggccaacggatcacggctgacgtactggacatcgggaaacgatctggccaagactggcagccacagatggttcaccaatgcccagcgaattagttcgctcaggtgggcaaggaatcagccggataatgctgggcagaaggagcactgcatccaccttggctatatttacaaggactcgcggaagtttgagctaaacgatagaccctgctcacaggatccaaacagtttgtttaagtatatatgcgaagctcccgaaatggaaaccatttccattgtggtgtggaagtagagtacttcacaaacctcttccatttcagaagtttgactttatagttttgcaatgaaggggaaccaccggaatactattttcttgagcagccataaaataaattaaaaggttttgtatttttctaagataaccactaagcaacccgtaaacttatctcgcacttctgcaaatatatcattgggtataaaaggcggttatacttgttacattctatgagtaataggaaaaatgctgaagacattggttcaacttttccttgttgtcgccggttttgcaccaggattcggctacgacaagtacaccacacacatacaaaatggtaggatgtcatttgtgttcataaaagcgtgattatatcctgattatgttcaacgtttcaaggaaacccgtacaacttgaccgttgacatgactcccttcattaagatcaacgaaagctactatgtttttggacagactaaggtcaattggtatgtcgcctacgagaactgccgcaggcttcaatccgaactggtgaccttcgaaacagccgaagagtttgacgccattgccgcgttcttgaatgcccgaggagatcgctccgagcactggacctccggcaatgatttgggcaaaaccggcacccactactggttctctaatgcacaactcgtgaccattaagcgttgggcgcccaaacaaccagacaatgctggcggtagggagcattgcatacacttgggctacatctacggctattcaacggagttccaactgaatgatcgaccctgccacaaccacgcgagtagcttgtttaagtacatttgtgaggctccaaagcaggaaactgtatctattgttgtttggaagtagagtatgtgtcaatatatatatatttattgctctactatgtcacatattgtcagtgctataaaagtcttaaactatcagtcaacaacgctatcagccatggctatctgaacaagcaatttccaaactcttagtcagttgcaaactgaagctcgaggaatgatggtcaaacttctcctgctgttcctggtatgctggagtgctcttcctttggagtcatctcccttgggtaaccgatgtaagtactgaagttattacttgaagttattatgaaaataactaatattggtaaggttagatttcgtataagctatatgcagatgcctttaaagtcgttacac

SEQ ID NO: 42215 - DNA, 763 bp, DROSOPHILA
agagaccactgaaatgctgaagcttacggttctactaattacattgctggtcatagcaaaaactggatggactcgcgaaaagttctccatacaagtaaacgaaggaaatacgtttggtgcgctcgtcaaggcggaaccctttaccaaaatcaacgacggatactacttctttggcacggagtccttgaactggtacgaggcctacgagaaatgccgcgaattgaactctgagctggtcacattcgaaacggaccaggagttcgatgccgttacggctttcctgacggccaacggatcacggctgacgtactggacatcgggaaacgatctggccaagactggcagccacagatggttcaccaatgcccagcgaattagttcgctcaggtgggcaaggaatcagccggataatgctgggcagaaggagcactgcatccaccttggctatatttacaaggactcgcggaagtttgagctaaacgatagaccctgctcacaggatccaaacagtttgtttaagtatatatgcgaagctcccgaaatggaaaccatttccattgtggtgtggaagtagagtacttcacaaacctcttccatttcagaagtttgactttatagttttgcaatgaaggggaaccaccggaatactattttcttgagcagccataaaataaattaaaaggttttgtatttttctaagataaccactaagcaacccgtaaacttatctcgcacttctgcaaatatatcattgggtataaaa

SEQ ID NO: 42216 - protein, 186 aa, DROSOPHILA
MLKLTVLLITLLVIAKTGWTREKFSIQVNEGNTFGALVKAEPFTKINDGYYFFGTESLNWYEAYEKCRELNSELVTFETDQEFDAVTAFLTANGSRLTYWTSGNDLAKTGSHRWFTNAQRISSLRWARNQPDNAGQKEHCIHLGYIYKDSRKFELNDRPCSQDPNSLFKYICEAPEMETISIVVWK

SEQ ID NO: 42217 - DNA, 3368 bp, DROSOPHILA
ccagccttttcagtgtcaacggaaaacaaatagagcaagcggaataaaatgaatgcctccaaaaattagcaattttaatcagaattctaggggatatcaagtcccataaagcccagagcctctgtgcgaaaaccagagaccactgaaatgctgaagcttacggttctactaattacattgctggtcatagcaaaaactggatggactcgcgaaaagttctccatacaagtaaacgaaggtaatgctatctacgatacatatgtatatataagatgtatattaatgtcttccttacatttgtcactaggaaatacgtttggtgcgctcgtcaaggcggaaccctttaccaaaatcaacgacggatactacttctttggcacggagtccttgaactggtacgaggcctacgagaaatgccgcgaattgaactctgagctggtcacattcgaaacggaccaggagttcgatgccgttacggctttcctgacggccaacggatcacggctgacgtactggacatcgggaaacgatctggccaagactggcagccacagatggttcaccaatgcccagcgaattagttcgctcaggtgggcaaggaatcagccggataatgctgggcagaaggagcactgcatccaccttggctatatttacaaggactcgcggaagtttgagctaaacgatagaccctgctcacaggatccaaacagtttgtttaagtatatatgcgaagctcccgaaatggaaaccatttccattgtggtgtggaagtagagtacttcacaaacctcttccatttcagaagtttgactttatagttttgcaatgaaggggaaccaccggaatactattttcttgagcagccataaaataaattaaaaggttttgtatttttctaagataaccactaagcaacccgtaaacttatctcgcacttctgcaaatatatcattgggtataaaaggcggttatacttgttacattctatgagtaataggaaaaatgctgaagacattggttcaacttttccttgttgtcgccggttttgcaccaggattcggctacgacaagtacaccacacacatacaaaatggtaggatgtcatttgtgttcataaaagcgtgattatatcctgattatgttcaacgtttcaaggaaacccgtacaacttgaccgttgacatgactcccttcattaagatcaacgaaagctactatgtttttggacagactaaggtcaattggtatgtcgcctacgagaactgccgcaggcttcaatccgaactggtgaccttcgaaacagccgaagagtttgacgccattgccgcgttcttgaatgcccgaggagatcgctccgagcactggacctccggcaatgatttgggcaaaaccggcacccactactggttctctaatgcacaactcgtgaccattaagcgttgggcgcccaaacaaccagacaatgctggcggtagggagcattgcatacacttgggctacatctacggctattcaacggagttccaactgaatgatcgaccctgccacaaccacgcgagtagcttgtttaagtacatttgtgaggctccaaagcaggaaactgtatctattgttgtttggaagtagagtatgtgtcaatatatatatatttattgctctactatgtcacatattgtcagtgctataaaagtcttaaactatcagtcaacaacgctatcagccatggctatctgaacaagcaatttccaaactcttagtcagttgcaaactgaagctcgaggaatgatggtcaaacttctcctgctgttcctggtatgctggagtgctcttcctttggagtcatctcccttgggtaaccgatgtaagtactgaagttattacttgaagttattatgaaaataactaatattggtaaggttagatttcgtataagctatatgcagatgcctttaaagtcgttacactgcaatataaaccaatgattcttgttagataacctagagatcggtgaaaagcagtactacatttcgttggcaaagaccaactggttcgaggcaagcaaccactgtcgtcagaatggcggatttcttctcaatttggagagcagagaggaactggagctccttagcccccaccttcacccagcctacagctattggctatccatcaatgacctcggcgaacggggcgtatacgtgtcggaggccactggtctagaggctccgtttcttaactggtccgccggagagccggacaacagcagtggctacgatcgatgtgtcgagctgtggttgtcgacaacctccttccagatgaacgacctcccatgctatagctccgtcgccttcatttgccagcttaactaggatcaaactctggacttccatcaaaacaacttgttttctaaatggttaaaattataaagctgcaatttttcttagctagcaaatactaatcggttgaacttatattatggtacacacttttaccggaaaccattacatctttaaatattgcatgggaagtattggtggaaccaatgatatatacttacatcctggcaggatacccttgctgcgagccgtacgatatggttgcctagcacccggatcgatctttccgtacattgttctatccatggtgtcgaacgagattcacttgcttttcgcactgatttgattgaaacgttaatgattaatcgagaatatgttaagtgacattttatgttccccaaacaggtctgcaggtttggctgacgatgttgcactgcgccaccggcaaaatgttttatttgaattatttataagcgcatttttatttttggcctttcggggctctcgacgacggatttgtcgtttttgtttgcgttgggttagcctgtcagagagtggatattgtagttgtcgtcgtcgaagttgtcgttgtcttcgcccgtctatcagagctttgccccagtccacaaaaaaaagaagaaacaaaaaattgaaagaaactagttccctgcccccgtggaagtccaagtgatttaatgttggaaattgttgtctggagagtgctttgtgcattcgaatttcctctattaattgactgagactgacaaaataccgcattaaaagattaaagggatgtggtgaggtgagagatctatgatctaagctgcatatatgatgaagagctctcaaaaagacgagaaataaatctactggtaatgtaaacattgtctgtcagttcatcagttcatcatgcttcaaacctaagaaataaattacctaaatcaatactcgaaacaaagatatttagttaagtcaatgaaagtccactgtcaaacaagtcaaatgatcttcatctgaagtgattactctactt

SEQ ID NO: 42218 - DNA, 893 bp, DROSOPHILA
gaaaaatgctgaagacattggttcaacttttccttgttgtcgccggttttgcaccaggattcggctacgacaagtacaccacacacatacaaaatggaaacccgtacaacttgaccgttgacatgactcccttcattaagatcaacgaaagctactatgtttttggacagactaaggtcaattggtatgtcgcctacgagaactgccgcaggcttcaatccgaactggtgaccttcgaaacagccgaagagtttgacgccattgccgcgttcttgaatgcccgaggagatcgctccgagcactggacctccggcaatgatttgggcaaaaccggcacccactactggttctctaatgcacaactcgtgaccattaagcgttgggcgcccaaacaaccagacaatgctggcggtagggagcattgcatacacttgggctacatctacggctattcaacggagttccaactgaatgatcgaccctgccacaaccacgcgagtagcttgtttaagtacatttataacctagagatcggtgaaaagcagtactacatttcgttggcaaagaccaactggttcgaggcaagcaaccactgtcgtcagaatggcggatttcttctcaatttggagagcagagaggaactggagctccttagcccccaccttcacccagcctacagctattggctatccatcaatgacctcggcgaacggggcgtatacgtgtcggaggccactggtctagaggctccgtttcttaactggtccgccggagagccggacaacagcagtggctacgatcgatgtgtcgagctgtggttgtcgacaacctccttccagatgaacgacctcccatgctatagctccgtcgccttcatttgccagcttaactag

SEQ ID NO: 42219 - protein, 295 aa, DROSOPHILA
MLKTLVQLFLVVAGFAPGFGYDKYTTHIQNGNPYNLTVDMTPFIKINESYYVFGQTKVNWYVAYENCRRLQSELVTFETAEEFDAIAAFLNARGDRSEHWTSGNDLGKTGTHYWFSNAQLVTIKRWAPKQPDNAGGREHCIHLGYIYGYSTEFQLNDRPCHNHASSLFKYIYNLEIGEKQYYISLAKTNWFEASNHCRQNGGFLLNLESREELELLSPHLHPAYSYWLSINDLGERGVYVSEATGLEAPFLNWSAGEPDNSSGYDRCVELWLSTTSFQMNDLPCYSSVAFICQLN

SEQ ID NO: 42220 - DNA, 3695 bp, DROSOPHILA
gacgtactccggtacctgaggccactgtgccaaggggccgccgagagccgcaggattcgggctctgaagttggaccatgccaagtggtcggcggagatagtgggcactgtgggccaggtggttccatcgctgctatttctggacatgcgtcactgcgatgtgcgagactaccagatagcacagctcttgcaatcggcagataagctaaaggcactcgctctactccacattgacaatcagacgggtgattcctatctgcagccgcaactactcaacagattgccatcgctgaagctcattcacctaaccaccttgggttccatgggctttaaccccgaaaacctgacacggctgtgcccgaacctgagcttcctcgtcagtgacctaatcaagggagattttaagatatatggcccgcctgcctacatacagaactactacaagtgctataatgagtacttcaagaccgcctgagtacatgtggcacagtttgcagagatctcagtggaattggattctatatttgatatgaactcactctttttgtaaatatttttgtcttttactatgcaagagattgcaattgcatttaaaatacacactcaaacaaatgtacaaccgaaaagctcttcttttcgacagaattcaatttctcgtttgcactaatttgagttaataaaagtagataattgaatacaatttgacttaagttttaaatttccgttagagagaatactgcttagtttaaactgcttgctttcgcacagataagctgggcaacatactttgcttaatgcaagcataccaccacataaatatgttagcaggataacttaataacacagcgctgttcaatttgttagcatttttaatttaatttaagcaaataaatttaccttaatacgatatttgacaattggtttgcaagtgtaaaggcggtatttttcgtatcgctttaagtctggtattttacacatcgcgcactgcgatagtatcgctgacaaatattttgtgccggcatgcaattcagaaataaaaaactggtgaaatagctcataaatataaatagcttaagaagcgattggctggcaaagagaacgaccggagagtcaggatggtggtgcgtccgtacaacgatgagctccggtacctggagaaagtgagcgaccactgctggcgcatcaagaagggcttccagccaaatatgaatgtggaggggtgtttctatgtgaacagccggctggagcgcctgatgctggaggagctgaagaactcctgtcgcccgggcgcagtgggtggcttcctgcctggcgtcaagcagatagccaatgtggccgcgttgccgggcatcgtgggcaggtccattggactgcccgacattcattccggctacggatttgccatcgggaacatggctgctttcgacatgaacgatccgctgtccgttgtaagtcccggcggcgtgggtttcgacatcaactgtggcgtgcgtctgctgcgcacgaatctgtacgagaaggatgtgcagccggtgaaggagcaactggcgcagtccctgttcgatcacatacccgtgggtgtgggctccaagggcatcatacccatgaatgcccgcgatctggaggaggccctcgaaatgggcatggactggtcgctgcgcgagggatacgtgtgggcggaggacaaggagcattgcgaggagtacggccgcatgctgaacgccgatcccgccaaggtgagcatgcgggccaagaagcgagggctgccccagctgggcactctgggtgcgggcaatcactacgccgagatccaggtggtggacgaaatctacgacaagtggagcgcctccaagatgggcatcgaggagaagggccaggtggtggtgatgattcactcgggcagtcgtggcttcggccaccaggtcgctaccgacgccctggtccagatggagaaggccatgaagcgggacaagatcgagaccaatgaccggcagctggcctgcgccaggatcaattcggtggagggacaggactacttgaaggccatggcggcggctgcgaactttgcctgggtgaatcgcagctccatgacattcctcacccgtcaagcgtttgccaagatgtttaacaccacacccgatgatctcgacatgcacgttatctatgacgtttcgcacaatattgccaaggtggagaaccacatggtggacggcaaggagcggaagctgttggttcaccggaagggctccacgcgcgccttcccgccacaccatcccctgatcccagtggactatcagcttaccgggcagccagtcctcgtcggtggaaccatgggcacttgcagttacgtgctaactggaacggagcagggcatgcaggagacgttcggtagcacttgccacggagcggtgagtaaccaaatcccgtttcttcctgttcgccagactaaaacctccttgaatctttagggtcgtgcactatctcgagccaaatcccggcgcaatctggactacaaggatgtgctggacaagctggaccagttgggcatcgccatacgcgtggcctcgcccaaactggtcatggaggaggcacccgaatcttacaaggacgtgaccgatgtggtcgacacctgtcacgcagctggcatcagcaaaaagtgcatcaagatgcgcccaattgcagttatcaagggctaagtctaatttattattgtgattaagtcaataaacatttggtccgatggctgtcaatttagttaataacgaattaaaatttttatagaatttgttaagaggttttcgtttttttattcaaagttaacagttatgtagttaagctgttaagtgagctgtggtcaccccacactggcgctctgttaacggcgagcttagcattatgttaggccaaaggcccggtctgttagttgtcagctgactgccaatccaattggacctgctgcacggcgcgaattttgattgagctgcccatttcgatttatttaaacgaaaaaaaacgaattatattcgttgttaacaacacgccgtgtgcaattctgtatgtgcgcctgctaatcgctcgggaatcgtgagtgcaattaagccgaaaactcactgcagccggcagtcaaccaagctgcgcagtaggaaaaggccaaagaaatctagccactgctgttgccgccggacttaactgcaagaacaaacaaacgcaggcactatgacgaacatgcggccgccgcagaagtccaagctgctgaaggtcgtcatactgggcgacggaggcgttggcaagtccgccctgctcacccgattcgtcgccaatcgctacgaggagaacaacttccacaccatcggcgtggagttcatgaacaaggacatagtcgtcgacggggagcgctacactctgcaggtgaagactacgactatgactattatgcaatccaactactgactaggagtaatagtaataccgatattgcggcaaggccgtagaacttttgcaattcttatggtgaatgcaacagttggccaagcgtatttccttcaagtgtatttcacttaaacactaaccccctccccccccccccaaacggatctatcccaccgtcgcatggttgtgcccgatccaccggcattttgttgatgcaaacacttagaaactacacaacgattaagccttgttttccattcccttaca

SEQ ID NO: 42221 - DNA, 1635 bp, DROSOPHILA
acaaatattttgtgccggcatgcaattcagaaataaaaaactggtgaaatagctcataaatataaatagcttaagaagcgattggctggcaaagagaacgaccggagagtcaggatggtggtgcgtccgtacaacgatgagctccggtacctggagaaagtgagcgaccactgctggcgcatcaagaagggcttccagccaaatatgaatgtggaggggtgtttctatgtgaacagccggctggagcgcctgatgctggaggagctgaagaactcctgtcgcccgggcgcagtgggtggcttcctgcctggcgtcaagcagatagccaatgtggccgcgttgccgggcatcgtgggcaggtccattggactgcccgacattcattccggctacggatttgccatcgggaacatggctgctttcgacatgaacgatccgctgtccgttgtaagtcccggcggcgtgggtttcgacatcaactgtggcgtgcgtctgctgcgcacgaatctgtacgagaaggatgtgcagccggtgaaggagcaactggcgcagtccctgttcgatcacatacccgtgggtgtgggctccaagggcatcatacccatgaatgcccgcgatctggaggaggccctcgaaatgggcatggactggtcgctgcgcgagggatacgtgtgggcggaggacaaggagcattgcgaggagtacggccgcatgctgaacgccgatcccgccaaggtgagcatgcgggccaagaagcgagggctgccccagctgggcactctgggtgcgggcaatcactacgccgagatccaggtggtggacgaaatctacgacaagtggagcgcctccaagatgggcatcgaggagaagggccaggtggtggtgatgattcactcgggcagtcgtggcttcggccaccaggtcgctaccgacgccctggtccagatggagaaggccatgaagcgggacaagatcgagaccaatgaccggcagctggcctgcgccaggatcaattcggtggagggacaggactacttgaaggccatggcggcggctgcgaactttgcctgggtgaatcgcagctccatgacattcctcacccgtcaagcgtttgccaagatgtttaacaccacacccgatgatctcgacatgcacgttatctatgacgtttcgcacaatattgccaaggtggagaaccacatggtggacggcaaggagcggaagctgttggttcaccggaagggctccacgcgcgccttcccgccacaccatcccctgatcccagtggactatcagcttaccgggcagccagtcctcgtcggtggaaccatgggcacttgcagttacgtgctaactggaacggagcagggcatgcaggagacgttcggtagcacttgccacggagcgggtcgtgcactatctcgagccaaatcccggcgcaatctggactacaaggatgtgctggacaagctggaccagttgggcatcgccatacgcgtggcctcgcccaaactggtcatggaggaggcacccgaatcttacaaggacgtgaccgatgtggtcgacacctgtcacgcagctggcatcagcaaaaagtgcatcaagatgcgcccaattgcagttatcaagggctaa

SEQ ID NO: 42222 - protein, 506 aa, DROSOPHILA
MVVRPYNDELRYLEKVSDHCWRIKKGFQPNMNVEGCFYVNSRLERLMLEELKNSCRPGAVGGFLPGVKQIANVAALPGIVGRSIGLPDIHSGYGFAIGNMAAFDMNDPLSVVSPGGVGFDINCGVRLLRTNLYEKDVQPVKEQLAQSLFDHIPVGVGSKGIIPMNARDLEEALEMGMDWSLREGYVWAEDKEHCEEYGRMLNADPAKVSMRAKKRGLPQLGTLGAGNHYAEIQVVDEIYDKWSASKMGIEEKGQVVVMIHSGSRGFGHQVATDALVQMEKAMKRDKIETNDRQLACARINSVEGQDYLKAMAAAANFAWVNRSSMTFLTRQAFAKMFNTTPDDLDMHVIYDVSHNIAKVENHMVDGKERKLLVHRKGSTRAFPPHHPLIPVDYQLTGQPVLVGGTMGTCSYVLTGTEQGMQETFGSTCHGAGRALSRAKSRRNLDYKDVLDKLDQLGIAIRVASPKLVMEEAPESYKDVTDVVDTCHAAGISKKCIKMRPIAVIKG

SEQ ID NO: 42223 - DNA, 4493 bp, DROSOPHILA
gagcggaagctgttggttcaccggaagggctccacgcgcgccttcccgccacaccatcccctgatcccagtggactatcagcttaccgggcagccagtcctcgtcggtggaaccatgggcacttgcagttacgtgctaactggaacggagcagggcatgcaggagacgttcggtagcacttgccacggagcggtgagtaaccaaatcccgtttcttcctgttcgccagactaaaacctccttgaatctttagggtcgtgcactatctcgagccaaatcccggcgcaatctggactacaaggatgtgctggacaagctggaccagttgggcatcgccatacgcgtggcctcgcccaaactggtcatggaggaggcacccgaatcttacaaggacgtgaccgatgtggtcgacacctgtcacgcagctggcatcagcaaaaagtgcatcaagatgcgcccaattgcagttatcaagggctaagtctaatttattattgtgattaagtcaataaacatttggtccgatggctgtcaatttagttaataacgaattaaaatttttatagaatttgttaagaggttttcgtttttttattcaaagttaacagttatgtagttaagctgttaagtgagctgtggtcaccccacactggcgctctgttaacggcgagcttagcattatgttaggccaaaggcccggtctgttagttgtcagctgactgccaatccaattggacctgctgcacggcgcgaattttgattgagctgcccatttcgatttatttaaacgaaaaaaaacgaattatattcgttgttaacaacacgccgtgtgcaattctgtatgtgcgcctgctaatcgctcgggaatcgtgagtgcaattaagccgaaaactcactgcagccggcagtcaaccaagctgcgcagtaggaaaaggccaaagaaatctagccactgctgttgccgccggacttaactgcaagaacaaacaaacgcaggcactatgacgaacatgcggccgccgcagaagtccaagctgctgaaggtcgtcatactgggcgacggaggcgttggcaagtccgccctgctcacccgattcgtcgccaatcgctacgaggagaacaacttccacaccatcggcgtggagttcatgaacaaggacatagtcgtcgacggggagcgctacactctgcaggtgaagactacgactatgactattatgcaatccaactactgactaggagtaatagtaataccgatattgcggcaaggccgtagaacttttgcaattcttatggtgaatgcaacagttggccaagcgtatttccttcaagtgtatttcacttaaacactaaccccctccccccccccccaaacggatctatcccaccgtcgcatggttgtgcccgatccaccggcattttgttgatgcaaacacttagaaactacacaacgattaagccttgttttccattcccttacattcgcggcacagtggaactttagtaagttaaacagggtaaaaacagaagtgctaacaaattaaaccatttaaacaaggaaacattgactatacattccttgaaccatttgaaacactcgtataccagagaaaagtattatcttactgacacgtttttgagtcttgcatttgaaattaagaaaaaaatatgtgcaatcaattaattacgtagttttttccactgtagctgtacctacattatgggggtatctgttccatctgccccatccccactcacacacacacatatatgaacattagatttctactcaattagcgttgagaacggaatggcattgcagaaacaaaaaactgaaataataacaataatgacagtttcgccattcggcaaacaagtgagagactttgtttcatccgccgacgcggtttcccccgctccatctcatccgcatcgcagttgttttccattttccattcggactgttgtcttcaaaagtatcgaactaaatgattttcacagttcgccaagctcggaaaactcatgaatatgcagcgcgtctcagtgagtaagcaaaatgcagccaaggtgtcgcaaatcggaataataattctaattggaccagcagatacattataaagtaggaagtagcgaatgtggactgattgatatacatatgactaatccgacgggaatctcgcatagtttgctggttcacagttcgctgggcacaggaagaacttggccaaaagcggatttcccagtgctgcaaaaaatcgtggaatcactggggtgttttttgcactacctatatacatatgtacatatgtatggagtcacttagttaccatgggcagtactcacaccctaaaagggttattccacccatgtgtttggaggccaaaggtgtttatattagataaagaagtttaaagtatccattgttagagctaaaagtataacctcatgttcgaaagtataaaataaataaaagtataaaataaatatttaaagtatgtatgctactcgaaaattcagattcaacgaactatttcctgagctaattgcttatcaccacctcgttatcagttcaaaactaaatatttaattaacacacaagaaatgacagtaaatgtgttgatataagtgagtcagtcaggcatgcaaacactccataggttttcaaacggcgaaagtgtttgtttctcagtgagtttgcttctaatcgaatgcaaatttcaattgagcgccatttgaatcgccaattcaatcaaacttaattgatgcattgccttaattggaatttccccaaactagatatgggacaccgctggccaggagcgattccgggctctacgcaccccgttctacagaggatcggacatctgtctgctctgctacgcactcgacgaccgggacagcttgaagggattgggtgtgtggcgcaatgagttcctcaactacgcagatgtggaccaggacaagtttccattcatcgtggtgggaaataaggtgagccatgcttgcagaacgttcatcttgagtttaaaaggttaattgcttccaattgtagaacgacattccggcgcagaagcgacaggtgagctccgacgcagtgcagcagtggtgcgcggagcagaaggtggcctgccacatcgagacgtcatcgaaggcggccaccaatgtgacggatgcgttcgtccttggccttcgccagtggcggcacatggagtgcgtggccgaggcggaactgcgccagcacggcgacaccattgacctcacccgccccattcgcctggtgcagcggcgcatctgttgcacaggcggaggaggcggtggcggcggcgtagggcaggacgcggatggcgatgatgccgccatgcacagtccgggcaagaaagtgttcggccagaagcgcaacgccagcaaggcgccagccaccaattatcggctatgagcagacagacaggagctgtcaggaaacttacgcttaatttaaccactcaccccgccgggttgaccttcagattcaatgcattccagtccgcggaggggcaggagcttcagaccgaaaggcaacccatccacccaatgttgatggctgtagagagtggattgcctcgttgtggttgatattctaagggaactatgcttcacagcgagctaactatgagctagcttctatgtcaagaataggatctccatttttacttgctatgctttaatattatcttactaagttattattttgttatgttaccgtatcgaatatatgcggtatgaaatactcttataacaatcgtatataagctttaccataaccaagtgtcttgcttgaggaaagcaagctttaggtgtctaatgtactacgcataaggcaatcagaatgtaatcactacattttttccttatatattgcataatttcggagtgccttaagtgtgtttatctgatgtgaaagctgggaacaaacgaataaatatgaataccgcacgtgtttgtttacaaagtatgtttatattttaacaattggtttaatgtacaatagtaaaatgatataaatacgcttaccccggattaaaataatatgcatgtaggtataacacttcttctggctgcgatcgacactccgatcctggttaagactaaggcaaactctaggcgctactcactaacaggacaagcgtatggtagatcgagtgcttaactataacgctccacgtgggcttaatgtgaagacgtgtggaaacgagtggagttgattatcacgagcagcaccaggccggtggccacagatcacttcttcttgtagccgtacgagttgatggtgtcgaactcggtgtcgcacttgagcagcagctggtaccactggtcgctgtcgatgcggctggcctcccggaatcctccgtaggcggctggcaggcacttgggcgacatgtatttgtgcagggactcgcgatcggtgccatggaagatgatcctgctgcgcagcttctccttgaggaagggcttgaa

SEQ ID NO: 42224 - DNA, 829 bp, DROSOPHILA
atgacgaacatgcggccgccgcagaagtccaagctgctgaaggtcgtcatactgggcgacggaggcgttggcaagtccgccctgctcacccgattcgtcgccaatcgctacgaggagaacaacttccacaccatcggcgtggagttcatgaacaaggacatagtcgtcgacggggagcgctacactctgcagatatgggacaccgctggccaggagcgattccgggctctacgcaccccgttctacagaggatcggacatctgtctgctctgctacgcactcgacgaccgggacagcttgaagggattgggtgtgtggcgcaatgagttcctcaactacgcagatgtggaccaggacaagtttccattcatcgtggtgggaaataagaacgacattccggcgcagaagcgacaggtgagctccgacgcagtgcagcagtggtgcgcggagcagaaggtggcctgccacatcgagacgtcatcgaaggcggccaccaatgtgacggatgcgttcgtccttggccttcgccagtggcggcacatggagtgcgtggccgaggcggaactgcgccagcacggcgacaccattgacctcacccgccccattcgcctggtgcagcggcgcatctgttgcacaggcggaggaggcggtggcggcggcgtagggcaggacgcggatggcgatgatgccgccatgcacagtccgggcaagaaagtgttcggccagaagcgcaacgccagcaaggcgccagccaccaattatcggctatgagcagacagacaggagctgtcaggaaacttacgcttaatttaaccactcaccccgccgg

SEQ ID NO: 42225 - protein, 256 aa, DROSOPHILA
MTNMRPPQKSKLLKVVILGDGGVGKSALLTRFVANRYEENNFHTIGVEFMNKDIVVDGERYTLQIWDTAGQERFRALRTPFYRGSDICLLCYALDDRDSLKGLGVWRNEFLNYADVDQDKFPFIVVGNKNDIPAQKRQVSSDAVQQWCAEQKVACHIETSSKAATNVTDAFVLGLRQWRHMECVAEAELRQHGDTIDLTRPIRLVQRRICCTGGGGGGGGVGQDADGDDAAMHSPGKKVFGQKRNASKAPATNYRL

SEQ ID NO: 42226 - DNA, 7277 bp, DROSOPHILA
ctggctaagatatttttatggtccctagcgctacacactcagaaatgcactcttaaaaagaaaagcactctatatgtatatatatatacaaatgtatatatgagatccaattactcaccttgtttgaattgaaaatcggctaatccacaaatagttggctggtacagtggaaatccttcggaactcccgttcgactccgatatatgtacctagtgagcttgggtcgcgtttgaagactgaaaatacaaagctgcttgtcaaatcgttttatagccgccccttttatgcactgcgtgcattgcacatatgtattgtacgacaaagttatagttatcaagatatatacataggtcggtcggaatagtcgggcactcgtaaggccagcgcgacttaataggtcattataagcgaccgattcgagttaagagctctaaagatcacgtcgcgaatcgccgcatgggatcttcttttttttttttggcttgttttgcataagttcacctgaaaatggttcactgagctcagcattaattttatgttatttccattgtttttagtacgttaaagtgccaagacaagtgcggtatttctcacggtgcagcgcactcaatcgattttccacagcaattaacattattaaatataatgttgcagaaggtacactgaaagtaagtgagtactacaaaattcaagaactttcttcactttgtgtgcacttttagaaatgttcttgacttaaaacaatatagttattattattattattgaaaaaatccgtactttctatcaggaaatccactttgctatattttgtaactatatacactttgtaacttgtactgtttagcactttcgagaaattctcatctgccacttgcgaaaagtccacttcctatatttgttctagaatgtaaacgaaggaatattttcatttctcgtcgcaaaatacgaaatttttaagttagctatatagcatcggggcactttcgcaatcgcggcacagctttatatatgtatatatatttatattaagtgcgtgttctgagcgtttcgcacagtgtatcgtggttaatcttctgatggttacgcgacttggatgcaattagacttgaacttttgaacgctccgtacacgagtagtttaaagactaatcgccttcgccactgtgactgagtgaaaaacgagtttgtaatccctcttacggatcgtaagtgtgtaagttattgctttggctatcactcctcccgttcgacacaacagtaactttctgcttttctgccggacactagctaatgtaccttctttcgactggcgtgtccgcgttccacgatcaagtgatcaactgactgacgggggctgtgggtaattcgagctcatttgcttttagtttcaagcacgagcaattaattaagtatttcactgctcgccgtttccaaatgtatttccatgccatttcttgcgcttgcctgagcccattctgcgtgtcggaccgccattccgccatttagccattcggtcattccgtcctccagtcagacgatcaccttcgagcacggagctacgtcagcctttaaagtccggcggaatttcgttgggcagccaagtgcaattagctaagtcgaagtacagaacgctgaaagttaaaagtaacccactgatggcattaatcaatttacgaacacgcaatcccagcgacagctgttgatacgcacagcgcgcttcacatggacatacagacagacagacggacagacactccattatctattaggtatttacatgcatttaatttgaatgtcaaattcagatttatggcctagcctatgagagttacaaacaatgagagtcgattacatatgaatttacacctatttctagttctacgtatgcatatcgattcaattcatccattcattccgttgtattgtcgagtataaaacgtacatttgactaatcatatagagatattgtgcagacaattgttgctagatattgcttacgatgaactacaaaagcgttctcgcctgttttatacgtttaaagcttagactacgtacaaaaggtttgggttagtaatatgtcaacgatattcaatgctaaagtcttaggtagcgcttaagtgtacggatgagttactcttaagtacagatcaaatctatgcgaaggagaattacgtatttacaatacaattgtcggagactcctggttagatcactggagtcggccgaatcctcgctctgcgactccgtcgcctcctctgcaatcatttgggccgaatcttctcgtacatgaatttctgcacgtgcttgttgtccggctgcatgagcttcttcttgttgaactcgaattgggccagcgcgaaatcgtacagatcgttttccatttgccagatttttgtcttttgaatggatttaattgtcgattcgctgggcggaagcttggaagatgtcacccgcagatgagatttgtttgaattatgatagtgctcacgaaagccgtgaaaaattctgcaaaagaaaaaaaaagaacaggtcaatgaagcaactggagtattctaaaacagacaataacatatggttgggaggcacaccttggaagggatctctcgagcagatccacaaactcgtacatctgctctgtgactccgactaggaagtattcgttgactagattgcgcttggcctggtccaaggcccaactgctgccgggttcccagcactcggctgcatggccacagaagaagggtatctgcagccacatgtttttgggatcacagtcgggttgtttctgcaccacgcactcatcgaaggtctgcaaagatgtgtgagggctttggttacagggaggttaataccttgatgctctacctacaattttattgcccgccttcttgcggactaaattcggtcggtagttgtcgccaaagcgtagaaagtaatagtaggagacaagtctgtcgagcggtttgcgcaccaaattgatgtagatgggcttgtgggcgatttggaatctgcaaaggagtaatgcaattgagacgggctctgctggattggctagatgttacctactttgagaagtctaggaaggccatgtggccgtgataaagagctggcttcatctcgtgccacctggaaacattgcgcacgaattggatttgattgggaagcgagaggacgtgcatgttggcagtgacattgatgtgcagcacatggaatttattgggcttgcacagatcgtatgctatgttaacaaagctggtggatcccgttttcggtacgcgattgtaaagcaccactaggtgctcctcgaagtcaaagtcatcggtggtggacgaggcatgctgatctgggctcagagaatcgcccagcttggaaagcggcttgaaggctgcacaaagtaggtaatgggtgtaaaagtgatatggttttgcctaactaccggactccacttaccatgttccaggcgaatctctgaccaaagcaaccagtaacctgcacaggtgaccgcgcacagggctatcaggatcagccagtgggtgggtcggagcagaatccacatcttaagcagtttcctaaacatgcctcgtgtcggtttgccctacaggtcagcacggtagctcatatcagcgtatttatttcagcataatctcaggtcgttgttttccttgttttttttctgcaaccaacatcgagcagtgttggtcagcagctgctggacagtgctgcaaggcactgaaatctggtgaatctgtgggaatgtgcagctgtagctgagatgactaaattagtgatggaaaatagctcaaaatgctagctcggataattgcatttaatttccagctaggaatccgtaaattaattgccttatatttataacttcaataaatatgtttttcctaaaacacaacacagaatattttaggccagtcacaaccagatctgcatcacccttcagcaacccttttgccttgagcatcactgtttttattagtgtgaccacccttgccggcaaataataccaagcaatgccaaaattctagcgcccatttttgcgaggttaaaataaatttcgcaagccggctgcaatcgcaaagtacagtgcgacttatatacactcgtataaaataattccatttaaaagcaagcatgtccacctttaacttcgccagcatggccgcccaactgggccaggagcagggaatatcattcgagaacaaggtgctttcctggaacacagctgccgatggtaagtttgggtgacgctttgggtactccatgcagtggctatattgaggctttttacagtccaggatgtggtggatgcccttaacaaacagaccaccgtgcactatctgaatctggacgggaacacactgggcgttgaggccgccaaggcgattggtgagggtctgaagcgtcatccagagtttcggaaggcgctgtggaagaacatgtttactggtcgtctcatatcggagattccggaggcactcaagcacctgggagccgcgctaattgtcgcgggcgccaaactgacagtcctggatctcagcgacaatgccttaggaccgaatggcatgcgaggcttagaggagttactgcgatccccggtctgctactcgctgcaggagctgctgctgtgcaattgtggccttggtcccgagggcggtagtatgctgtcccgggctctgatcgatctgcatgccaatgccaacaaggcgggcttcccgctccagctgcgtgtgttcataggttcgcgcaatcgtctcgaggatgccggtgctacggaaatggcaaccgcattccaaaccctcaagaccttcgaggagattgttctggagcaaaactccatttacatcgaaggcgtcgaggcccttgccgaatccttcaagcataatcctcatctacgagtgctaaacatgaacgacaatactctaaagtccgagggagctgaaaaaatagctgaggctcttcccttcttgccactgtgagtcggttataaagtttttgatgagggagagtgagtgagtgttatgtgatatctttttgctttgcaggctgcgtgaaatgagctttggagactgcctgatcaaaactaatggcgcctaccacttcggtgaggctctggagagaggaaacgaacgactggaagttatcgacttaggttttaacgaaatcaacagcgacggcggcttggtgttggtgaatgctatgggaaacaagcccaagctacgcatcttgaatctagatggcaatagctttggagaagaaggcagcgagaagataatcagcgagatgagtaagttgccaactgctgccgcactgcaaccgtttcagcaccaggaagaggaggatttggaagatgaataccaggctgacaagcaggacgcagattacgaagaggaagaggaagtacacgagcacgccaacgatactaccgaagaagcagatgaggatagcgagggcgacgaggacgacgaggaagacgagggagacgaggagtacagcaacgtcgcggaggagactgcctatgtcactacgaatgcctacacgaccaaggttagtttatacttcggagtactgtgcaaatggtaacagcaattaatcgaattatctttaattttaaattttcacagctttttaacgacacaaccaactcgatggccagcgaaacttttgcggtcgcgaacaagacgatcagccaaaaatgcactccagagaagttctgtttgagccagaaaccctgctcccaggaagatttcgattcgctagatatggataacaaacttgaggctttgcagtcgattgtcaacgtaagatattctcaataattagaatgcaattagagtaacgtaacatttttgtacagcaattcaccggcgacaaccatttgctactgctcgtcttcaccaccttgaagtgcgcgcatttgtcgcaatcctcgaaagctgcgttggatctggccgtctccttgtaccaggccacctttgactatgccatcaagacaaagcaggagacacgtgtactcaactatgtactgatgcagctccgtttgttgccctgcaaggaggtattccattcggactacgatgtcaagaactgtcgatttgctcttcgcgaggctctcaagcaaccaacgtttgccaacgacaacattaagaattcctttaagactttcctggagggtgcggagtcgtaaagagaattagagaagagattacctttatttcccactttccgatttgtgtagctttcgcgaataaaaacgtattattcctaacccgtagtggtgttttttttttacccaaaaaaccaatcgaaatttaatgtattagccattcggcaaaagtgatttatttacatgaagaaaactcgtatgagactacaaactatctttatggaacatgttaatacatcgatattacgtttgtaaattcctcttggtggctttcttgctgctctggaacagaatcagctacagtgaacgaatgtagcgaagtgtttatctatagttaataaaaacacgaattataaaacattgacgttaacatcgaggagaacattgaaagattataaaataacgaacgatcgtggcgagcaagtccgcaaaaaaaagtgcctcctcgagattctcgatgcggataatgctgattctaagagtccatcttctatcaatatcctgtgtggaaatgtgttccttaacaattaaaatcagaatcatcatcatcatcttcatcaatctcgatatcatcatcatcgctttcaattacagctcgcctcttcttgggcggagctttctttttggctcctccactgctctcatcctctcgtccacgcttagctggacgcttgggcgaatcatcatcgctggcattgccatcatcatcagagccaacgttgccaccgtcttcctcctcatccgagaagagcgagctgtagtctatcttcttactggcctgtcgacgtccaggacgctctgcacgaggagttacttcctccacgtcatcgtcgctctttttcgcctaaagatgaaaaatattaattgacaattaaatacagatttgggtttaaaaacaaatatgggcaattactgaaacacttaccttggccttgctgaagtcaatcttgctctgcttgagcccgccgccgttctccttcttttggcgcggctttttttctcccggctccttcttgacaaccgccttcttggccttgggtgaggtcttagagccgccctcgaccattgcatcaaattcgtccacctcatcgccgctggca

SEQ ID NO: 42227 - DNA, 2319 bp, DROSOPHILA
cagctttatatatgtatatatatttatattaagtgcgtgttctgagcgtttcgcacagtgtatcgtggttaatcttctgatggttacgcgacttggatgcaattagacttgaacttttgaacgctccgtacacgagtagtttaaagactaatcgccttcgccactgtgactgagtgaaaaacgagtttgtaatccctcttacggatcgtaagtgtaatattttaggccagtcacaaccagatctgcatcacccttcagcaacccttttgccttgagcatcactgtttttattagtgtgaccacccttgccggcaaataataccaagcaatgccaaaattctagcgcccatttttgcgaggttaaaataaatttcgcaagccggctgcaatcgcaaagtacagtgcgacttatatacactcgtataaaataattccatttaaaagcaagcatgtccacctttaacttcgccagcatggccgcccaactgggccaggagcagggaatatcattcgagaacaaggtgctttcctggaacacagctgccgatgtccaggatgtggtggatgcccttaacaaacagaccaccgtgcactatctgaatctggacgggaacacactgggcgttgaggccgccaaggcgattggtgagggtctgaagcgtcatccagagtttcggaaggcgctgtggaagaacatgtttactggtcgtctcatatcggagattccggaggcactcaagcacctgggagccgcgctaattgtcgcgggcgccaaactgacagtcctggatctcagcgacaatgccttaggaccgaatggcatgcgaggcttagaggagttactgcgatccccggtctgctactcgctgcaggagctgctgctgtgcaattgtggccttggtcccgagggcggtagtatgctgtcccgggctctgatcgatctgcatgccaatgccaacaaggcgggcttcccgctccagctgcgtgtgttcataggttcgcgcaatcgtctcgaggatgccggtgctacggaaatggcaaccgcattccaaaccctcaagaccttcgaggagattgttctggagcaaaactccatttacatcgaaggcgtcgaggcccttgccgaatccttcaagcataatcctcatctacgagtgctaaacatgaacgacaatactctaaagtccgagggagctgaaaaaatagctgaggctcttcccttcttgccactgctgcgtgaaatgagctttggagactgcctgatcaaaactaatggcgcctaccacttcggtgaggctctggagagaggaaacgaacgactggaagttatcgacttaggttttaacgaaatcaacagcgacggcggcttggtgttggtgaatgctatgggaaacaagcccaagctacgcatcttgaatctagatggcaatagctttggagaagaaggcagcgagaagataatcagcgagatgagtaagttgccaactgctgccgcactgcaaccgtttcagcaccaggaagaggaggatttggaagatgaataccaggctgacaagcaggacgcagattacgaagaggaagaggaagtacacgagcacgccaacgatactaccgaagaagcagatgaggatagcgagggcgacgaggacgacgaggaagacgagggagacgaggagtacagcaacgtcgcggaggagactgcctatgtcactacgaatgcctacacgaccaagctttttaacgacacaaccaactcgatggccagcgaaacttttgcggtcgcgaacaagacgatcagccaaaaatgcactccagagaagttctgtttgagccagaaaccctgctcccaggaagatttcgattcgctagatatggataacaaacttgaggctttgcagtcgattgtcaaccaattcaccggcgacaaccatttgctactgctcgtcttcaccaccttgaagtgcgcgcatttgtcgcaatcctcgaaagctgcgttggatctggccgtctccttgtaccaggccacctttgactatgccatcaagacaaagcaggagacacgtgtactcaactatgtactgatgcagctccgtttgttgccctgcaaggaggtattccattcggactacgatgtcaagaactgtcgatttgctcttcgcgaggctctcaagcaaccaacgtttgccaacgacaacattaagaattcctttaagactttcctggagggtgcggagtcgtaaagagaattagagaagagattacctttatttcccactttccgatttgtgtagctttcgcgaataaaaacgtattattcct

SEQ ID NO: 42228 - protein, 596 aa, DROSOPHILA
MSTFNFASMAAQLGQEQGISFENKVLSWNTAADVQDVVDALNKQTTVHYLNLDGNTLGVEAAKAIGEGLKRHPEFRKALWKNMFTGRLISEIPEALKHLGAALIVAGAKLTVLDLSDNALGPNGMRGLEELLRSPVCYSLQELLLCNCGLGPEGGSMLSRALIDLHANANKAGFPLQLRVFIGSRNRLEDAGATEMATAFQTLKTFEEIVLEQNSIYIEGVEALAESFKHNPHLRVLNMNDNTLKSEGAEKIAEALPFLPLLREMSFGDCLIKTNGAYHFGEALERGNERLEVIDLGFNEINSDGGLVLVNAMGNKPKLRILNLDGNSFGEEGSEKIISEMSKLPTAAALQPFQHQEEEDLEDEYQADKQDADYEEEEEVHEHANDTTEEADEDSEGDEDDEEDEGDEEYSNVAEETAYVTTNAYTTKLFNDTTNSMASETFAVANKTISQKCTPEKFCLSQKPCSQEDFDSLDMDNKLEALQSIVNQFTGDNHLLLLVFTTLKCAHLSQSSKAALDLAVSLYQATFDYAIKTKQETRVLNYVLMQLRLLPCKEVFHSDYDVKNCRFALREALKQPTFANDNIKNSFKTFLEGAES

SEQ ID NO: 42229 - DNA, 4729 bp, DROSOPHILA
aatgcaaattatcaaaaatttaagacaaagtaaaaccattaagaaatttatcctttcatatgcttagtattgtatcccacatcaatgtgatatacagcaattacttaaaatgaaatgaaatgaaaaattgctgctaaagttgcatttgtgcaattaaatttcgcaccgttgaagtgaagattgcttttcaattaaccacctggtaatatgaatattccaaagccaagaccatggctacaagagaactggttttctttctgccattttgcctgaccttgcccaacacgacgtcataaaggggcatgtccctccccatcccgttgcgattttcattccggctcagaaacatgttttgaatagtgcaaacaaaatataaagattctggattcatccgagttactcggaatttctgcttgggtaatggagaacccttcacgcagtgacgtcaccggagctcattgaacttgcacagcatcgaatatcgtccagaaatattctctactcctccaaatctgttgattctcgtttgacaagcatcagcaaagatctctcaatatgcggagtgcagtttgtaccctgccaaattgggaatttcagctgatgcatgggaaaattgtgaactagcggagttaagtgcagtttattccaggatactattagcaagttgaacaagatgtgagctaaaactcctaagatttggtaagataaaaagataaacataagtactacaattagcaattagtttcttttttttttttttgaataaattgtatgtatatgtattgttaatcaacaaattttacttaattgcgtttttaagggtgtttgcatcgtcgtttcatcgagctggctctccctattttcagatgctggtttctcgttctcgcatactggtttatagtcataagtgctgcgctttttctcgactttttccattgagacttgtgttcataaaatcttctgttctaagcgatccccagctcagtttcattccaagcttctgcgatgccacttgtgtgcgatcttcgttaagtcggattccccgtactgcaagctggaaaaaatagaaaccgtgaccagaaacagtaaccgccactcggattggattattacctggtaatgaaagtgaagaccccgagctaatggggcgatttaaacaggtgtttaaaggtgcaggtggggctgtgaaataatcgcttattatcaaacaccctaatggggggcactattattgtgattatcttgggattatcaaatccatgtagacaattaacgacaacaatggcgagttcattaacacttgaaccgaactacgagtatgtatgtgctgggacttaagcactgcaatcaggcgtacttaaaagtgcataatgtgtaattagttggaatttgttgaatatgattaaatattgacccaggcactttgcacggccaccacgtgtgaaatttgtgtgtgctgcactttgagatcgcggtggcatcatctcacagtatctgccaaatacgcgtcgaactcacacaacgctgcaccgcacagaccccaagcgacccgattagccattggcgaactgggaacgcggcggataatgccttatcaggcagtggctcctctacaatcgcggggttcactgggggcaagtttgggtctggctctgcgttttggggtgtagggataggaattgggaaatccggccaaggccaggtcgaggtacacctaacaagagcacatattttggggctgatgctgaacactatgcaattccaagattaagctagcaatgtaacaatcggtactaacccccaattagtatatatttatattatatatatatatattattatattatattaatatattttaaatgattttaaaaattttaatgatttcattttgcatacattgttttgaaagtgtacctacctaatgtattgattgctggaaacaaccaacccaaaggcaatgtttctaaaaactaagtgcagccaaaactgagtaattgcacaacactttacttatactatattgtttataattcttgtggattcccgctccatcaattaagtacagcagattcactaaatttagctcgagctcagtgacacactgttatcactcatcggctgtctccttcgcgctatcgcaatgttcattgttgttcggtttctagttaatatttaatggtcgcatacacactcgtacatgtttagcgacaagtaaaacagcatttcgcctgggactgtcaccacttggcccgattctggttccgatcgggggctcagtttcacacttggagtcgagcggatcacagcccataaatggtaacaacgagaaattcatccagcagtgacatgccaaatctctctgaaatttaaatgtcaatacgggtggcgaaatgttgctaacaacgaaacaatcgggaacagtcatattgcgctattctcaactggatttatttttatttacattttgcgcgagtgaaaagcgcttatcaatgcaccacccccttatggccacattgtatctatagtttgggctttttttagacgaccagcagtggatgccgcaccatgcccaccatcgagcacaagctaaacatcaccgaggaggaggttccggagcacatccgccgacttgcccaggagcagggagagtgtcccagttccaaggataaggtcatcgaacaattccgtaactacatactaggttggttatagtccgttgtctaagaggtacaaaggtattcatctgaacaaaacctctccagaacataatgaatgccaaccacacagaagtgatgcgaagtacctggagaaattcctaagagcccgctactggaaaatcgagaacagttacaaattggtaagaaaacttggggaaatcttcattttagtttgccaacagcaagtgactatttgataattatctattaggtaaatgcaataactcattccctttcagctctgcagttactacaggtttcgggagcagaacaaaagcttttatgagaaggttcgtcctctggacctgagacatgttgggcaatcggacatcctgacagtgactccctatcgggatcaacatggccataggatactcatctaccgattcggactgtggcgacccaatcaagtaaccgtcgacgatatatttcgcgccaccattgtcctgcaggaactgggcagcctggaacccatctcacagattgtcggaggagtgggaatattcgatctgaaggacctgggcttggaacacatactccacctgagtcccagcgtggctcagaagatgattgctctactagtggtaggataactactttttattattttcaatagcttttttaacctacacttggcttgcagacctccatgcccattagaacatccgcccttcatattgtaaatcagaattgggtcttcaacgcggcattcaagatatttaaacctttcctcaacgccgctatgcgagaaaagctatacatccatggcagtgacatgacttccctgcacaaacacatcaacccagaacatcttcccaagcggtaagtaaaatggttttttttttttattaaaataattagtcagatataattaaacttatactatttcagctatggtggcttgcacgaggactactcttatacgctctggttggatatgctgaaggagcagtgttcgggcaatagtatccaaaaggatatggagcaattgggattcatctttgactaggcttcatgccttgtttaaaatgatatgcttgatacttgtatttttgtactacatatatgttaagtaatgataccagaatcaattgaagcaaagtaggtgatattttaaatattaaagaatttcgaaaattacttctacgcaatattactcaccaaacaattcatttgagtttcgttcccaacaatttgaggttagaagcggcataaaccgtaatgcttcatacatttggcggtcacatcaatgacccatcggctatcacgaccaaattcggggcaaaaggcaataataatttgttcctaaccgaatcaaatggcccggctagcccgcaaaacattcgtttcggttaggatgtatagcatattggtcctttgagttttatgcgattcgtatgcaaaatgcgttaggtgctagagcgagacaactggccacacgaccattcgccgttatggtaattgagtgttggacaacgcataaaatgcagtcggtagccataaatatgtttgcactcgtcctgtcaccggatgtgagcgagaggggagatcgagctcgacgaacagaaggagggtgctggagatttcgattcctccatctgaccgttgcgaatatgtttgatattttttattgaatcccgttgtctcaacgctatcctccgacccccggaagtcattgccgtctgcgtaaaaaacggtaaagaattactttctcgacttaaagttactctgtattgtcaattaggtttcatggttaagatttagaaatttatatatggttacacccaaagcttcagagtttagagcatatactatatataaactgaaattaagtatatataattaaatgtttgctttcggttaaaagtatattgcttcacaaatttttttcgtccaagtgcagggtgtccaaagtcagaatcctgccccctctattctccgcaatggccttgcttttccgtttggtcaacgatagtgaaattgatttcggtgctaccgggggtctaggt

SEQ ID NO: 42230 - DNA, 1013 bp, DROSOPHILA
ctgcgatgccacttgtgtgcgatcttcgttaagtcggattccccgtactgcaagctggaaaaaatagaaaccgtgaccagaaacagtaaccgccactcggattggattattacctgacgaccagcagtggatgccgcaccatgcccaccatcgagcacaagctaaacatcaccgaggaggaggttccggagcacatccgccgacttgcccaggagcagggagagtgtcccagttccaaggataaggtcatcgaacaattccgtaactacatactagaacataatgaatgccaaccacacagaagtgatgcgaagtacctggagaaattcctaagagcccgctactggaaaatcgagaacagttacaaattgctctgcagttactacaggtttcgggagcagaacaaaagcttttatgagaaggttcgtcctctggacctgagacatgttgggcaatcggacatcctgacagtgactccctatcgggatcaacatggccataggatactcatctaccgattcggactgtggcgacccaatcaagtaaccgtcgacgatatatttcgcgccaccattgtcctgcaggaactgggcagcctggaacccatctcacagattgtcggaggagtgggaatattcgatctgaaggacctgggcttggaacacatactccacctgagtcccagcgtggctcagaagatgattgctctactagtgacctccatgcccattagaacatccgcccttcatattgtaaatcagaattgggtcttcaacgcggcattcaagatatttaaacctttcctcaacgccgctatgcgagaaaagctatacatccatggcagtgacatgacttccctgcacaaacacatcaacccagaacatcttcccaagcgctatggtggcttgcacgaggactactcttatacgctctggttggatatgctgaaggagcagtgttcgggcaatagtatccaaaaggatatggagcaattgggattcatctttgactag

SEQ ID NO: 42231 - protein, 290 aa, DROSOPHILA
MPTIEHKLNITEEEVPEHIRRLAQEQGECPSSKDKVIEQFRNYILEHNECQPHRSDAKYLEKFLRARYWKIENSYKLLCSYYRFREQNKSFYEKVRPLDLRHVGQSDILTVTPYRDQHGHRILIYRFGLWRPNQVTVDDIFRATIVLQELGSLEPISQIVGGVGIFDLKDLGLEHILHLSPSVAQKMIALLVTSMPIRTSALHIVNQNWVFNAAFKIFKPFLNAAMREKLYIHGSDMTSLHKHINPEHLPKRYGGLHEDYSYTLWLDMLKEQCSGNSIQKDMEQLGFIFD

SEQ ID NO: 42232 - DNA, 3561 bp, DROSOPHILA
actattattaagcgatcttttggtactcacttcaccaccagaacgttgaaggtgccgctgagcacaaagatcagcgacaggaaaacacgatgatccattcgtcggcggaagattcacttgacgggtgcagcgttaattcgatttataaatattgacgttctttgtgcaatttgcaattgtgactgcgcagtgataagtgcaaaaaagtgcggccagacggtcaattgactgcccttccacagatctatataatccacttgagttgttgtggtcattaaccagtaactttacctttttcaaggtcaaaaacctaagtaactagtaatttttttgcaagtagtgcgaattagtttgtctttacgggacttttgtttattttttttcgccaacagtgagaccgcacaggctagcaaaaatactacacaaaatatagtgagcaggaaatcaacaacgaatatggtcacactacaaagcaactggtgggttttaaattggcgcgtgaaattatattttgaaattaaaactgaatcgacaccaaaatgcttatggatttaatattagggaaagtgtcacataaaacttcgttgacgatctttgggactttacaaattgtataaatatttcaacagaaaaatggattacttttgccaagtttttattaaacacaaacttaaaaaatatcacaggatatgaaaaaccatttaaatgaaaatacatgaagtggtgttaatgcatttgccgcacaattgccatcaatttgcttccgttggcgcctgcgtcgcattctgtgctaatttcctgtaaataattcaatattataatatagtataggatcgcaaaatcgatatttagcaaacattagcaagcaaaaacacagttggcaaccaaagcgtgtcctgtcgcctcacctgtactctgtggtgtttctttaagtgttgtgataatgtctttgagtatcttgtgttctatttaagtatcgtttcgtggagtgtaggtgttcctagagctcatctcgcgcctgggaggacgatggcagcgtcacctcctccacggagcccaggtgtatggttctatttggccgactgaactttggtatgtatgcgaccgagtcgctgttgctgaccaccgagttatgtaggtgttccgtgggtgccgcgggatcaggacttgtgagtgtgattttcgaaccagtggccactctgtggaatgcatgtatgtgggcgggtattgtactggtggtgtgacaagtggactaaataattcggataaatattcgaatatcctatgagtacctatctgggccgtaactgattgttgtgtaccaaagttagttatgtatggttagtatagcgctacttggctggtattagattttgggggtatagcaaaaaaactggtcatctctcttgtaccttatgtacagcttttggaggtgattgtagtcgaagaggaaagatctagattggttgaaaagatctattggcgctggcgggctccaccgcgtgctccgcgcaacttttgtgggtttctaatgcagatcagagatcgtaatcagagattcggactcagatccgccaccttacctgtccctggcctgcatgctggcctccacgtccaggttgcgaggctgccggaagtcgcattccagcgagaaggccgaatctccgggtgtgatcagctctgggtcgttttggatcaccacgatgttggtgtagagatcaccatcccggatcgtctggcactggtccagctggaagttcatctccattgtgcgggatccctggctggaagatggcttcatgaagcacggcgcagactgcttgtagaagctgccacgagtgtacatcacacccatgaaaggcttctccgtctccagcaccacgttcatggagtccgctccgcacttgaggttaaccttttgaatgccctggtcgctgccctcgattttaaaggtgtccgaaaggtcttgttcccagatttctgcaatagggcgaaacaatttcatgcttgacattaaaggtggtttatgtaacacgtttctatgctattaagtaaaaatatctgcttcttttgctttttaatgtaatgttgtacgtttagtaaactaggtataattgttccaattaaaaaaatgcaagtaactaaacataaaagcctgcttaagttcttcaactttctttaagcatttatagactataactctccttttcttttgttggccacttttaagtgctttcttcgcgtaagtaaccgttagaaccacctgagcctaccatttctgtgcaccttatccaccgaaccgttgaagttcactcatctctcagatagccggcattgctggtaaccggtttctgtttattttggtctggctagaacagcgcgcagcaaaagaacttggcattgggaatttcttcgcccaacctggatgattcagtcacgttgttctcttgctgacccaagtcgacgatcttaccttggttttgatttttctgctgcttattggcagatacgtgcacagccaacagcaaattgcaggcgaacaaaagcagaaagccattcattaatcccgacatattactgcactttattattatttaatacaaaacgatttaaagttatagcgagtttcctgactctcgtagatatcttcacagctgcaagccaagattcaaactgacgaagcaaatgcggctgcgcagcgcatataagcgcgactcaaaaactccactcaccacaggcgatgaaagaaaactggaaatatgactcgacttaagagaggaagagtcgactccacagagagtcggtgagaatttggtcaatagcagagcatgaaaacagttaattgcactgcgcttttgataaggcgaaaatttattggcagcgccgatggaaaaccaaaacgaatccataagtatagacatattgagtacccatcaaaatgatgtacatatatgtaattatttaaaaattctacaaaaagatttagattccttttctggaaaccaaaaacatttatttaaattaaattaattaattaattaagtagatacgaaattcttttgacaatatctagctttgtaatgttttagaactcttaaaacaataaatatttgacgaattttttaagtaaatcttaaaacgataaactacatttttccagggtataaatatttatttaaagcggcactttaaggaaaacaaaatgcggcatcgctccaaagacatttccgcttttcgcgtgtggcatgtggatttctgctgcggtgcattcgtttcgcatttttagcgctgcattcaaccgattttttttggttgccgttcattattcaaaatgttattaaacttccccgtttttttgcgactggctatgctctcgactttggttctccttcatgcaacgaatttaataatttgagcagtggttttcatcttgaggttggtttttattttcttcgttagttttccaccggcatttgttgttgcttacgtcttttgttatacgtttattgcgttaattaaagtgtaattagttaacgatttcggtttggccaagccaagcca

SEQ ID NO: 42233 - DNA, 684 bp, DROSOPHILA
atgaatggctttctgcttttgttcgcctgcaatttgctgttggctgtgcacgtatctgccaataagcagcagaaaaatcaaaaccaagaaatctgggaacaagacctttcggacacctttaaaatcgagggcagcgaccagggcattcaaaaggttaacctcaagtgcggagcggactccatgaacgtggtgctggagacggagaagcctttcatgggtgtgatgtacactcgtggcagcttctacaagcagtctgcgccgtgcttcatgaagccatcttccagccagggatcccgcacaatggagatgaacttccagctggaccagtgccagacgatccgggatggtgatctctacaccaacatcgtggtgatccaaaacgacccagagctgatcacacccggagattcggccttctcgctggaatgcgacttccggcagcctcgcaacctggacgtggaggccagcatgcaggccagggacagagtggccactggttcgaaaatcacactcacaagtcctgatcccgcggcacccacggaacacctacataactcggtggtcagcaacagcgactcggtcgcatacataccaaagttcagtcggccaaatagaaccatacacctgggctccgtggaggaggtgacgctgccatcgtcctcccaggcgcgagatgagctctag

SEQ ID NO: 42234 - protein, 227 aa, DROSOPHILA
MNGFLLLFACNLLLAVHVSANKQQKNQNQEIWEQDLSDTFKIEGSDQGIQKVNLKCGADSMNVVLETEKPFMGVMYTRGSFYKQSAPCFMKPSSSQGSRTMEMNFQLDQCQTIRDGDLYTNIVVIQNDPELITPGDSAFSLECDFRQPRNLDVEASMQARDRVATGSKITLTSPDPAAPTEHLHNSVVSNSDSVAYIPKFSRPNRTIHLGSVEEVTLPSSSQARDEL

SEQ ID NO: 42235 - DNA, 3629 bp, DROSOPHILA
catccgatgacggggttattccgttgtcacgggctactttggccgggggcctggccgggctattccagatcgtggtcaccacgcccatggagctcctcaagatacagatgcaggacgccgggcgggtggctgctgccgaccgagcggcaggacgagaggtgaaaactataacggccttgggtctgaccaagacgctccttcgtgagcgtggaatcttcggtttatacaagggtgtgggcgccactggagtgcgggatattacgttctcgatggtgtactttccgctaatggcctggataaatgaccaggggccacgcaagtcagatggttctggggaagcggtcttctactggtctctgatagctggactcttgtctggcatgacttctgcctttatggtcaccccttttgatgtggtcaagactcgactgcaggccgatggcgagaagaagttcaaaggcatcatggactgtgtaaataggacccttaaggaagagggcataagtgcattctttaagggcggtctatgtcggataatggtgctagctccactatttggtatcgcgcaaatgttttattttttgggtgtgggcgagaagattctgggcatcgagcgaacgaaatctgtgtaacttataattaaaggtctcttcccccccctcatattaataagaatttttttatccccgagtcgattaagccatgtccgttttatccgtccgtcttctacacaagctagttccccaggtttgaagctatctgtatgaaactttcccaaattggacggctacatcatagaggaattatcctatataaaccaatatttagaatttaatgaaatgaaatgacttctaggagctcaattaacatttaatgtgtgtattttcttattgcatctatacatataatcgataagtaatcttcaagaatcagcccagggttgatttgcagcccatctctctcatcacaatcctttcacctcagctactcctcagtcaccttagatcacatccgctggccggctgttcggagcagccgcattctcagtacccaaatccacgtaacgagcacgataccagcgggccactgcagctcgataccagtcgaggaatagggcctgtcggtagaggatgatacccatttgcaggatgaggaagcccatgatcgtgaccagattcatgtactcccactccatgataatcacaaacacccagatgaagtaaacgcgtaggccatcggccagaagccggttggcgctggacgagtacatcgcaatgtacagtccaatgaagttgtacatggcacatgagatggtgaaggcaatcagagtcataatcaatgagatactcccctgcagagccgcaaagagatcaccccaatcgtcgaaaactgcacgcgaactacagctaaatggatcaatgctcggcaggaagttcatgcaaatggccagcatcgaggtgatgcccaagccgaagattccctgccagccagcagcttgcagtggagcaacattcgaggtttttagctgtttctcctcgcaaacatattgcagtccgtgcagaatttcagcaatgatgatgagtaagtcgccggtcagaatggatttgtagtccgtgtaaggcaacgtgaccaggtcgtattcaacgcgatggacgtccagactgataatgtccagcaggccgcacgatatcgtaaagatggccagccagtgccgtccggtcagcgtgtgattcagaaacatggtgctaaagatgcccacaaagatcagggcggcgcctgcgggaaagatgaggcgacgtaagtaatgataagcaaggccactgtctgatagaagtacctcttatcatctgaaagctggtggcgtaagtcaagtaaagtccggtgaacaacagaatggaggctgccgcatccagcaaagtgggcaatagcatgctaacagggcggaactcactgctgtcctgcgacaagatgctatccagatcggatataacctgtgtatgattgccagatgattaaaagttccttaaatacaaaagctttgccgattataaaccaaccggcattggaacttactccacgacgattggagatcaggcggatcaccttgaagaccgcaaagcacaggaactcgcccaggaacatgagcagtgtgaacaccactggatgttgaaatccatgaagttttccatcgctgccgattacctgttgttgattggcccacctgcaatgcgtacacgcacacacagcatcgagtgcacatttatttagcactattacttactattattaagcgatcttttggtactcacttcaccaccagaacgttgaaggtgccgctgagcacaaagatcagcgacaggaaaacacgatgatccattcgtcggcggaagattcacttgacgggtgcagcgttaattcgatttataaatattgacgttctttgtgcaatttgcaattgtgactgcgcagtgataagtgcaaaaaagtgcggccagacggtcaattgactgcccttccacagatctatataatccacttgagttgttgtggtcattaaccagtaactttacctttttcaaggtcaaaaacctaagtaactagtaatttttttgcaagtagtgcgaattagtttgtctttacgggacttttgtttattttttttcgccaacagtgagaccgcacaggctagcaaaaatactacacaaaatatagtgagcaggaaatcaacaacgaatatggtcacactacaaagcaactggtgggttttaaattggcgcgtgaaattatattttgaaattaaaactgaatcgacaccaaaatgcttatggatttaatattagggaaagtgtcacataaaacttcgttgacgatctttgggactttacaaattgtataaatatttcaacagaaaaatggattacttttgccaagtttttattaaacacaaacttaaaaaatatcacaggatatgaaaaaccatttaaatgaaaatacatgaagtggtgttaatgcatttgccgcacaattgccatcaatttgcttccgttggcgcctgcgtcgcattctgtgctaatttcctgtaaataattcaatattataatatagtataggatcgcaaaatcgatatttagcaaacattagcaagcaaaaacacagttggcaaccaaagcgtgtcctgtcgcctcacctgtactctgtggtgtttctttaagtgttgtgataatgtctttgagtatcttgtgttctatttaagtatcgtttcgtggagtgtaggtgttcctagagctcatctcgcgcctgggaggacgatggcagcgtcacctcctccacggagcccaggtgtatggttctatttggccgactgaactttggtatgtatgcgaccgagtcgctgttgctgaccaccgagttatgtaggtgttccgtgggtgccgcgggatcaggacttgtgagtgtgattttcgaaccagtggccactctgtggaatgcatgtatgtgggcgggtattgtactggtggtgtgacaagtggactaaataattcggataaatattcgaatatcctatgagtacctatctgggccgtaactgattgttgtgtaccaaagttagttatgtatggttagtatag

SEQ ID NO: 42236 - DNA, 1398 bp, DROSOPHILA
ctaattcgcactacttgcaaaaaaattactagttacttaggtttttgaccttgaaaaaggtaaagttactggttaatgaccacaacaactcaagtggattatatagatctgtggaagggcagtcaattgaccgtctggccgcacttttttgcacttatcactgcgcagtcacaattgcaaattgcacaaagaacgtcaatatttataaatcgaattaacgctgcacccgtcaagtgaatcttccgccgacgaatggatcatcgtgttttcctgtcgctgatctttgtgctcagcggcaccttcaacgttctggtggtgaagtgggccaatcaacaacaggtaatcggcagcgatggaaaacttcatggatttcaacatccagtggtgttcacactgctcatgttcctgggcgagttcctgtgctttgcggtcttcaaggtgatccgcctgatctccaatcgtcgtggagttatatccgatctggatagcatcttgtcgcaggacagcagtgagttccgccctgttagcatgctattgcccactttgctggatgcggcagcctccattctgttgttcaccggactttacttgacttacgccaccagctttcagatgataagaggcgccgccctgatctttgtgggcatctttagcaccatgtttctgaatcacacgctgaccggacggcactggctggccatctttacgatatcgtgcggcctgctggacattatcagtctggacgtccatcgcgttgaatacgacctggtcacgttgccttacacggactacaaatccattctgaccggcgacttactcatcatcattgctgaaattctgcacggactgcaatatgtttgcgaggagaaacagctaaaaacctcgaatgttgctccactgcaagctgctggctggcagggaatcttcggcttgggcatcacctcgatgctggccatttgcatgaacttcctgccgagcattgatccatttagctgtagttcgcgtgcagttttcgacgattggggtgatctctttgcggctctgcaggggagtatctcattgattatgactctgattgccttcaccatctcatgtgccatgtacaacttcattggactgtacattgcgatgtactcgtccagcgccaaccggcttctggccgatggcctacgcgtttacttcatctgggtgtttgtgattatcatggagtgggagtacatgaatctggtcacgatcatgggcttcctcatcctgcaaatgggtatcatcctctaccgacaggccctattcctcgactggtatcgagctgcagtggcccgctggtatcgtgctcgttacgtggatttgggtactgagaatgcggctgctccgaacagccggccagcggatgtgatctaa

SEQ ID NO: 42237 - protein, 381 aa, DROSOPHILA
MDHRVFLSLIFVLSGTFNVLVVKWANQQQVIGSDGKLHGFQHPVVFTLLMFLGEFLCFAVFKVIRLISNRRGVISDLDSILSQDSSEFRPVSMLLPTLLDAAASILLFTGLYLTYATSFQMIRGAALIFVGIFSTMFLNHTLTGRHWLAIFTISCGLLDIISLDVHRVEYDLVTLPYTDYKSILTGDLLIIIAEILHGLQYVCEEKQLKTSNVAPLQAAGWQGIFGLGITSMLAICMNFLPSIDPFSCSSRAVFDDWGDLFAALQGSISLIMTLIAFTISCAMYNFIGLYIAMYSSSANRLLADGLRVYFIWVFVIIMEWEYMNLVTIMGFLILQMGIILYRQALFLDWYRAAVARWYRARYVDLGTENAAAPNSRPADVI

SEQ ID NO: 42238 - DNA, 3516 bp, DROSOPHILA
acagatgcaaaaagttgaatctcaattcgttgcctcctgtgaggattgaactcacgacccctggtttacaagaccagtgctctgccactgagctaaagaggctcacatgaacgtcttgaaaaataactaaaatattagttacgtttcgagctgcagtggcaagcttcagtagttagaagtcttaaagatctttccatcttatcagcgcagtttccgatatcatagcaaggctcccagataaaatctattcgaatcttatcaagacacgtttacagcagttcaattttctaattgcaattggtttcaagtacggaaaaaatgtttaaatacataacatttgggtgagtagctttatatattaccaattttcccagtttctgccatggacttttgccactgaagtttaaattttaaatttttacagtatctattagcaactggttttatttttgaagcggtgacaaaccaaaacaagcaccacttaatccttccagacgaatgcgctgaaattatttattatgacgcaaaacttttttccggccgcagagcaacgcgtccgctttatctcctgtccaaaagagccaaagggtctcgactggcatccgccaaaaacgatggaccccgccccctccaaccgacccaaacacccacttggggggaaaatcaaaaaacaaaagtgggacttttccagttaagcctcgataaagagctttaaaaggtgcaccaggggcaggacaatcgaggtaatccgaatgctcagttagcgcaacttcaaaggactcaaaacctggtcatgtggcaaaatcgaatgaaatgggtaattctgcgggataattcctaaaagagaatgtcaaaaagggattaactttcaatcgaaagaaggtcaggatcagatttataatgaaatttatataaattgggatgagataaaagtttcattgcagccctgtttttattcgatagattatacaaccctaaataagcattcgattgtagtaggcaacttctagatgacaatcgatttataagtgtaacaaaaagcgagccactcacttgactagttaaactaactatttcaataactttaatcaactgaaatcaaaattaagttcaggacaatgtcgttagaccaagttataatcaactgcatgcgcagcaagaactggatcaatgtcctgctccttagatcgatggatcttttccaacccctactggtcgagagttccaatgtgtcccaattgatagaggtcagccccaatgggatcagttggcacgagaagaacgtggagtaccgcatcataatggacgagttcttcgatataatcaccaggacgaatgctggcgacgtgcccattaccttagtcgaaatgaagggtagtcatgtgtcatttggattatatctccgtaggattaggtacagcattttggatgcgctcaccattaatgtggaactgggggagctgccaatgtgtatttccccatacaattcctgttccctgcactgcagcaactgtacgaatgaaatcattgggcaaaggcagtattatcatatccaggaggttccgataacgaccatcttgccgcagaactacttctgtccccgcaacaggatcccagtgtatccttcggaggaggagctctattacggcctcaactatctggtcgtatgctccgagctgctcggcaacggagtcaagaccatcgcaggtcgtcgtcgcgtactctgctcacgctgcaagaagtgcgtaggcgagtttattaccagggatgtgggcgtgcagctgtacgcggatgccttgcgatttgtgaccttggactccccactcgagttcaaggagatctttggccatgtgacacccacccaaattatgatgcgcctggtgaacgacggcgaaatctgtggcccggatcagagacgcctcttcctcaaggccgtgcgtccggatggtcagttgcagttattgcacttggagatggataccaagcagatgcacattctgcgctccgagctgaagttgcccgacattaaaaaacctgatatagacttacccatggaggtcgataccagcagcgaaagtgatgtggacatgaatgtgagcgatacgagcagcagcaactccatgccccaaacaggagatgaagaattagctccaacacccagatccactacccccagaggaactcctacaaagaccgtgcaatatgtgcggttgcgtggctttcgtggctggcgcgttaggtacctgttctcgggaagtgatcgcgatctgatcgaacacgacgatgtctatataaactggaccgatgagggaacccgccttttgtacatctcccacttgatgatggcagacctcctaagcgagttcaatgccaatgagaaccttgtggccagtttggagaagaagccgctacccaccaggactgataatccccggcaaagctgcattatctgcgagtctgataaagagttctatgccaggtacgagcgacttgccaagatttctcaagagggatgaagttcaatcccagctgaaccaagctattaaaaataagatttgtttacatttatcaatatgagatgttttatttcaaaatatgatttaattaaacttgcatttgtatttcctcatcatgtcatacaaaaaataaaaccataaatattgaagcttttgtaatgtaaaagacccctaataaaacccatttatccttcggtcccaaactgtaattgcctgccattgctttgtcgaactccataaaatgcttgcccaaatttaaattaaccctttccctcctgccaattcttcctccatatttttacaagttccttaagtgaaagcagcgaaattcacggcatattttcttaattgctttattgttgctaattagtacagatttaattgcggaaacccttataaattttctagacaaccgatgcggtttatggcttgccgccccacttttgcgaaacactgaccacatcattaatcgttggctggttaacgaaaaacaatttgtccaaataacaattaaggccgggccaacgccaaacaacaagtgaagaaccctcgggaaaggacacttcaacgcccacccagcaagagaaggcttcaggaatcaggatcgggatcagaatccgaatcagaaacagaaacagggaaatcgttaacagcatttgacggctgacagttggctaatgaaaatccgggggagtgaaagtgtccaaggatgtgtcgcaatgtgattaatgatagtgcctattttaagtttcatttgaaatttcactttattaggggagtatttttattctgaatcagaagattactttcgtaacgtatgcattacctggccattattccagatgcactttgctgcattgttcgaaatggatttcagctgttgtttcctgcatttttggctgccacaacaatgagtttcaaattcgttggcaggtggatagaagtgcctaatggtctgcgccccattgttggacagactattgtggtttttggatctatg

SEQ ID NO: 42239 - DNA, 1516 bp, DROSOPHILA
caacttctagatgacaatcgatttataagtgtaacaaaaagcgagccactcacttgactagttaaactaactatttcaataactttaatcaactgaaatcaaaattaagttcaggacaatgtcgttagaccaagttataatcaactgcatgcgcagcaagaactggatcaatgtcctgctccttagatcgatggatcttttccaacccctactggtcgagagttccaatgtgtcccaattgatagaggtcagccccaatgggatcagttggcacgagaagaacgtggagtaccgcatcataatggacgagttcttcgatataatcaccaggacgaatgctggcgacgtgcccattaccttagtcgaaatgaagggtagtcatgtgtcatttggattatatctccgtaggattaggtacagcattttggatgcgctcaccattaatgtggaactgggggagctgccaatgtgtatttccccatacaattcctgttccctgcactgcagcaactgtacgaatgaaatcattgggcaaaggcagtattatcatatccaggaggttccgataacgaccatcttgccgcagaactacttctgtccccgcaacaggatcccagtgtatccttcggaggaggagctctattacggcctcaactatctggtcgtatgctccgagctgctcggcaacggagtcaagaccatcgcaggtcgtcgtcgcgtactctgctcacgctgcaagaagtgcgtaggcgagtttattaccagggatgtgggcgtgcagctgtacgcggatgccttgcgatttgtgaccttggactccccactcgagttcaaggagatctttggccatgtgacacccacccaaattatgatgcgcctggtgaacgacggcgaaatctgtggcccggatcagagacgcctcttcctcaaggccgtgcgtccggatggtcagttgcagttattgcacttggagatggataccaagcagatgcacattctgcgctccgagctgaagttgcccgacattaaaaaacctgatatagacttacccatggaggtcgataccagcagcgaaagtgatgtggacatgaatgtgagcgatacgagcagcagcaactccatgccccaaacaggagatgaagaattagctccaacacccagatccactacccccagaggaactcctacaaagaccgtgcaatatgtgcggttgcgtggctttcgtggctggcgcgttaggtacctgttctcgggaagtgatcgcgatctgatcgaacacgacgatgtctatataaactggaccgatgagggaacccgccttttgtacatctcccacttgatgatggcagacctcctaagcgagttcaatgccaatgagaaccttgtggccagtttggagaagaagccgctacccaccaggactgataatccccggcaaagctgcattatctgcgagtctgataaagagttctatgccaggtacgagcgacttgccaagatttctcaagagggatga

SEQ ID NO: 42240 - protein, 455 aa, DROSOPHILA
MRSKNWINVLLLRSMDLFQPLLVESSNVSQLIEVSPNGISWHEKNVEYRIIMDEFFDIITRTNAGDVPITLVEMKGSHVSFGLYLRRIRYSILDALTINVELGELPMCISPYNSCSLHCSNCTNEIIGQRQYYHIQEVPITTILPQNYFCPRNRIPVYPSEEELYYGLNYLVVCSELLGNGVKTIAGRRRVLCSRCKKCVGEFITRDVGVQLYADALRFVTLDSPLEFKEIFGHVTPTQIMMRLVNDGEICGPDQRRLFLKAVRPDGQLQLLHLEMDTKQMHILRSELKLPDIKKPDIDLPMEVDTSSESDVDMNVSDTSSSNSMPQTGDEELAPTPRSTTPRGTPTKTVQYVRLRGFRGWRVRYLFSGSDRDLIEHDDVYINWTDEGTRLLYISHLMMADLLSEFNANENLVASLEKKPLPTRTDNPRQSCIICESDKEFYARYERLAKISQEG

SEQ ID NO: 42241 - DNA, 3568 bp, DROSOPHILA
cggttgcgatcgaggtagtgaaagctttttcgcactcgtcgacgagccgatcgaaatacaaccgaggaaaacagcttttatacgcagctttttgaggcgaagttcatgggaggagattgaaagggggtcccgtttattaaaaactactaatcgattttgtaaaatggttcttttaaattgattttaattgagtataagaattactaaaatcattttagttgtttcaaatttgtaatttataatcggtttttaacaaattttaaagtttcatttaaaaatggtattgataagcgccgaagtcaccactgcgccactgtgttcgtataaagtgtttcaactatatagtactacctaaaatgatcgaaagtattttgttttggcgctaactttgtgaaattaccaagtttctgggttaaagatcatttgaaagaacagaaagggaaagcggttcaatggatttcgataaagaagaatccaccaagaaccctgttgatttcctataccggctgaatacgaaattaggcaatgctaatttccgatacacacccactttcattgaaaggtacaaggtgcattttacccacatgaaacacaagtacacattacaatttttcaacttacatattacaaagttagtggactttgggaattttcaggaacacgtgtgagacagttttttgaaacatttaagctcatggatcaaattgagaatatataacccattattgtttttcaccatttaaacatttaaaccagctttttgctagcgccatctaggttaagtaaacagaactgagcaccttacatcagcaaggtatttcgcagtcagtccgtgtaaaaatcattgtagagcgctgtaaattattattttcatttgctcttaacgtagtagaccggttaaaagggatttcaaaactgaaccatttccgaattattatcttcttctcagctaaactgttcaaaattatagaattttgctttatacttttgaaaaacgaagatgaattacttgatccagcgtggcaagatgcgccagcaggcgattaatgttccagagggtctgccggaacttctatcagatgttacacgggaggtgctaaggtgtcagccgaagaaagagtgcctctgccagttcatcatcgactatctacattcggtgatcgtgacaagggaaaaggctatgggtaagtactcccacaggatgtagaaagtatcaaacttttctttacgcacgcctgtattttcttacagtggccaagaccattttggatcgctctctgcgccaggtggacagcataatatcggacctctgtgtctgtgatctctccaaggagaagtccgagttgatgggccaggttctagaggactgtttccgtaacttcctcgagaaacgacgctgcgagatgcggcgtggcaagcaggcgattaagttcgaggatgtggacatcctagaggagctgctgcagaagtgcaagtttaccgacgaggagctggtcatgtcacggccggccatcgagagtgcctacaagcgcttcgtggacgcctatatgtccgccgaacgtggagccgatggaacggagctactctaccagtacttccgggacagggaactgaagcgtatcaacgaggccatgcgcaaccaggcagccatcacgatccaggcggcttggcgaggatactgggttcgcctccagttcccgcaagaagtttgcgtttgtgtctgcgcagcggtaagtgaatctacttctaaaagtctgcccctaaacttggttatgacttaaatccaacaggaaaaagaggacgacggggaggaaaagcgcagggaacaggcagcgagcgttcttcagagattcttccgcaaggttatgttggtatgtaacaagagttaaaaactattttacattatatatatttatattttaaactgtttttcttaattttttacgccaaatttgcagcgcgtggttaccaagccaatcgtagacccctgtgccgaaccaacggaaccaactgaagtggatgctagctcttcaccggatacagcaaaggatggctatgacgacgtaaatctctcgacagtaccgacaactgctgcgataacagccggaccaacaccattaccaactgctcccggaactgtgccgccatctgccccaggcactgctccggccacggccagaacttcggccactgctatagcagagccagaagctcatgaagaggctgcggaagctcagccagcggaggaagctcctgcagcagaggcgcctgctgatgaagcagcaccagctccggctgaggaggctgccccaccgccagcagaagaggctgcaccggaagccgccgaagagccggcacctccaccaccaccagaagaagcagcggcaccgccaccgcccgctgaggagcccgctccgacagagggagcagctcctcccgctgaagaagctcccgcagaagaagctcccgcagctgagtagatgaaaccatgctgtgtttattaattttcccttagttgttaaattgatgttatctgcaagtgaataaactgatcgaaaagtgctggaatcctcttctccttcaggattttgtttgatttcctatccagtcactgaaggtagacactctggtgtagacatccggagagatgtatagaccacacaccaccagcccgtaggatactatgcccacttgctgtaatccatttttggattccattaccaaaggaccgccagagtcgccctggaaacaagatcaatctatgatctagctagtgtattatcatccaactcaccgaacaggctcccctaaaaggtcctctggcgcagatctccgtatccgtaacgctctccatgcccgcattcctgcactcactgttcgagatggtgtggtaactcatgcgctgaagaacattgggatagttcacattatccaagaagggaaagggcactggtaagcggaggccccatcccgtcaaggttactggaactcctccaccaacgaagtctttcccctgcgatcgatactcaattgcactaatggtcgagttatttaacttcagcggaggtttgatggacagcacggcaagatcgctggtaaccagttcctgatacttgggatggatgctgtaggatagcacctgggagcgggaacccttctcgttcagtcctcgaattccggccacaacagacatgcgactggcgttgagaccctgacaacagtgagctgcagtaaggatgcgattgggagcgatgatggatccaccgcagaagtgcatctgaccaccgcgtgttctgtactgcagcgaaacctggtagggcacatgttcgcctggtgggatgtcagcgcctccaacaatacgatgtggagtatacccactgggttgacgagctttaacaatatacacgtctgttaccaggggattctgagttactgattccaattcaaactcacaattcagtctcccgaagactcctcccaaagctacaactccgatcagcagtagttgttcagttagacccatcgttgtttggctaatgccactggctttgcacctgccacacttctt

SEQ ID NO: 42242 - DNA, 1354 bp, DROSOPHILA
atgaattacttgatccagcgtggcaagatgcgccagcaggcgattaatgttccagagggtctgccggaacttctatcagatgttacacgggaggtgctaaggtgtcagccgaagaaagagtgcctctgccagttcatcatcgactatctacattcggtgatcgtgacaagggaaaaggctatggtggccaagaccattttggatcgctctctgcgccaggtggacagcataatatcggacctctgtgtctgtgatctctccaaggagaagtccgagttgatgggccaggttctagaggactgtttccgtaacttcctcgagaaacgacgctgcgagatgcggcgtggcaagcaggcgattaagttcgaggatgtggacatcctagaggagctgctgcagaagtgcaagtttaccgacgaggagctggtcatgtcacggccggccatcgagagtgcctacaagcgcttcgtggacgcctatatgtccgccgaacgtggagccgatggaacggagctactctaccagtacttccgggacagggaactgaagcgtatcaacgaggccatgcgcaaccaggcagccatcacgatccaggcggcttggcgaggatactgggttcgcctccagttcccgcaagaagtttgcgtttgtgtctgcgcagcggaaaaagaggacgacggggaggaaaagcgcagggaacaggcagcgagcgttcttcagagattcttccgcaaggttatgttgcgcgtggttaccaagccaatcgtagacccctgtgccgaaccaacggaaccaactgaagtggatgctagctcttcaccggatacagcaaaggatggctatgacgacgtaaatctctcgacagtaccgacaactgctgcgataacagccggaccaacaccattaccaactgctcccggaactgtgccgccatctgccccaggcactgctccggccacggccagaacttcggccactgctatagcagagccagaagctcatgaagaggctgcggaagctcagccagcggaggaagctcctgcagcagaggcgcctgctgatgaagcagcaccagctccggctgaggaggctgccccaccgccagcagaagaggctgcaccggaagccgccgaagagccggcacctccaccaccaccagaagaagcagcggcaccgccaccgcccgctgaggagcccgctccgacagagggagcagctcctcccgctgaagaagctcccgcagaagaagctcccgcagctgagtagatgaaaccatgctgtgtttattaattttcccttagttgttaaattgatgttatctgcaagtgaataaactgatcgaaaagtgctggaa

SEQ ID NO: 42243 - protein, 421 aa, DROSOPHILA
MNYLIQRGKMRQQAINVPEGLPELLSDVTREVLRCQPKKECLCQFIIDYLHSVIVTREKAMVAKTILDRSLRQVDSIISDLCVCDLSKEKSELMGQVLEDCFRNFLEKRRCEMRRGKQAIKFEDVDILEELLQKCKFTDEELVMSRPAIESAYKRFVDAYMSAERGADGTELLYQYFRDRELKRINEAMRNQAAITIQAAWRGYWVRLQFPQEVCVCVCAAEKEDDGEEKRREQAASVLQRFFRKVMLRVVTKPIVDPCAEPTEPTEVDASSSPDTAKDGYDDVNLSTVPTTAAITAGPTPLPTAPGTVPPSAPGTAPATARTSATAIAEPEAHEEAAEAQPAEEAPAAEAPADEAAPAPAEEAAPPPAEEAAPEAAEEPAPPPPPEEAAAPPPPAEEPAPTEGAAPPAEEAPAEEAPAAE

SEQ ID NO: 42244 - DNA, 16805 bp, DROSOPHILA
gaagcccttggcgtatgcggtccgctcctggatctccttgcgccgctcttcgttgtgctctggaataggacgctccggatggcgacgcaggctaagtttgtcttcgctaatctccacgaggccctcctcggatttgttcagggcagccacgatctcagataagtccgtggacagggaggccaatctcttgaaggtaacgagcaccgacaggggcacccagccgtcctcgttcttgccgatctgctcgcgcagaaacttgtcccgattcagattggcatcgccgaagtagtactctacctgccggattatggcgcgctcctgtttggtgaagccgccagcggcttcctctgctgcgggagccgggtccttcttggcgtcgccgttcttcgcctccagcacctgcgcctcggcgggctgtgctacctcttcctgggcttccacactcggggtttcagcaacttcggccattttagctgtgaaaatttcgcaaagaactgaaatgtgcgctcactgaaacacgtgtgaaatcggtaaaatgagtcacggcgtttgacaacactagccccgaaatgccgtgatagagatgcacaggtcaaaaaccgtgactagcgccaagcattaacttgaaaatgcagtgcggacatcttgaccaaagaccctagaattctagtgtctttgtcttgactatgtattatttaaaggctttgaaaatatacgtttgattatttaatttttgtagtagtggtaatggtaatatatcaacaagaattaaaaaaaaacctttactcatttacaattaccgcgatattcaaaaacaagaacataccaaactaaaacttataattcaaaatatatgtgacgaaaagtggtttatattatttttgaatgtgatttatcaatttactccaaaactatcgatgcaaagttacggaatgctccccgatagccctatcgatgccgaggacctgttggcacgtacacatctttagtttggctgcggccgattgcagccctggttttctaggtttctattttggtcgagcgctgtgttttatttatgtttgccatgggaaaagagagttgctaaaagtgcctaaatacgtgcacctggttcacaaacgggcgctccaaccagttgaccccagccccacggaatcggcatatgagtaaacaagtatttgaaaaaaatagtgagagcagttcaaatcgcgtcggcctagaaaagaaaccaaaaaatcgggcaataaatagtgaaaagtgtgctccttttgctatataaccaattgtgtatatataataacaagggtggataagtcgcgcaatcaacgaaacttggaaaactaaactattagtcactattctattattgctcaacgaacgacagggaacaacaacaaacggatcaacaaatgtttgataaaacgcaacgcagctgaaggtgagcgaaaaactaaagtggttaagaaaacccttcagacagcttggctgcaatatatctagccgtggaaatgaatcaggttttccaataactgctcgtctggccaaaggttcagtggcatctgaaaattcacccccctatgcgtcatccaagtagaggcatcatagacatccccacaacggcagacacaatcaagccttcctataagaaccgccatgggtttttacatacatatatggcatatataataatagagcgggtttttttccttatttccccttgagattttaatatacccatactggtaaatttttcatcgatgaagatatctcttacaagaagcatttagttgactgaaataatggtttttttttttttttttttttttttttgtatttcaacactttcttttaagcaacatatttatatagaaaatctaatacatttttagacacatgacaaaatcctatttacgttaaaaacagtttcaatcgtttagtcccaacaaaggacatttaaagcttaaagctcaagaatacattttatgtaatgactcctgtactttcggcacaactgttgttcaacttgctgctgctcgtgcaatagtaatttgttgccggtttctggagttcagaggtccgcctgcataatccattgggtcaatagcagggctcctcgtggggcatccgttccagctcctcccgaaaagcgtttgtttgctagcactcgctgcgaaagtaaaatgcactgccggacgacgacggaggcacgttctgcctgccgctgcctgccgcatgccacctgcctcccggccccaaactcccccattggattcccagaaccaacaagcatcattacccgaacaattttgaaccgctgccaagagaatttcctatgaaaggtggtggcaagctgaatgcaaattcatgcttttctttactctcacatgatcttggtttcggccaccaggtcaaaagcagtttgcaaaataaatagctaccctagaaaatattatttaaatcaaattgaattatttcatggtttaaaaagttatatttgtttgtatatatttatgtggggaatgtgaaaaagtctagggtaagatctcgtcgaaccacttggctctttgcgccctatggttgttattcttacgctttaatgaaagcatgttggcaatatctgtatgtgggcctgtgatttcccaaaacaaacattggccgtcaaatcatgcgcctgattttcactcgtgtctgctgggaaaccgcgtttcttcatatttccgctgctgacctcgttcttggtgtgttggtgtcgagaacagcggatccccacaagctattggaactcccactcgctcacctcttcggtgtgcccacagccaccgatgacttcctccgccacgaagtatctataaatacggcgagcgacgcaatcaaactatattacgtccatatatctgaggaaatgcatctcaagtggcggctgtgcagcctgtaaatctcggtattgacacattgaagaggccttattgagtgcagttcggctgagctagtagggatagcgattcggatccggtcccgaccaggcagaactgcataaatttggtttgtctttggctgactttgtttgtctttgccgctgactttgccaagcaaaacaatccactcgcctttcttttacatctctcgtctttgttgtttacgttccccagtgtcccacgaaaataaacattcggtgatttgatttggggtgctcccctccgatggatgcgacgttttactcgccaaattgcgcatttccggaagcggcagggatattcatttgaatttcgccttcggcgacggatcgttaataaccgaaagagttgtctcttatactcagagagcgtgggcccggtgtatctgtatctgaaacttgtatctgtatctgtatctggatatggggccgcatagccgatccgcgcggcgccatgtgcaagtttaatgaattaattaaaatttggttccgagagcttcaatggggtatgtatgcatctttgtatgtgcccacatatctgcgtgtgtgccgctcggtatctgcatttatgcatctgctcatctgacctccgatgcatcgtttggagcaccaccacctacggaaatttgattgtgcccggccatggacttaaagtgatttcagggttaaacgaagcgaaggaaagtgacatacattcggcttgggtttggcgctgcacttataaagcatattttttgccgacattctgatctcggcagatttgaatacgaatattctgtggaaaaaatatttagttcttggtcactctagctcaaaaattctccgtcggtctataagcttcaacatctttattcagtagagtttacagttccagcctccttgtttgtctcagaatgaaagtctttgggttaaatttgatttatattctatcttaaattctaaaaatatgacgaatttaacatttcctgaggccataatcccattaaaaccacaatgtgtgtcgcacgattctaaattttagattatacaagtctacacattccataaacgtttcctatgattcacgggcatatattgtatgatcaacaggaaactgagcggaacaggtgaatttttctgaaataattctaaaatgcttgaatatgaagaagttttcgattgatgactgaatccacaaacatggaagatctcacatccaataggcaacccacatatattttggcacaaatatttttatgtggtttttttgaatagacaatacaaaagcacagcgagtgtcgcttatttctcaatgaaatacaattaagatcctcattttggaaacgcagatgaaaaggttgtccccggattcatattttttgtcacatctctgttgatttttcatgaaaatatgcgatgtgtccggtcgaaaacgctcgcgtacatgtgaaaatatattcgaatctcctgcgatccgacgagactctcagaaaatgactgcgagagtggcactttcggttgccgtggaaaattcgtctgccatatgtcgccagcttttcggtattttccgcttttctcggcagtttcgctgaagcaatgaacgcgtgcggtgcatcgtctgagagcagaaaaacggcgaaaaacgtcaaattgtcgtaccacaatttattgtcgaaaaagtatatatcacccatctatacaaaagagtagcgggtatatgtattcgagtgcctagatggcgaaaaagtgacattttaagaaattttcatgcgtttgtgcaaccaaaacgtgaccttgccttagggaaatattctcatcagcctataaatcttgacaatctcatgagagcggtaataattcgtgaaaaactacacgttccagtttggcatatagaacttgcgatccgccaatatgtacactttcgtctgttttttatttttagtattctagaaaactatttgggcaaaataaaccaagttgttcatatttttgcgtttactcattgcggcaatagcaaacaaatgtgatgcatctatttttagaaaatatatcactttttaacattttcagtccagaattgaatttttgcataaacataggaattcctatattaataaaagcacacgtcgcgctgccaattttaaatagtaccaacgaatagactaggctaaagacttttataaacgactttaaaaataatgacatccactaactagccccctagtgccactcatacaagagaccatttcaattaagctttggaatattgggggtttttgtgagtaacaatgtcgtaatataattttcgaggcattcgaaaatattgcgattttacttctttctatagatatctgatgtatagagtgcacttgcctttagaatccaatgtgccaatcccatttccgtcaacgaaagtgtttaacgattgaatgaaatgttgatctcttaaagagttgttcgaacaaaccaaataaaaaaggtcgtaaatatttttagacgcgacgtggccgttgtttatgatttatatgttggcctgtcctgtccggctattcaaattgtttttatggcccgaaaagtttttctttcacaatacgcgcgagtgatttttacccaattttttaatggatcctcgcagcttgtgtgaccttggccatcgtgtagcgcacgagttttccagacacttgcagtaaactaggaaagaaaagccggaggggagtcgccggaaaagtgtcaagaaacttgcgcacgcgtttctcgacagatgttttcaaaatgttttcttctttggggccataattattgctcggctaattccaagaggctgaggaatgccgagcgatcgacgatgatgtagctcatcgctgcaataatgcgtaggtgctgtatataacgagcgatatgctcacatatgctttttcattgagcaaattgcctggctgatgtttcaagttcaatacccatcgcctcgtttcagttgaatcaatctagtgcgcactcggatcagccctgaacaatccgataatggatcagccactggtggtgcaggcggagtactccttcatgggcagcaataacgacgagctgtgcttccagaagggcgatgtcatcacggttacccagcgcgaggatggtggctggtgggagggaacgctgaacgataagactggctggtttcccagcaactatgtgaatgagtgcaaggtgcagctgcctctaacggagaccataaggccgccggaggagatccaggagtatcggtctgtggtgctcaaggatctgcttgactcggagcgcgcccatgtggccgagctgcagggtctgctcgagaatttcttggagcccatgcaacagacgcaaatgtaagttctctattctctgacataatttgaatataatctaaaagggcttcttctacagactcagtcaggatgagtacgcccagctgatgtgtaactttgtagagattgtgcgtacgcacgaggatttgcttatccagatcgaggagtgcaacgatcgagtgggaaaactatttctcaccagcgcccccttgatgaagaaggtgcaccaggcgtactgcgctgcccatccaaaggccattgtcatactggataagtacaagtatgtgctcctcgctttatatacatatattgtggtgttcaattgttaataaatataaatttttttctattccaaaagggacgagctggaaaagtatatggaacgacagggcgcagccactcctggattacttgtgctcacgacgggtctatcaaagcccttccggcgactggacaaatactcggccatgctgcaggagctggagcggcatatggagagcagtcatccggatcgcggcgacacccagcggagtgttgccgtgtacaaagacatagctgccacctgctcggccacccgtcgccaaaaggagctggagctgcaagtgctcacggggccagtgcgtggatggcagggccaagagctgagcaccctcggggacatcatccacatgggcagcgttgcagttggagctgatcatcgcgaccgatactttgtgctcttccctcaaacattgctattccttagcgttagtcagcggatgagtgcattcatctatgaggtgggaaacacaagcacaacatggcgaatttgtttgtaatctgttttcacacgcagggcaagctacccttaactgggatcatagtgaatcgcctggaggacacggatgccctgaagaacgcctttgagataagcagtcccttgatcgatcgcattgtagcagtttgtcagggtccgaatgaggccaacaagtgggtggagctgctcaatgccaataatcccagcttgccgatgggcatcaaacggcaattgagtaacttgagcaactcttcgctaggacacctaaatgccgctcatgtaagtagtatatttctcctatatattcacctttattatcgtttcgttttggcgacactttaaaccgtgagcagctgagtcaacatttggattcacggggctactgcacgcgattctcgctgtgtgcctattactccagccccccgtgccatgtgcgacctctccgtgtgactcttcccccaagcaattacccagcaacagctccgtacgccaatcttagtgctcactttgccaggcttgttaaaggcggcggactgaggagtgctatcgtaaagatgcttctgtatccgcaggctcgccagagcatcgatctcaaaaggattgcgttgcgcaaaaggcgttgtcacaaggcatctgcaaagttaaaagatctcaataccaatcaggattcggggcagtccgagttggaacgacaggatgcaattgaactaccaacggactcggagagctatgacgatgactttgaagatgattttttgcattcctgcgactcggatccgtttgaatatgtgcagttttaccaaaacaagcggaacgattccatgtgcaactccacaggcacattcgtggaccatggcacgggtgccaggaggcactgttcctctatcaacctcattaaattggattccgcggacacggacgaagttctagcgctcaacgagttaaaaaaggagtctcttgttataggatccagagcactaagagctttggctcggaagtccacgactcgaaattccagtgtgcacacatccacggcaactttggagctaggtgtgggtggcagcatcacaaactgtgttgaggaagagccaattcttaaggtcaagccatcgttctccctgcaacaacaaagttccgatgcgagttccatttttgcagctagattgggcggtgcattcaccgcctgcgagaatctggccagtatgcctgatgatctcagcagggagtcgagtatccaagagccacccactcctctgccagcttcaccgacagaacggcacagcatgccgaccatatttgtgggcaatcggttcaaccacagcaaaaatacagaggtatatgtaccgacgtggcgagatcgccaggaaatgcagaatcagagtgtggatgcgaagcaggatgaagagttgcactccagttccattgatctacccgccgcctgtctatctgctccggataaactgcaagcagaactactctacaattacgacgagatcctagaaaaacctctacagctgcatcgggagctaacgccctttccgggccataatcttaactcggataagcgagtttcccacaaaagcgacagtccgtcgacaggaaatgcaaagacagatccaaatcttgccacaagaagtagttccaccaccgaactctgcatcgataccacttcaaaaaagcgcacaaccccgtcagagagaagccgggattccattaggcgctgcattagctatcagttcctgcagatgtccaatcgaccgccccctccaccaccgccacgcagggatccggatctacacttagacaccaaatgccgctgctgcgaaaactcccagtgtcccagtccgcgatcgagtgacagcggaatggctggcagttgcactattacatcaccggatccgcccaatccggaatcatactttcccatggaggccgcaggccacgatatgctggataatgtggagccagagaggtttgatgtgtgcggaatgttcagagagaagttcctcactccggaggctactcaggatgttgttgatctatcagaggagcagcctcaactatcagatgaacccactacccctaccaatcgcaaagaggaacctacttgcatcacctctgctcaagtgcaagtgaacacaaggagtatttttctgccctccagctcgagcatggatgagactaacaggaatgtcccagccaacaatatcctatttagctcgagttccgcggatcagttggaaccgcaggccacctttcgctcggggatgtatgcgcactggtggaagaaagagcgccttccgccggaggtggtgcgtggcatagcccacgcctacaataagagcttgccctccaaggactcaaaagattcgggatcggtgtgctccagctgcttctgttccctgggagctagcggttacagcgagggcgcactctactgctcggtgtgccaaaactgtgcggactactacaacggcagtgtcaccagcacaaccaacacgacgaccaccacatcatccgccagttgcccactgtgcagtgaggacgagggcatgattgcccccacacacgactcgtcctcgctcgactgtcccatatgtaatggccgcattgcttccggcgccgaagaaggcaagcaatccgaaatggatcgacggccaggtaatctaaggattcctgtcgaatggtatccggtttacctggctggcggcgtttgttccgtgcacgtgttacgtttgattgttttgtaaattcgttttgctctcatgttcaccaaattcaaaaatcccttatgctctaccagcaaccatttggccaaatgcagcacgtccaaaaaagtcatcacacattgcttcctcatcagcacatcctttgactaacccagtgcgagttcattatttgcccaaatttccaatggaattggtaataaaacaataagtaatggcttttaaataaatttctttaaagaccagtctgaaataaacatttaaaatttcatcaagtcaacaaatttattaaatgtgtaaataagtgaaactaaagcatatgatgtttgacttcaattaatatttgaatatgatgatttctgaattttcggacttgcaaatggcattcaatgaacattggttctgtttttcctccctccgctctgggcggtaatttcatccgtcgtaaagctaaacgaattacaaaacattaatctaacgctctacaacacaaaaattcgaaatgagaatgaaaattacaaccaaaaaccaatcaaacgcattcgattcgatttgcttgctgcgcttaactcgctgcaggatttgcctgaaggattcacctgctgttgtacgttttcttgttgctattgcaccgctgatcctgttgacggcgggccacatagagattctttgattaaaactaacttacagtattttatgcgttaagattaaattagagaaacacaaacactgttaaccagaacccttcatctcttgcattgtagatgtcgccgccatcaagccacatactcctaccgcccggcggccgtccgccagccactcccagcagcatcccggccggcagcagcagcggagggagccacagccaccaggggtctccggccaccaactcgatgtcgcatcacaaacggagccagtcgttcaaccaccatctcagctacaatcagtacacgcccactcagcctccaccacatcatctgcatccaccacaaccaccaagtctgccaagtcatctgggggcatccggccccagatcaagttcagcccagacaccaaacagcaagacagcagctccactccaggcgtcatccatggacgccagtccagcaattcaggcagcggcagcagcagcggcggcagcggtgggaatgggggtgccaagcgcaaggaaaggaagcacaaagggtgagaaattgagaccttactccgggatttgtatgttttctacttactactcactccctgcctggttttctaaatttcccatcacatattaatatttaaactaagcatcaaatgtgttttgcatctgcagctaactggaccatcagctgcctgcgacccacgccgccgttgcgacccagtttattgaatgccaccagcggatcgggaagtggcagcggtggcagcggtggcggcggcagcagctccagcaatgccctggccagctactgcagcggaaggaagaaccagcccacctatgaggaggacgccctggtgctccgggttttcgaggcctactgtgccgcctatcagaacaatgccaggaacaccatccactcgggtaagtggcgaagcccatcccagatgtgcttcatatagctgtaaggatttctatgtgctcccgaaccaagtttgattataatttgctgaagaacaaaagctacaacctgttagccaagttgcttatttacacccacactcacacacattatacacagctgtataatcctcacacaaaacacagactcacttaagagttcagccgctaaacaaaccacttatcattttgttggtttggttgctctataatttcatggttttattcacttttcacaaggcgttgcactataccaagaagaattttccaaatttaatcaaaaatattgtaataggcttagttgaaccattaactttaagcttacgaattgttaaccagttaccaaattatgtttaagagaaaagattgattttttggttgaaccattggccactgatttcgttttaagatcaacaaactcaactctgcaattggtgctaagcagcgaacaaaggaatccaaagtttttgctttaaaagatgtcaattattctgtatctctatagctattatttgtattgacaaccattgaattcgaattactttgtttcttacttaaataaacattatttttgttatcccattacccgtgtaaaccttagtttaatttattcttgccgcctttcgtccgaactcccattcccaggctcacattatcctcatttcgactaatttgttaccattaacatcaagctgcacattctgtatatatgttggatttttggtttaggtttttgctaaccattttgcacactcatcccacagtcctgattcaactgcaactggtactgttgtggtcccctgctaatggtactggtactatttcgggtatcctgtaggcgatttctatcctcggtgtcgtactcatcattgtagaaaaacactatcattattctcatatccctgcttcattcaccttctccaccttcatttggttgttgtggttgtctcccttttggcgttgtgatccccttgcttttttgtttgggtctttggttctcattggtttcacccgttgtcgttgtcgttgttggtatttcgttttccgtttcttcaaatctcttcatttttctctctctctttattccactccgacctgatccaaaccgatctatatatagccttgcaaccctggaccccgtgtctgcccatccgcggtggcaagctgaaaacgagcaaaaccttctcgacctccaatccacagctgcctttcatagccaatgtcggcaactcagcctacctcaatcagcaccagcagcagcatctgcagcagcagcacctgcagcagcaacacttgcagcagcaacatcttgcccagcagcaaccaggtcgtcagcactccgccggcagtttgaactcctcatttatttggcgcgaggcgagcccgaacaacttcaacctatactccagttcggtgtcctcctcgctgaatgcgacacctgcccaacgctactccttatccggaactgcgggaggatcgacgtccatcaaggactaccagagagcgctctccgaggagagggcaaccagaaagtctctgaatcgccttaaaagtggctttggttcgggctacgacaatgtgtgtacatcacctctgctgccgaggaaaaacaaaccggcaccaaagttggtggcccagcagtcgtatcagagatccccgggaaacgccacagccaccactatagtgaagccgaatccgccaggacacccaggactttacgatcgccgcttgaaccgctcctttgagacctccacttcgcaccgctatgccgggtatggagcgggctacttgatgaattgcggcggagccttgcggaccagtacgctccagaggagcactccgcaactggccggtggtgaaagatccgatgacagcgatgtggagcgggaactgctgcggggtaatggagctgggcccacggccagtttggaacttaatcccgatggcagcaaacggcagtcgggcagctggtgttgcggtaattttgtgatgaagcagtggcgcaagatcaaccatgtttgagtctgggcttggggcaccacccaccatgccttcatcaatcatccgcatcacatcgcatccgcatatcgcatcccgccgctccagctccagatacagatacagatgctttgctttgaatgcgctctgtgtgcgaatctatattgatttttagttgatttactggctgcgcaaaagcttccaatgccacaagccttagattctagaccagcgaactatatgaagttgtaagcgaatggccgattgacttctgctcgctttgattgtcttagccttaagctgcgccttgatgtgtctgcggtgaaattcggccaactgcctgaggttatattcaatgcatatcaggcggccaagcgaatttcacggcacctagactgtaactagagtttgtgcttagcttatattgacacctacacctaacttagcttattattaatatgtaatctgtgaaaagacttggcgaaaaagcgactagtttagaagatgatgatgcttgccactgagtgcaactcctagttccgttttgaatttttatggaatttagttcggcttaataagggcagtccttaaatttccgtccacgcgctaacgaattctatttttacgtggccaatcgagtgcggatcacaattttgccataggaattgcctaatagccatagtccaaactatctactagatatactcgtacttcctaatgcatctgtgttcttggaggacgttgacctagtgagttttttattaaatgtccgttacctgcctagcaagcaattaaatcaaagagtgtgcaatgtgtaatcaaagagtgcgctttaagtgttagtcatagctagaatcagcaactaaatcaaagtaaccaactgttgtgcattattgatcgatggataaacgaacttattttgtaagtgttttgtgtaacaaccaaattaactactatatgctcttaaatactattaaccagtttatacgtttgtactgtaattgagttgatatttgtcgacgcgaaagagggatggataactaaaggaatccaaacgaaccatgaataaaattctttacaagacgaatcttcctttgtttgtctatgtggttgtgtgctttgttattaatagttatagcgataacttagatatacccttaaacttttagagtatcccatagattgatgtcctgtagtcggaagccctttgttttggcaccctagccatatgacatttaagatatacacttcttatattatccaagcaatagcttatagtttatagtttttatcacttacgcctaaacatttttctacacctacacgatcatattttgtacattaccattaatccacccttcttcccatccgatctctcgcacacaacactaacatattttgttctctgttcgattttcttttatccaccgaaacacacaccggcatgcaggccttgaaaacgaggacatgacccccaccctgcgccaactgtggaccgccatccgccagatgcagcaggacatgtcccagatcaaactgcagatcaatgaggagcgggccctgcgagccgatctccaacagctgctcatgcagcacttggagacgagcagtgtgagcagcggggccaacacccccaagtgttgactatgcaagtgacccggagggttctggaggggattcctcggtaccgatacatcgaaacaatacccgccgctgcttttagctttaattcattcttagacacttttactttgcatcttcggggggcagtgggtcaattaccaaaaaattatctacatatggactttgtaatcgtatatggattgtatttaccgagtactatttatgtgtatgtatacttgtgaacggacaatatgccaattgtatgtagtattaacaagcatctgcttctatcttattatcatgcgatctatcaaagaggtttcggtatgtctgagaaatttgcatgttagtcaaaaatactttgcagatcgcatgcataatttgaacttcgggcaaatttaacaacatcgaacatctgcttatagcccatcagaacataaataattcgttataatgcctagatttaatcttcattgtaagagcctagcacaacatgcatattttactggcatagattctacacatattagacttattgtattttacctattttacgacgttgccaccatgcaacttttgagagctgcttgtgtaagttatacgaatagatagacccagttttgatcttaactttgacgatgatttcaaatggacaatgcaaaattattaaaaatgtgccaatactttagtaagatgcagcaacgtacgaagaatcgctcaaaaagttgtatttaccgattatacctagaacatttattggattaatatacacgcacagaaaatgtaaatgaattcgaggctttcattgagttagtacatacattcgcaagtggcagcatctagagattgcaatcgaaacccacataagcagaacagaacagaaccactccggatcccaagaatgcctaacgatttaacgagtctaaaacaatgtataaccgctatcgcttgtctgacaatttttgctgaataattcggagtgccaggcggcttttctgctctgcttcgtgcgacttggcaagaggaaacccgtgtccgactgcaggggagcataatgagattgcaatcagtcagcgtcagcgggaacatggagtggcaatggcgctggtagtgacggtggtagtggcggtggcagcggcagatggcgacaaatgagcaacaaaccacgtcaagagcgagcgacattgttggcaaaacaatttcagtgtgtcagtaaggatttgagaacaatgcaggctgcctgcttggttggttccctggctgactcgttggctggctgacttggccggaatgtgtcacttccactgcctgggctcggagggccgtggaacccgggtgcgcggtaactttggacttgcggatacgaaggctggcggaagttttcgcatgcaatctgagaggttggtcctccctctgcttgttggccgaaatttattgcagctgcttagttaaacggttagatattgtggcacctagggcctgtggctacactccggctttaatggcaatcattagtgccttgctctctggctggctgctcttcatattttccagctattaaattattaataattagcaattaccgcctggttagcaatttattaagacctacacggagagaaagaggatgctggctgctttggagggggatgttgcaataaattaaaactaggtgtatcgctaatatattccatcgagaatgtattcttttttgttattcagaagaagtatgcctaagtttacttagctcacataagatacttcaattactattgcgaaaaggtttgagtat

SEQ ID NO: 42245 - DNA, 3320 bp, DROSOPHILA
ccgattgcagccctggttttctaggtttctattttggtcgagcgctgtgttttatttatgtttgccatgggaaaagagagttgctaaaagtgcctaaatacgtgcacctggttcacaaacgggcgctccaaccagttgaccccagccccacggaatcggcatatgagtaaacaagtatttgaaaaaaatagtgagagcagttcaaatcgcgtcggcctagaaaagaaaccaaaaaatcgggcaataaatagtgaaaagtgtgctccttttgctatataaccaattgtgtatatataataacaagggtggataagtcgcgcaatcaacgaaacttggaaaactaaactattagtcactattctattattgctcaacgaacgacagggaacaacaacaaacggatcaacaaatgtttgataaaacgcaacgcagctgaagttgaatcaatctagtgcgcactcggatcagccctgaacaatccgataatggatcagccactggtggtgcaggcggagtactccttcatgggcagcaataacgacgagctgtgcttccagaagggcgatgtcatcacggttacccagcgcgaggatggtggctggtgggagggaacgctgaacgataagactggctggtttcccagcaactatgtgaatgagtgcaaggtgcagctgcctctaacggagaccataaggccgccggaggagatccaggagtatcggtctgtggtgctcaaggatctgcttgactcggagcgcgcccatgtggccgagctgcagggtctgctcgagaatttcttggagcccatgcaacagacgcaaatactcagtcaggatgagtacgcccagctgatgtgtaactttgtagagattgtgcgtacgcacgaggatttgcttatccagatcgaggagtgcaacgatcgagtgggaaaactatttctcaccagcgcccccttgatgaagaaggtgcaccaggcgtactgcgctgcccatccaaaggccattgtcatactggataagtacaaggacgagctggaaaagtatatggaacgacagggcgcagccactcctggattacttgtgctcacgacgggtctatcaaagcccttccggcgactggacaaatactcggccatgctgcaggagctggagcggcatatggagagcagtcatccggatcgcggcgacacccagcggagtgttgccgtgtacaaagacatagctgccacctgctcggccacccgtcgccaaaaggagctggagctgcaagtgctcacggggccagtgcgtggatggcagggccaagagctgagcaccctcggggacatcatccacatgggcagcgttgcagttggagctgatcatcgcgaccgatactttgtgctcttccctcaaacattgctattccttagcgttagtcagcggatgagtgcattcatctatgagggcaagctacccttaactgggatcatagtgaatcgcctggaggacacggatgccctgaagaacgcctttgagataagcagtcccttgatcgatcgcattgtagcagtttgtcagggtccgaatgaggccaacaagtgggtggagctgctcaatgccaataatcccagcttgccgatgggcatcaaacggcaattgagtaacttgagcaactcttcgctaggacacctaaatgccgctcatatgtcgccgccatcaagccacatactcctaccgcccggcggccgtccgccagccactcccagcagcatcccggccggcagcagcagcggagggagccacagccaccaggggtctccggccaccaactcgatgtcgcatcacaaacggagccagtcgttcaaccaccatctcagctacaatcagtacacgcccactcagcctccaccacatcatctgcatccaccacaaccaccaagtctgccaagtcatctgggggcatccggccccagatcaagttcagcccagacaccaaacagcaagacagcagctccactccaggcgtcatccatggacgccagtccagcaattcaggcagcggcagcagcagcggcggcagcggtgggaatgggggtgccaagcgcaaggaaaggaagcacaaaggctaactggaccatcagctgcctgcgacccacgccgccgttgcgacccagtttattgaatgccaccagcggatcgggaagtggcagcggtggcagcggtggcggcggcagcagctccagcaatgccctggccagctactgcagcggaaggaagaaccagcccacctatgaggaggacgccctggtgctccgggttttcgaggcctactgtgccgcctatcagaacaatgccaggaacaccatccactcgggccttgaaaacgaggacatgacccccaccctgcgccaactgtggaccgccatccgccagatgcagcaggacatgtcccagatcaaactgcagatcaatgaggagcgggccctgcgagccgatctccaacagctgctcatgcagcacttggagacgagcagtgtgagcagcggggccaacacccccaagtgttgactatgcaagtgacccggagggttctggaggggattcctcggtaccgatacatcgaaacaatacccgccgctgcttttagctttaattcattcttagacacttttactttgcatcttcggggggcagtgggtcaattaccaaaaaattatctacatatggactttgtaatcgtatatggattgtatttaccgagtactatttatgtgtatgtatacttgtgaacggacaatatgccaattgtatgtagtattaacaagcatctgcttctatcttattatcatgcgatctatcaaagaggtttcggtatgtctgagaaatttgcatgttagtcaaaaatactttgcagatcgcatgcataatttgaacttcgggcaaatttaacaacatcgaacatctgcttatagcccatcagaacataaataattcgttataatgcctagatttaatcttcattgtaagagcctagcacaacatgcatattttactggcatagattctacacatattagacttattgtattttacctattttacgacgttgccaccatgcaacttttgagagctgcttgtgtaagttatacgaatagatagacccagttttgatcttaactttgacgatgatttcaaatggacaatgcaaaattattaaaaatgtgccaatactttagtaagatgcagcaacgtacgaagaatcgctcaaaaagttgtatttaccgattatacctagaacatttattggattaatatacacgcacagaaaatgtaaatgaa

SEQ ID NO: 42246 - protein, 687 aa, DROSOPHILA
MDQPLVVQAEYSFMGSNNDELCFQKGDVITVTQREDGGWWEGTLNDKTGWFPSNYVNECKVQLPLTETIRPPEEIQEYRSVVLKDLLDSERAHVAELQGLLENFLEPMQQTQILSQDEYAQLMCNFVEIVRTHEDLLIQIEECNDRVGKLFLTSAPLMKKVHQAYCAAHPKAIVILDKYKDELEKYMERQGAATPGLLVLTTGLSKPFRRLDKYSAMLQELERHMESSHPDRGDTQRSVAVYKDIAATCSATRRQKELELQVLTGPVRGWQGQELSTLGDIIHMGSVAVGADHRDRYFVLFPQTLLFLSVSQRMSAFIYEGKLPLTGIIVNRLEDTDALKNAFEISSPLIDRIVAVCQGPNEANKWVELLNANNPSLPMGIKRQLSNLSNSSLGHLNAAHMSPPSSHILLPPGGRPPATPSSIPAGSSSGGSHSHQGSPATNSMSHHKRSQSFNHHLSYNQYTPTQPPPHHLHPPQPPSLPSHLGASGPRSSSAQTPNSKTAAPLQASSMDASPAIQAAAAAAAAAVGMGVPSARKGSTKANWTISCLRPTPPLRPSLLNATSGSGSGSGGSGGGGSSSSNALASYCSGRKNQPTYEEDALVLRVFEAYCAAYQNNARNTIHSGLENEDMTPTLRQLWTAIRQMQQDMSQIKLQINEERALRADLQQLLMQHLETSSVSSGANTPKC

SEQ ID NO: 42247 - DNA, 5843 bp, DROSOPHILA
ttaaattgacgttaatgaattaatttatgagcttctgcggtggtccttgcctgttgcatagttctccgagggcaaagacaattagggccacagattagctttggttaatggaggtttatcgccttcaatggcaggcaattgaggttgaaacaagcttcattccaactcaccgcattcgaaattgtgatggaccattttcgtgtttaatctgccttaagcttcgagtacaaatagctcgtatgcctgagattgaaataaattttcctgtgatatgagaaccgacggcaatgctgggtcttatgttcaaggcatctcattaaaattcattacacgatctcctcagcatctccaggctatgctagggcgagcaggaatagtttcacttgggccagaactccacggactgctcgtttgcttatggccttttgcataatctcgagtttcatatttcattaattaaaattatgttcaaggcagtgcagatagccgttatagttgaagcacctgttcggttgtagactcattaacagcccgcccacgcacacattcacgtaaccaaggaggtgaattgtgcaacacaatatcattgttactttgattaatgatttgcaaaatcataaaagcttttctacttcccaaaaccataccacaaccagccgcccagccatctagccatccagctacccatccacccacttcatccatcatcatcagcagcgggaaaaaggtttcatattacaaaaacagtcttaattaatacgagacagaatgttaccgaatattggaaatgcctattcaattcaaattgtcatacgtaagtcgaaacccctcgaaaggaaaggcacaacgagtgctgcggggggtggtgggcacacgaaatgtgaagcctgccattattatgctaattaattgacatcaaaagcaaagaaaatggaagaggctcggtctagtaacaggtctttgttaaacgcacttatatcaaaatcaatgacggacgacaatgacggaaaaggtaggaggcgagcccataagccgctttgaatagaaatgcaaatcgaagtgcgcgcgtatgccaattattttgatacatatatattttttcgtatataattataataagataataatgagcagtcgaacaaaggaagcaggtgcacagtggtgctttccccagttacgcaacgctgtcatcacaaaataatggcctgtaataggatttcctgttttccagcaaagagaaggaaggcaaagcggaaaagccgcctataaatatgcaatgacagagcactcgatacaacccttgactcaactcaactccactccacgtcactcacctccactcaccacttccattcacttatcttccagggcgcatcctccagcctggtcgtcaaatacgccgacacggagaaggagcgacaaataaggcgcatgcagcaaatggccggtcacatgaacctgctgaatccgttcgtctttaatcagttcagtccgtacggcgcctacgcccaggtaagtccgcttccccattaccgcggcaatcatccacctaaatataaagcagcttccctctcctccggaattgcagcaacagcaacaggccgctctgatggccgccgctgccacggcacccggatccgcagccgcctacatgaacccgatggcggctctggcaacgcagatacctcatggcctaaacggcaccggccagcccccctcgctgccgtcgccgaccatgcccaacttcaacatgggcgccaacacgcccaacggacagcccggcggagcggccgccgctgctgctgcggcggctgccgcggacggcgtcttcacgaacggcattccacaaacggcattcccaggacgtaagtaacacagtgaaggaacactatcttttacactttagatgcaaataccatactaagattaccatattcaaagaacgtatctgatgcgagtttctaaatgttttctatagccactgaactgtttgttgcagatccgctgcacttgactataccgccacaaggtttgccaaacggcgatgctgctaccctgcaacatgccttccctggtctgccaccgtttccaggagttggtgagtattttttctatctagcttagattaagttatatgcctagatgataagattgatgattggcggcaaagcgttagaaccgccacaagatattcgattgcaatatgcctaattttcaaatatcatcgagagttgagagtatttttgccatgtcatttgaatcgtgttcagttacacatttagaccatctatgtgcatcacccatggcattgtgtaaccatctcgtcaccagcatcattttcattaataccatcggattatgttccaatgaacccaaccacaacagaaaaaacagcccaatcattcattactgtttttatcgaataattaataattgttgtgtcatgccataaatatttattgttagtaaagtgttacttaactctaatttctaaaataaatttaacttattatttattctttgtgcaacggaaacgaagtacatattgaaagtggaaaaagttcatttttaatatatgctagctttcgatttctggattttggtttatttcatttccattataattgtttaaaaaaaaaaatacacaattattagaaaatctcccatttggtgcgctgatatgaaatcaataattcagtgttgagcgtattaatctaactcaaatccagtcgatctactacggctgcttaacgacatttagtttagttttggtttttagtaatttgtttttctgtctgttgattactaaactacgagaactattttaaatacttaaaacatatacatatatatatctatacgtattcttaattgttgtgttgtctttataaatgtttcggaatttgtgtaaaaaccaaaaacaaaattatttatatataatgcagcctttcccgccgtctatggacagtttccacaagctttaccacctcccctagcggcggttgcacccactcagcgtgaaggtaagcttttctttataatttcgttgatcaccacctatgtatatccccattttccccccgattccccgattactacacgttcgtacgtttgattcagttcttgttgagcggtattgcatttgaccagctacaaatgtcgaatgatttcggccaaatgcaaatacttatccgtttacattgtacatgtttataccgattctgaattttgttcgattctttgtcatagtaaacatgctacacacacacacacatatacgcacgcccccacaaacacacctacaaacgaatggtttacactcacaaaaaaatcagagatatcgcccttgatctagcagacgatgagcagtaattaatttcatttgttatgcggaaggaaattaaattttttttgaacaaaagctcataaaaattaattactttgcatactgtatttcattcgtccttattttattttgataaacattttatcccttttgcgaccaccacccactgccaaaatgtagaaaggatggctgggttttcaacccttttgcgtggggttggcgagcaaggcgtaaatcgtttttaatggctgcattcaacggcattttatgcgatcgtaaaaattacatataaactgcttaaaatcatataaagaccgtcggcgtatttcgaagacatttgctcataaaattttatgtttctttttcggttcgttttgctcatctttttgcctttcgtcaggggcagagacacaagtaatccattgtcttcccgtaaaatacagagtgtgtgggtgtggttgtatctgtgtatgtgtgtgtgccatatacatttgtgttcgtgtgtgtatactacctacatatatactaactataaacctaacttgagtgtaaagttcgttttggttccatttcgatatctgtgcgccgtagtctgttgtttctctgtgtatcctctagaccttacctgcatgataaaccacccagtcacacagccatctaagtgtgaatcccatataataactaactaactaactacacatgctatacatatttatcatacggcaatttgggctaaatctaagctaaagacttaagtatatatatggccagattcattaggcatctctagagtatatgcatagaaaccttttaaacaagtatgtcatttagactgttcgtttgcttatggttttggttttggtttcctattttccgcagacttatattgcgcccttagttttagttgattcgttcagaaacaagatcagccacagaacacagaccacaaatatatcgtatatatgcatcagaccaagtcaagctaaatcgaattcaatgcaaacaaaacaagaacaagcaagcagacataactcataaaattataaattatgattttcctcattattaaatttaatttgttctctactttgtttcttctctttaaaatgtcttcctttaagattttctgatgttcccaggatgttcgatatccggacccgagggatgcaatctcttcatctaccatttgccccaggagtttggcgacgccgagttaatgcaaatgttcctgccctttggcaatgtgatcagctccaaggtcttcatcgatcgtgctacaaaccagagcaaatgtttcggtagtgttatattttcaacattcaaccccttgagccgttttgtctaacgagttatatttcattcttggcaggatttgtttcattcgataatcccgccagcgctcaagcggccattcaggccatgaatggcttccagattggcatgaaaagactgaaagttcaattgaagcggccaaaggatgccagtcgaccctattaacaatcggagttccttaaacgcaattcacaacaaccaactggagcaacaacatcagcaacaggcgctttgccaacaactaccgcattttcagcagccacgcccacatcggcagtaacctccgtatcagcaacagtgacaacaacggcccactataataaccttggcagcagctttaggccaaccttacctttgcccactgaaagctccaaccacaatgcccacataccctatacatttgccagctggcgcagcggtacctactgctatcgcaaccacaacaacaatagtgaaaactacagcgataacaacaacaaccacaggaacgtacccgattcccaatcccaaaacgatacatcatccaacaccaattgctccaaagttgaactggtcgagagactattcatgtggcaacagcaaaagcgaaaggcctaaaagtaacatcaaacacaacagcaaccataacaactgcagctacaataaggagcaactattgatggggtgagcaaaactatagtttatcgaaggacctacaaaatcatcgatcaacaaaaatagtgtcgatatgtaaagcgtgtttcgattataataccgatgcctgcaaagtatgaaagaatgttttcagtttgaaaataaggttaggttgatattacatcgaaataatcgttatatgtatcgatagcgcaaggatttttgtgctaccatttatttttgatccttaactaataatattccattccctcatttcagatggtcgtcaaccatgctatgtgaaaacgattatagaaatgaaacatgcaaagcgtatgtaaaaaaaaaaaaaataaaaaatagtaaacgagaaaaatgtaaattaaaaaaagaaaacaccttagagctgaaaaattgaatagatttatatatataatatatttatatatatttatccgattatacattcatctgaatgcagtacagcagtacacagaaaataataagagaaacccaacaaaaaagaaaccac

SEQ ID NO: 42248 - DNA, 897 bp, DROSOPHILA
atgacggaaaagggcgcatcctccagcctggtcgtcaaatacgccgacacggagaaggagcgacaaataaggcgcatgcagcaaatggccggtcacatgaacctgctgaatccgttcgtctttaatcagttcagtccgtacggcgcctacgcccagcaacagcaacaggccgctctgatggccgccgctgccacggcacccggatccgcagccgcctacatgaacccgatggcggctctggcaacgcagatacctcatggcctaaacggcaccggccagcccccctcgctgccgtcgccgaccatgcccaacttcaacatgggcgccaacacgcccaacggacagcccggcggagcggccgccgctgctgctgcggcggctgccgcggacggcgtcttcacgaacggcattccacaaacggcattcccaggacatccgctgcacttgactataccgccacaaggtttgccaaacggcgatgctgctaccctgcaacatgccttccctggtctgccaccgtttccaggagttgcctttcccgccgtctatggacagtttccacaagctttaccacctcccctagcggcggttgcacccactcagcgtgaaggatgttcgatatccggacccgagggatgcaatctcttcatctaccatttgccccaggagtttggcgacgccgagttaatgcaaatgttcctgccctttggcaatgtgatcagctccaaggtcttcatcgatcgtgctacaaaccagagcaaatgtttcggatttgtttcattcgataatcccgccagcgctcaagcggccattcaggccatgaatggcttccagattggcatgaaaagactgaaagttcaattgaagcggccaaaggatgccagtcgaccctattaa

SEQ ID NO: 42249 - protein, 298 aa, DROSOPHILA
MTEKGASSSLVVKYADTEKERQIRRMQQMAGHMNLLNPFVFNQFSPYGAYAQQQQQAALMAAAATAPGSAAAYMNPMAALATQIPHGLNGTGQPPSLPSPTMPNFNMGANTPNGQPGGAAAAAAAAAAADGVFTNGIPQTAFPGHPLHLTIPPQGLPNGDAATLQHAFPGLPPFPGVAFPAVYGQFPQALPPPLAAVAPTQREGCSISGPEGCNLFIYHLPQEFGDAELMQMFLPFGNVISSKVFIDRATNQSKCFGFVSFDNPASAQAAIQAMNGFQIGMKRLKVQLKRPKDASRPY

SEQ ID NO: 42250 - DNA, 3530 bp, DROSOPHILA
tataaaatattgtatttgatttagacaacttaaacttgtcaaaatgtacgaatgaaattattttatatttgcaattttttatcccactgtgcagtgcatcgaatctacgaagctttcccggcttgacttttgttgttgttgtgcgcgagagcagcagctgccggcaaaagcacaaacaacaactacaactacaacgaaaggcactctctctctcttgcggacaagtgcctccccgccctttcgcctctttccttcctctagaaccgtcatttccacgtttccaacaggagttccctcgcaccaaaagcaaaagcatcagcgaatggcgttcgagctcggttttgtttgttgttgggctggtcggctttttggttttggcaagtcgttttgtttgtcggctgttgggaaaaggaatgggtgtgtgtgtgtgggtgtgcgcgcgctgcgctgccattctaacagttatcatcaagggaacagagcatccagagcagagcttccagagcagagccaccctccagtcagattcagtccgaccttagttgaaacggacacggagttcagtcgccaccgttaactctttcacattggacgcgaaaagcgcgttcgcgaaattagtgagcaaaattggaaagagagcgagcttacaaatgaattaagcgccaaagtgcggatagtgatcgctttaataaaagcatacttacattttaaatcataaataagcaatccaatcttttacaacgaaatctaagaaaccggcatcgaagtaaatatctaacagattctggggtaaccccaaaaaaaaacgtaacctaaatcctgagatcaagataaaacttagccgcaggccgaaagcgccagtgcctggttccgtgacccccgatcgcgtagttgacctttgaaaccacccactaaccaccacccaccaatcagcacggtcactcccttgcatgtgagacccgtaatcgaccctctccggtccctggtcgatccaatgaaaatggaagatcccaccataaacgacacgtacgttcaggagtttgatctgcaccacctggaggtgggcggaaatggagctggccaatcgcatggagccggtgccgcgtcccaggtcacgactttgggccatgtgaagcgcgaggatcacagtccaccgcagccggtggcggttaaatggacgacaatccacggcgatcccacgaatccggacgatgacccggactcgctgccgctgtccggaccagagcccgccggagcagtggaggtctcgccatcgccgcacatcaagctgaggtccttctccggccatcaccagtggcacatggacgaacggcgcctgcaaccgctctctccgccaccagagcagtatggtccgctgcccggacaggcgattctggtgaacacatcttcgggagcgggcgttccgggcggagtgccctcaacgccgccggaaacgccaccagtagtgggctcgcccacgggcagcagcagctgtccggctcagacttacgcacaccactatgcgaggacaccgggcagctccgtatccgtatccgcctccgccgccgccgcagctgctgcctccgccggagcagcatcggtgagtgccggactgagccatgacatgatgtggctgaccaactcgatacgggcggaccagcagccgctggatctgcggcctttgccctatccgggctcccaggaggaggcggaggagtgggacagacagcgggactacgccctgcaggcggcggcagctcatcaccaccatcacggacagccgctgatgcaggcgcagcatcatccgcatggacacggcggtcatccccaccaggtgatgctgcagcagagcaagtatccgcaccaccatcaccaccacttccacaatctggaactgacgcccatcaacatgcactcgaactcgtacggtagtgcttcgggtgccctgacgcccacctgtctgccccaagtgcccagcaacgggagtggcagcagcggaggcggaggaggcagtggaagcgggagtggtggacccggcagcgtgggtggcggctcctgcgtcatcacacgggctgcccttcagccgtgccgcccgctctccgccagctcgaccagatcctcgaacaacatgtcgcccagaacctgttcgggtgcctacagtaatgccacgctggaggattgcctcaatgacgacatgctgaccacgttgacggtgcgggagctgaacaagcggctccatggttgcccacgggaggaggtagtgcgtctgaagcagaagcgacgcaccctgaagaatcgcggctatgcccagaactgccggtccaagcgactccatcagcgccacgaactggagaaggccaaccgggtgctcaaccaggatctgcaccgcctgaagctggagtactcgagggtctgccaggagcgggatgccctcatgcagcgtctgcagcgggcggcaaatggcggagtcggtgcgggaggtgcaaccgccggcggcgatagccaaagctctccggaattctacctctgacgccagctggcggtggccagcggctcctccgcatcctcatcctcctcctcgcagcagcagcagcagcacccccagcaacttcatctccagcatcggggtccacagtggaatccccagcagctggtcaactaagtagagagcgttccgtgtttaaggtactttcacaaagagttgatcatttccaagagcttttcctagacacaatgtataaggtaaattggtttgattccaagaatgttttccaaatagtctccactcgaaagaacatgttttccaaaaagagtttgttaaagcgtttccaaggggttagatgtcagaattcaaattctgtttgttatacattcaaaatgatttgtgttataccacgcgttattgtaagtttgtccctatttttgtgtattcttaaaaataatttagtaactaggttggattttcaagagaagtgcattcccattaccaccactgttgatatttattccctcattaatttaaaaacatttccatttaatcaataatgctgaaaaattaggcggtttccgcagaattctgtttagctatgttactatgaaatttattaaaggggtttttaagcgtttaatttgccattattctgattgcgacaataaattccgatgaatatcagtttgagaacttggaaagtgatcgacagagattgagatagatgagatagaaagtaaagtgcgagagagagagagagagcgtgtttggatggaacttttgctgattatcagtttgactaaggcaaagatcgattataaataaaactaattggaactcgtatgtataaaggacaaacattgtataaacccaaggaacaaaaacaaaaaggtaaattaactagcggcttctgattatcaatcgctaaattattacaaagtacgagttagtaacacacgcttatttgttgattagttctagccttagtttccctactagtattaagcgaaacagaagcgaattataatatcatagatgcgat

SEQ ID NO: 42251 - DNA, 1530 bp, DROSOPHILA
atggaagatcccaccataaacgacacgtacgttcaggagtttgatctgcaccacctggaggtgggcggaaatggagctggccaatcgcatggagccggtgccgcgtcccaggtcacgactttgggccatgtgaagcgcgaggatcacagtccaccgcagccggtggcggttaaatggacgacaatccacggcgatcccacgaatccggacgatgacccggactcgctgccgctgtccggaccagagcccgccggagcagtggaggtctcgccatcgccgcacatcaagctgaggtccttctccggccatcaccagtggcacatggacgaacggcgcctgcaaccgctctctccgccaccagagcagtatggtccgctgcccggacaggcgattctggtgaacacatcttcgggagcgggcgttccgggcggagtgccctcaacgccgccggaaacgccaccagtagtgggctcgcccacgggcagcagcagctgtccggctcagacttacgcacaccactatgcgaggacaccgggcagctccgtatccgtatccgcctccgccgccgccgcagctgctgcctccgccggagcagcatcggtgagtgccggactgagccatgacatgatgtggctgaccaactcgatacgggcggaccagcagccgctggatctgcggcctttgccctatccgggctcccaggaggaggcggaggagtgggacagacagcgggactacgccctgcaggcggcggcagctcatcaccaccatcacggacagccgctgatgcaggcgcagcatcatccgcatggacacggcggtcatccccaccaggtgatgctgcagcagagcaagtatccgcaccaccatcaccaccacttccacaatctggaactgacgcccatcaacatgcactcgaactcgtacggtagtgcttcgggtgccctgacgcccacctgtctgccccaagtgcccagcaacgggagtggcagcagcggaggcggaggaggcagtggaagcgggagtggtggacccggcagcgtgggtggcggctcctgcgtcatcacacgggctgcccttcagccgtgccgcccgctctccgccagctcgaccagatcctcgaacaacatgtcgcccagaacctgttcgggtgcctacagtaatgccacgctggaggattgcctcaatgacgacatgctgaccacgttgacggtgcgggagctgaacaagcggctccatggttgcccacgggaggaggtagtgcgtctgaagcagaagcgacgcaccctgaagaatcgcggctatgcccagaactgccggtccaagcgactccatcagcgccacgaactggagaaggccaaccgggtgctcaaccaggatctgcaccgcctgaagctggagtactcgagggtctgccaggagcgggatgccctcatgcagcgtctgcagcgggcggcaaatggcggagtcggtgcgggaggtgcaaccgccggcggcgatagccaaagctctccggaattctacctctga

SEQ ID NO: 42252 - protein, 402 aa, DROSOPHILA
MDERRLQPLSPPPEQYGPLPGQAILVNTSSGAGVPGGVPSTPPETPPVVGSPTGSSSCPAQTYAHHYARTPGSSVSVSASAAAAAAASAGAASVSAGLSHDMMWLTNSIRADQQPLDLRPLPYPGSQEEAEEWDRQRDYALQAAAAHHHHHGQPLMQAQHHPHGHGGHPHQVMLQQSKYPHHHHHHFHNLELTPINMHSNSYGSASGALTPTCLPQVPSNGSGSSGGGGGSGSGSGGPGSVGGGSCVITRAALQPCRPLSASSTRSSNNMSPRTCSGAYSNATLEDCLNDDMLTTLTVRELNKRLHGCPREEVVRLKQKRRTLKNRGYAQNCRSKRLHQRHELEKANRVLNQDLHRLKLEYSRVCQERDALMQRLQRAANGGVGAGGATAGGDSQSSPEFYL

SEQ ID NO: 42253 - DNA, 3039 bp, DROSOPHILA
ttgtccaggagaggaatgaatgatttgatgagaatgtctgcagtaaatgcccaacataccacatacctcggcaaattattgccaaacatggttatattgtattgtagttaaacaaataaatcgcattgttatgagcaccgtgataataaattattatctcaaacaaacaaagctttcatttcttgttgaaaagctgctccatatatgggggtttcttataaaacaaacgaaaggcatttatttgttcactctcttatcagcaaatattaattacttttgcttttcggcttgaaatgttgataggcggtacccttattatttttattattattttttaatcgtattttaaatatttaagtagttcgtcccactaaaatgataaaaatttatataaatgataaaagcgattatgcaacagtagttttgtcctgatcacactaatcagcctccacttatatttaaaattccaatctctgtcatggttcataaaagtgagattgtgtttctgtagctctgtaaattccgcgagtgccacacgacaattgccaattgcgatttcaacaccgcagttgaatgcacgcgatgatttcactggggtacatataaatccacttggaccccttttcgcccctcgagggatccacaagccacttgggccattgaccgaccaactattagaacaatcgcgagttcagttagctaacaaacgtgctgcttgtggcattgagcggttacaaactacatatgcaagtgcacacatacttctcattggtcattgtgcgccaacaaatccaccagagggttgccacagaagttccaaaacaatttaaagctaataatcaatagacaaatcaaacgattatatcataagtcgtgtatgtaaacactttttgcgaaccattttttgaatcgtgtttatatatttcactaacaaatttgcaacacaaaatctcaacaccttttaagaaccccttgcgacagaaaaaagtgaaatcatgttttatagcatcattaaaagtatattttgcattccacctaatttacgagccagcactaaacctacacccattgcgccatccctagttggtcaactcggtcaccgcctccgatgcctccaccagcttctgcagttgcttgtacttccggatggcgttgcgcacgaattccgttgcccgacgcactcgttccggagtcatctcctcggccagcatgcgacccacatcctgggcaccacccgtccgcaggatattcacagcacgggcgggtatttcacagattggagtgatcctgcacagggcactggtgatggcaccgccaaagaggatgatgcccacggcggaaaccacaacggcagcgatgcgaaagagcgtggacatcaggatcgtgggcagaagattggagacaaatgtcatcagtggattcgaggagttgggctgggcagtgggagccaggacagtggtgctgtccgattgtcctgcggtattagtgggcaccaggaatccctcgtagcccgtctgcaccacaatgggtccagggtacgggtaaatgccagctgctgttcccgcaacaggagcaggataggagtaaggagcatacgctccatactgactcaggtactgctgaaaggcctcgggagtgagtaggcctccagcgtaaatggtggtgggatcaatgctgctaccactggccacgttgtctggctattatatcaggatggaattattagattattataaatataacacagtaaaattgtatataaaacttaccaccgctgcttccgagtttccttcagccggaggagtggtaccattgctggctgcaggtaccacgtctgtgggtgcgacaactggttcgccactgccctcgaccagattttccgactcttccacggtgttgggtgtggcagccggaggagctgcgtccaaagctggcacacaaagcgatccacggatcattagcagcagaaccaacaggacatggaaactgcagtctttgaggtacttcatcttcgcttgggtgtggaaaaacaactgatcctggcccagacacgatcgattcttttaaagcctcgtctagttcggccattttagtccttgttttgcaattaatgtcacaaattctgggaatcctaaagatcccacttcttttctaatccctaacacaaagcaattttccataccttacctgcttgtaagggttcaggtagaagatgccttggccgtgggacaccgtcacgtgaaacatttatgtcctggctaattaccactgtgccggccgtgtccttgagtggccctaagaaatgtcaagcacgcgatgaagtcgtgactgtcgaaaaatgtttgatgcaaacacgttgagtttcaagtgatgccaatcaaaacaccccccaccactcagtcaacttaatcaggtgctctgaattggaaaatctgttggcaatcaataaaaggaaaagcatagcttggcacataatgtagacatataattttagacacgaatgtgagcattttggctgagttttcgggaccgccaacgagcacctccccccaccacccaacccacatcagccaccagtccttttcgaccaggtgaacactgaggcggactgtcgtccatggcaacgttcgttatgaaaactaaacgaaaacaaatgcgcccaaagacagcgacgacaacgctggcgagacaacatgctctggaaattggaaaagtcagatagcggatacatcggtgaacagagtcgtcggcaagttgggacagctgagacagattccatcaccgcatagagtggcccacgcaccagccaccggagcagcagtagcagtagcagcatcagtgtcagtcatagtcctttggcgagctccggcatacgtggacgcggcaacactcgacggcatactgggtaactgcatcgacatcgactcggtggccgtggtgcagcacaagctggtgcaccgaattgtgtgagtagtaggagtgtccaatgggtcggttcggctggtccaacgccttctgtgcatattccataatgaataa

SEQ ID NO: 42254 - DNA, 970 bp, DROSOPHILA
gatcagttgtttttccacacccaagcgaagatgaagtacctcaaagactgcagtttccatgtcctgttggttctgctgctaatgatccgtggatcgctttgtgtgccagctttggacgcagctcctccggctgccacacccaacaccgtggaagagtcggaaaatctggtcgagggcagtggcgaaccagttgtcgcacccacagacgtggtacctgcagccagcaatggtaccactcctccggctgaaggaaactcggaagcagcggtgccagacaacgtggccagtggtagcagcattgatcccaccaccatttacgctggaggcctactcactcccgaggcctttcagcagtacctgagtcagtatggagcgtatgctccttactcctatcctgctcctgttgcgggaacagcagctggcatttacccgtaccctggacccattgtggtgcagacgggctacgagggattcctggtgcccactaataccgcaggacaatcggacagcaccactgtcctggctcccactgcccagcccaactcctcgaatccactgatgacatttgtctccaatcttctgcccacgatcctgatgtccacgctctttcgcatcgctgccgttgtggtttccgccgtgggcatcatcctctttggcggtgccatcaccagtgccctgtgcaggatcactccaatctgtgaaatacccgcccgtgctgtgaatatcctgcggacgggtggtgcccaggatgtgggtcgcatgctggccgaggagatgactccggaacgagtgcgtcgggcaacggaattcgtgcgcaacgccatccggaagtacaagcaactgcagaagctggtggaggcatcggaggcggtgaccgagttgaccaactagggatggcgcaatgggtgtaggtttagtgctggctcgtaaattaggtggaatgcaaaatatacttttaatgatgctataa

SEQ ID NO: 42255 - protein, 286 aa, DROSOPHILA
MKYLKDCSFHVLLVLLLMIRGSLCVPALDAAPPAATPNTVEESENLVEGSGEPVVAPTDVVPAASNGTTPPAEGNSEAAVPDNVASGSSIDPTTIYAGGLLTPEAFQQYLSQYGAYAPYSYPAPVAGTAAGIYPYPGPIVVQTGYEGFLVPTNTAGQSDSTTVLAPTAQPNSSNPLMTFVSNLLPTILMSTLFRIAAVVVSAVGIILFGGAITSALCRITPICEIPARAVNILRTGGAQDVGRMLAEEMTPERVRRATEFVRNAIRKYKQLQKLVEASEAVTELTN

SEQ ID NO: 42256 - DNA, 3647 bp, DROSOPHILA
gccatgactgcggccatgacagcgataatgtattcgggagtgggaaggggaggcatccacatccacatgggttaggaggaggtaggtcctggcgaagttgtagggttgccaggactcggtcacatcccacttccaccatccgactacccacgctcgccgttctccggccttctcgctatttgagtttgggtcctggttcactttgtgggtattaagttcgttttaaggctaaagacaaacgactccatctctttcgacatgcctttctccgtctcttttacttaagccccggttgcactttttgcgctcctgccaaatgaaaactgtcctggcgaaggtgagtcaaagtctttaaagttgcacaaaggggattatgactgtgcccacataattagtcagctgccagtctttcgttactactcaaagtttttaaaacttgtattgtaaaataaagtcaagtaaacttgaaattagaaaaactacttccatcattttatatataataaacaccttttaggtctgccaagaccaacacaaaatccacgcatttcacttctcaatgcttaaggaggggaaaaatgtcagtcgtcattttttatgacgcacttagttaaacgatatggacaatagcaaagcaccgggcaggggtaaccagtccatggaaagtggtcttcaggggcaacccccaaggcatttgatgcagtggccaagttgacagcccttccttatccgccaaccgttgagggaatttgttttcgtcccggatgctagttttttatccagctgatgggccaagcgggagacttttgttttatcgatggcaatacatctcagccatcaatatgattaacccacacggaatgtgccgaagtgccgaaaatcaaattaaattggcctgatgtaagtgttagtgacagattcggacactcgcttgatttatgcatagcaaatcgatagtttgtgtttgtcctctgagaaaagggatcagtgtcggctatgtgcagacggtaaaaacataatttatattcacatctccatgatatttactataaatggggagtacaaaaatgccttaacaagtagatgctggctgtcacttcttattcgctcgctgttcatacttttcctcaatgaacttgaacacggaatcgatggccgagtaagaggtccattcgtgcttagtgtggccagcggaaatcctccggatgctgctctttgactgtgaaacgggtgtgtctaagggtgtgttgctggcaacccaatcgcaggccacatcgcacaggtactccttgttcttcgcttggggacttcccatggcggcatcagtgaaggcaatggcaaaaacggattctttaaagaaatccggaaaccgctccacctaataaagagaagattaaaatatgatgttgaaatatatttggaattttatacccaccaaatcaagagtaagactgccaccataactgtgggccacaatggccacactctcgggtttcgcgggcaatacaatattcttccacacatatttaacgtgctctacggacgtattgacgcccttgatgggattctccttaccattgtagaatcgtgtgcaatcgttggcattggtgatgaggagatcgtatcccagtttttgggcctgtcgcacataaggcagctgggtaccgtggtccaaggaattgttaataattaaactataacaaaattaaatatgtaagtatttgtatttgtatgttaatatcatttgtattggtattcaggtatttttatcatttctattatttggtttaaatagtgaacatacacaccttctggcccactgtccggctttaacgtatccactgccatggatgaggactagcaactttttggactgcgacagctttgccggttgcgagaatacaaacgaagaccgctctggaggctggtcaaaagggatgtaggtgcgactaagaccgtttttctccagcaaagcgtagacaatttctgggatttgctatgggcgataaaggatacagtatttgtataagcttattcctacccacgtgggcatatgtaataatatttgtggaaaggaattgtgtggtctagtttctcttgaagaggattcgtcctaggtgtggattccttgacatcaaggaaacctaatagattatagttttcggcagaagatattcatgtgcaatgtgggttgaatgcggtacatacgttggctagcttctggtagtgcttctcgttttcggcggcgtcgtcgctgacgttgtaggaaaagagttccttgccaggctccccagtggcgggatcgactttgcgcagcactccttctgcaggaggcaaacgggaagatcatattgtcaagtagcgactttgtgcaacattctacttacctccatcgaatgcatatccaaagtttttcagctggatgagagcctcctcgcaattgctagccggcggcggtgagtgcgacattcgaaaacttctgaggggtcgaaatatttgaataagcctagaccacattacaatcggtcgcgtggcttccacacggttcggcacttacgtagtaatagagcgattggaaaaagcttttatttatatagaattgttgttcgagtttttgttttgatttttcatatgaacgccgaactagggatggaataagcgcgccacctactggccgcaagctcacatcgtctaagcgataggtatcgatagcgaggtcagagcaccaattcacaccaaaacgcatcactgccaaaaaaaatccccataatattcgttataaattaaattttattaaataacattttttaatataatattgatcctttcctgatgattaatcattgtcttttaattgtaaccctagatagaaaagatcatacatatttctgtaaaacctgctataacccatctttccatacagtgcgattaatttgtaagacttttaatctcgcagccatagagtccatggattcctgaatccagctggagtatgcgttgatgcgagtgaaggcatagggttttaatggggtgcaggcttttcgaccgtaggaaagtaatccgtacagcttctcttttgccacattcatcaagggagctccagaatctccctgaaatgtaaaattaaaataactcttatttaactgatataaaaattattttatagcattggtgtttgttcctggtaagaaattataggacttctataaataatatcctaaatacctcttaaaaattgctacgtattgcaaaccaaggaatttgactggaatatgttttctagtttcaaattttataatgattaaatatttgaaatgtacctatatgtagtttgtttaatttaattggaaaacatattctttgttgaaaaaattttaattgattttcgattatgaatttctggcgtatttctgatccacttacgtcgcagggacctcgcggtcctttcaaatgcatcgcacagatgtcaagcggtttgaggaaaacgaagcgatggctttgctggcactcatcgttctccatggtcaagaagggcatctcctggagttttcttatcttgccgacgccaacccgaccccagccaaccagcgaggcctgggtgccactatccctttgaggctttccagcaaagttaatgctacgaaatc

SEQ ID NO: 42257 - DNA, 1123 bp, DROSOPHILA
ctagttcggcgttcatatgaaaaatcaaaacaaaaactcgaacaacaattctatataaataaaagctttttccaatcgctctattactacaagttttcgaatgtcgcactcaccgccgccggctagcaattgcgaggaggctctcatccagctgaaaaactttggatatgcattcgatggagaaggagtgctgcgcaaagtcgatcccgccactggggagcctggcaaggaactcttttcctacaacgtcagcgacgacgccgccgaaaacgagaagcactaccagaagctagccaaccaaatcccagaaattgtctacgctttgctggagaaaaacggtcttagtcgcacctacatcccttttgaccagcctccagagcggtcttcgtttgtattctcgcaaccggcaaagctgtcgcagtccaaaaagttgctagtcctcatccatggcagtggatacgttaaagccggacagtgggccagaagtttaattattaacaattccttggaccacggtacccagctgccttatgtgcgacaggcccaaaaactgggatacgatctcctcatcaccaatgccaacgattgcacacgattctacaatggtaaggagaatcccatcaagggcgtcaatacgtccgtagagcacgttaaatatgtgtggaagaatattgtattgcccgcgaaacccgagagtgtggccattgtggcccacagttatggtggcagtcttactcttgatttggtggagcggtttccggatttctttaaagaatccgtttttgccattgccttcactgatgccgccatgggaagtccccaagcgaagaacaaggagtacctgtgcgatgtggcctgcgattgggttgccagcaacacacccttagacacacccgtttcacagtcaaagagcagcatccggaggatttccgctggccacactaagcacgaatggacctcttactcggccatcgattccgtgttcaagttcattgaggaaaagtatgaacagcgagcgaataagaagtgacagccagcatctacttgttaaggcatttttgtactccccatttatagtaaatatcatggagatgtgaatataaattatgtttttaccgtctgc

SEQ ID NO: 42258 - protein, 309 aa, DROSOPHILA; identical to SEQ ID NO: 25917

SEQ ID NO: 42259 - DNA, 3132 bp, DROSOPHILA
tacaaacgaagaccgctctggaggctggtcaaaagggatgtaggtgcgactaagaccgtttttctccagcaaagcgtagacaatttctgggatttgctatgggcgataaaggatacagtatttgtataagcttattcctacccacgtgggcatatgtaataatatttgtggaaaggaattgtgtggtctagtttctcttgaagaggattcgtcctaggtgtggattccttgacatcaaggaaacctaatagattatagttttcggcagaagatattcatgtgcaatgtgggttgaatgcggtacatacgttggctagcttctggtagtgcttctcgttttcggcggcgtcgtcgctgacgttgtaggaaaagagttccttgccaggctccccagtggcgggatcgactttgcgcagcactccttctgcaggaggcaaacgggaagatcatattgtcaagtagcgactttgtgcaacattctacttacctccatcgaatgcatatccaaagtttttcagctggatgagagcctcctcgcaattgctagccggcggcggtgagtgcgacattcgaaaacttctgaggggtcgaaatatttgaataagcctagaccacattacaatcggtcgcgtggcttccacacggttcggcacttacgtagtaatagagcgattggaaaaagcttttatttatatagaattgttgttcgagtttttgttttgatttttcatatgaacgccgaactagggatggaataagcgcgccacctactggccgcaagctcacatcgtctaagcgataggtatcgatagcgaggtcagagcaccaattcacaccaaaacgcatcactgccaaaaaaaatccccataatattcgttataaattaaattttattaaataacattttttaatataatattgatcctttcctgatgattaatcattgtcttttaattgtaaccctagatagaaaagatcatacatatttctgtaaaacctgctataacccatctttccatacagtgcgattaatttgtaagacttttaatctcgcagccatagagtccatggattcctgaatccagctggagtatgcgttgatgcgagtgaaggcatagggttttaatggggtgcaggcttttcgaccgtaggaaagtaatccgtacagcttctcttttgccacattcatcaagggagctccagaatctccctgaaatgtaaaattaaaataactcttatttaactgatataaaaattattttatagcattggtgtttgttcctggtaagaaattataggacttctataaataatatcctaaatacctcttaaaaattgctacgtattgcaaaccaaggaatttgactggaatatgttttctagtttcaaattttataatgattaaatatttgaaatgtacctatatgtagtttgtttaatttaattggaaaacatattctttgttgaaaaaattttaattgattttcgattatgaatttctggcgtatttctgatccacttacgtcgcagggacctcgcggtcctttcaaatgcatcgcacagatgtcaagcggtttgaggaaaacgaagcgatggctttgctggcactcatcgttctccatggtcaagaagggcatctcctggagttttcttatcttgccgacgccaacccgaccccagccaaccagcgaggcctgggtgccactatccctttgaggctttccagcaaagttaatgctacgaaatcgcacatcgtcgagcgggaatttggggtaaatcctcaacacggcaatgtcgttgccgccgagcaccctaaactggggatgccatcttctttccacgacgaagaagcgggtctgcttccggctgttcagcgaatcggcgccaccagccacgtacagttgtttggttggattcgtttggatgcagtgggctgcactgagcacgaactcattcgaaagtataacgcccacgcaaaggtgcttgtagtatcctttaaggttctctcctatggagacgatgtatggataacgagggcggaaacttatcaccttcgtggtcgacacagttgtggctaacaaaggtgtgctattctgcggggtgtcggaaagcgtctcctgggctgccgacatcgcggcgaaccaagctatggagcaaagagattgccaacaacacataactgcgaccaagtcacgaatacaaagacgtcacaaagacgtcttgtagtcaggttttatcatcaagcatcttaactttataattgggcatgaaattataattttctgtattctcacatggttaactttaaaagaatatacatttaaattccattatattatcaaactttataaagtatagcaatattttttttgaagagaaaaagcttgtacggttactatctacacgtctgcaaaattatggaaacagttcgaaaatagcttaaaagaaaatcctcattagacccctataaccgtgatcaatagaaatgctacttgctagtggcagaatctctgagggtctgcttcatattggccacctggttgagcttggcaaggcgcttcatggtttcgagctccttaataaacgtggccagcgcctcttttgtggtcgagatgtcagcgtcctttaagtcatccaacgtgtcctccttttcaagttctaaaagaaattcaaaaatatatatagattcatatatactcgtgacaaaaattagttttggatactaaccgtccatttcggcttctatgtcattcagccgatcgagaaccaaggattgctgcaccttgatatgctcgatcaaacggtactggcactcctccggatcgatggcagcttccggttgcggaacgttcggaaggtcgggggcctccaattttgcacgcttaaccggtgtcaacgcagtagagtccagattgtcttcgtcccactttttggcccatagataaagcttcggatgacagcggttgcgtgcgatgttaatcttcaccagcagcgagtgcatcgatcgcttggcatctagcaaattgccggtcagcgtgtgcgagcgcttcaagagctcgaattgtttggtggcctgtggatttgcagtgtgatacgcggccaccggcaacttgccttcgaatagccagtcct

SEQ ID NO: 42260 - DNA, 819 bp, DROSOPHILA
atgtcggcagcccaggagacgctttccgacaccccgcagaatagcacacctttgttagccacaactgtgtcgaccacgaaggtgataagtttccgccctcgttatccatacatcgtctccataggagagaaccttaaaggatactacaagcacctttgcgtgggcgttatactttcgaatgagttcgtgctcagtgcagcccactgcatccaaacgaatccaaccaaacaactgtacgtggctggtggcgccgattcgctgaacagccggaagcagacccgcttcttcgtcgtggaaagaagatggcatccccagtttagggtgctcggcggcaacgacattgccgtgttgaggatttaccccaaattcccgctcgacgatgtgcgatttcgtagcattaactttgctggaaagcctcaaagggatagtggcacccaggcctcgctggttggctggggtcgggttggcgtcggcaagataagaaaactccaggagatgcccttcttgaccatggagaacgatgagtgccagcaaagccatcgcttcgttttcctcaaaccgcttgacatctgtgcgatgcatttgaaaggaccgcgaggtccctgcgacggagattctggagctcccttgatgaatgtggcaaaagagaagctgtacggattactttcctacggtcgaaaagcctgcaccccattaaaaccctatgccttcactcgcatcaacgcatactccagctggattcaggaatccatggactctatggctgcgagattaaaagtcttacaaattaatcgcactgtatggaaagatgggttatag

SEQ ID NO: 42261 - protein, 272 aa, DROSOPHILA
MSAAQETLSDTPQNSTPLLATTVSTTKVISFRPRYPYIVSIGENLKGYYKHLCVGVILSNEFVLSAAHCIQTNPTKQLYVAGGADSLNSRKQTRFFVVERRWHPQFRVLGGNDIAVLRIYPKFPLDDVRFRSINFAGKPQRDSGTQASLVGWGRVGVGKIRKLQEMPFLTMENDECQQSHRFVFLKPLDICAMHLKGPRGPCDGDSGAPLMNVAKEKLYGLLSYGRKACTPLKPYAFTRINAYSSWIQESMDSMAARLKVLQINRTVWKDGL

SEQ ID NO: 42262 - DNA, 5886 bp, DROSOPHILA
attatgaatttctggcgtatttctgatccacttacgtcgcagggacctcgcggtcctttcaaatgcatcgcacagatgtcaagcggtttgaggaaaacgaagcgatggctttgctggcactcatcgttctccatggtcaagaagggcatctcctggagttttcttatcttgccgacgccaacccgaccccagccaaccagcgaggcctgggtgccactatccctttgaggctttccagcaaagttaatgctacgaaatcgcacatcgtcgagcgggaatttggggtaaatcctcaacacggcaatgtcgttgccgccgagcaccctaaactggggatgccatcttctttccacgacgaagaagcgggtctgcttccggctgttcagcgaatcggcgccaccagccacgtacagttgtttggttggattcgtttggatgcagtgggctgcactgagcacgaactcattcgaaagtataacgcccacgcaaaggtgcttgtagtatcctttaaggttctctcctatggagacgatgtatggataacgagggcggaaacttatcaccttcgtggtcgacacagttgtggctaacaaaggtgtgctattctgcggggtgtcggaaagcgtctcctgggctgccgacatcgcggcgaaccaagctatggagcaaagagattgccaacaacacataactgcgaccaagtcacgaatacaaagacgtcacaaagacgtcttgtagtcaggttttatcatcaagcatcttaactttataattgggcatgaaattataattttctgtattctcacatggttaactttaaaagaatatacatttaaattccattatattatcaaactttataaagtatagcaatattttttttgaagagaaaaagcttgtacggttactatctacacgtctgcaaaattatggaaacagttcgaaaatagcttaaaagaaaatcctcattagacccctataaccgtgatcaatagaaatgctacttgctagtggcagaatctctgagggtctgcttcatattggccacctggttgagcttggcaaggcgcttcatggtttcgagctccttaataaacgtggccagcgcctcttttgtggtcgagatgtcagcgtcctttaagtcatccaacgtgtcctccttttcaagttctaaaagaaattcaaaaatatatatagattcatatatactcgtgacaaaaattagttttggatactaaccgtccatttcggcttctatgtcattcagccgatcgagaaccaaggattgctgcaccttgatatgctcgatcaaacggtactggcactcctccggatcgatggcagcttccggttgcggaacgttcggaaggtcgggggcctccaattttgcacgcttaaccggtgtcaacgcagtagagtccagattgtcttcgtcccactttttggcccatagataaagcttcggatgacagcggttgcgtgcgatgttaatcttcaccagcagcgagtgcatcgatcgcttggcatctagcaaattgccggtcagcgtgtgcgagcgcttcaagagctcgaattgtttggtggcctgtggatttgcagtgtgatacgcggccaccggcaacttgccttcgaatagccagtcctggtcgtgcttaaatctcatagaatcccgacccctctgcggattgcgacaaatgtagcacacatacttgtccggtacatctgcctctttgacaattccgttgcatgcaccgtgttgccagcataggcacaattcacattggatcattaggccgtcctcttcgccatactcgcagatgcagttaatgatctcctcctgccgcatgcgcacaattcgaattagttcaccattttccttgatgtactgtggtgctttgcttaacgtttcagctggtggtggggcaagggctgcatttatgtcggtctggtcattagatgatggcgtggacaccgaatctcccatggctggtgagtcaatggaactgatgggagttgttgccgcaccactgcggcgttttttcgagtcgatgcgcgtatccggagtgggggtgttaaaagattgccgtgtctcctcaacatcttgttcggttaagccatgaccagccgggttatctgacaaaatgggacgacgctgagagcgctggcggttactctttcgcgagccagatggccgcttcgacggcgacaagcgtgcacgcttgcaggaacgactcaatgaaggattaaacgactgagttggaccagcatccagagaaacatcttcttgtttaatgccactttcaacagttggcgacacacttggtggctccatcttaggagataacagggccttagtaggcgttatgtcagatggcgttgaagatgtggccgtagctgatacactctgtcgtttaaacgatcgtgactgctgcaaatcctgctggtgcattttggcaaagaattgctggttgggtatttggttttttggcaccgcctcaacttgatcgatggatgaggggtgcgtacgtttgaccgctagttcctgcatctttggacagtggctgacgtgtctgtagatttaaagtaagttaggtgtcatgagttttgaatgaatattactcactctgcaaactccttgtgataatggcgaatgtggattagcagaaagtcttctttgcgataggtcttggcgcaatcttcgcgcgggcatacataaagattgtcttggattttgacttttaggcccccaatgaaagctgaaatatggaattataatttattttaatatagcacatgttatttcaaattgcatatacttaccaaagccattttccaccacatgaggatctgctaacataagctgagaggtacctccctcactggcttccagtatttctgcttctatcttgggctttgtctcatcggcaggctgcgtctgcggcgacattaactcagctggtggcataagcgaggccaccggtgcttccatgtactggctttctttcaccggcatcggagtagaaggtaaagaatgttgcgacgtgatgctctggtccagcgtggagttcatcgacacatccatgggcctgggcttgggcggtggctgcggattgtagccgtgtgtgtagacgtaagcattgatgtctttggcacgacgtcgatggatgctaaagtcgtacacatccgggttgtagaccagattctgggactcaaggaacaacttcaagtcggacttggagcggaaacgtttgccgctgggcgagaccagaataacatcccacttgccgaggacgttggaccgctggtacatgtgcttgatccagccaggaggcagacgccaatcctgcacgataacagtgggtttctggtgctcgcccacaatcagaaaaccctcggttccaataggctggtcatttacccaatgacaagtccactcgccgtcatgcggtatttctgggagtccaagggatgctgttggttacgaaagtcaaacatgaaagttaagtttaaggcaaaactaacattctcctttcggtgctcttacctatatccaaactggccatgtccagcaacggccaatccctgcgctgaggtgcacatttgctcttcttgctgcccgaagagccactggatccgccaaggctgcctgtgctcgcccgcttcggagccacaggtgcagagcttactggagttccaacaggagtgggtgactttgaggcaccctcttccgctacctgaacagggggcaactgcttgggcatcttgttcatgtgcacggcgcgcacgttcttaacgtaaccatcgtcgaagagaacctcgtaggtatcgttgcccagcaacttgcgtatggttcctggaaacttacgcggccccgaccagcgggccatgcacttctcgtccagctcaaagacgggcagcacacggttgctgaggcgctgcctcagccgctccgacttgatggccatccactcctgaaagctgccgctggtcgaaggtgacacctttagcttgtgattgcgctcaaagcgcacgagtagcgtctgctccgtctcgttaacttccacgatgcgggcgggcaaccagttgccttccacactgagcgcctccaaacgggcgccaatagtcaggttatgtgggttgctgtacttgggcggtgtgccgggcaaaggtgagttcgaactggaagcggatccaggagctgggactgtggcttcgctgcttgcggctaccggagtccctgagggttcctttgcagctgccttgtttgcatcttctccactttcgggagtatttttaacgtcatccgccgccttgcctgttttaccttcctccgtggccttgcgttctgcagattccgacaggatttgcgcaactatttggtctaccgtagctttgatcacatcgtcattggtcgatgactgagcatttcccggggtttcagtcgttccctccacgctggcgtgctgaagtgcccgttggtctgcttcgatctccgcggtatccatcttgccccatggaaaaacggtgggaaagacgcgcggcttgagcagatacttcccattgcggatagtgttgaagtccaaacggcggaagtggcgtgagcagaccagcacgctcttggtgatctggcgctccaggctgatgcgagagtttttgatccatatggcgcggatgatgggatctagggggaaggagtggtaagtcacgccgttgtgctccaacagacgcgacgtcgacgggcagttggccacgcagcaccggcggcccatggcgatgaagttcacccaattctctattttgtttgcctatgtgcaaacgcacactttgctaagtgatgaaataatccaggaaacgacgcgaaaattatccagaaaaatacagcgcaataaattagtgataccaaattggggtacagtaaaaacgtgtgcgtcggcaaactatcgatagttagatattgccaccttgttggaaaagttcaaaactatttaacgatattttttgaattttataaaaaataaattttaaatgactttattgcatagatctttattgtggtgataaataaatactactttcgataaataaataaatattactttagagcctgagtaggttgaatttaattactttttatttctgactatctcaattttcatgaaactttacatcaatcttcctgccataaattaactattaaagttggtaaatacccgctgcacaattaatattaatcggtgcgttaatgcattttagcgaagtgagggtgccataaatttcctcagctcggcggaaaaaggatcacgtgccgatacgccaccgttcccaaggccaccgaaagcctatttgaaatgcaattaatgtacgcttttgggcttacatgtcaccacgttcgccaaaaggcagacaccttgcaaaaagctaaccaaatacgatattatccattcgacaaatgcttctggaaatatgtatttcaacactgggtttcaaagtttgaggagcagctatttacgcatactgctaaaataaacactcattgtagtttttaattacaatatttcacccggtcattagcatgcaagaaacaactgacaaatttaaatgtggcgcctgctgcttgatcggttgattgagccgccaaaaaaatcgattgaagtatggagctttggccttcaaatcgaaatatgtgaggaaaatgtgatggcacattttgaaagaataaaatattaagattctctatattgtgtcaatatcttatgtatatatgtggcttgacccctcgaattccgtaactaaacagtttagttccattacaaatattgttttagaatgatagccggaaactcacggtcgaagagcttcctgtttttgggtacttccctgaaaacg

SEQ ID NO: 42263 - DNA, 3627 bp, DROSOPHILA
ttgcgctgtatttttctggataattttcgcgtcgtttcctggattatttcatcacttagcaaagtgtgcgtttgcacataggcaaacaaaatagagaattgggtgaacttcatcgccatgggccgccggtgctgcgtggccaactgcccgtcgacgtcgcgtctgttggagcacaacggcgtgacttaccactccttccccctagatcccatcatccgcgccatatggatcaaaaactctcgcatcagcctggagcgccagatcaccaagagcgtgctggtctgctcacgccacttccgccgtttggacttcaacactatccgcaatgggaagtatctgctcaagccgcgcgtctttcccaccgtttttccatggggcaagatggataccgcggagatcgaagcagaccaacgggcacttcagcacgccagcgtggagggaacgactgaaaccccgggaaatgctcagtcatcgaccaatgacgatgtgatcaaagctacggtagaccaaatagttgcgcaaatcctgtcggaatctgcagaacgcaaggccacggaggaaggtaaaacaggcaaggcggcggatgacgttaaaaatactcccgaaagtggagaagatgcaaacaaggcagctgcaaaggaaccctcagggactccggtagccgcaagcagcgaagccacagtcccagctcctggatccgcttccagttcgaactcacctttgcccggcacaccgcccaagtacagcaacccacataacctgactattggcgcccgtttggaggcgctcagtgtggaaggcaactggttgcccgcccgcatcgtggaagttaacgagacggagcagacgctactcgtgcgctttgagcgcaatcacaagctaaaggtgtcaccttcgaccagcggcagctttcaggagtggatggccatcaagtcggagcggctgaggcagcgcctcagcaaccgtgtgctgcccgtctttgagctggacgagaagtgcatggcccgctggtcggggccgcgtaagtttccaggaaccatacgcaagttgctgggcaacgatacctacgaggttctcttcgacgatggttacgttaagaacgtgcgcgccgtgcacatgaacaagatgcccaagcagttgccccctgttcaggtagcggaagagggtgcctcaaagtcacccactcctgttggaactccagtaagctctgcacctgtggctccgaagcgggcgagcacaggcagccttggcggatccagtggctcttcgggcagcaagaagagcaaatgtgcacctcagcgcagggattggccgttgctggacatggccagtttggatatagcatcccttggactcccagaaataccgcatgacggcgagtggacttgtcattgggtaaatgaccagcctattggaaccgagggttttctgattgtgggcgagcaccagaaacccactgttatcgtgcaggattggcgtctgcctcctggctggatcaagcacatgtaccagcggtccaacgtcctcggcaagtgggatgttattctggtctcgcccagcggcaaacgtttccgctccaagtccgacttgaagttgttccttgagtcccagaatctggtctacaacccggatgtgtacgactttagcatccatcgacgtcgtgccaaagacatcaatgcttacgtctacacacacggctacaatccgcagccaccgcccaagcccaggcccatggatgtgtcgatgaactccacgctggaccagagcatcacgtcgcaacattctttaccttctactccgatgccggtgaaagaaagccagtacatggaagcaccggtggcctcgcttatgccaccagctgagttaatgtcgccgcagacgcagcctgccgatgagacaaagcccaagatagaagcagaaatactggaagccagtgagggaggtacctctcagcttatgttagcagatcctcatgtggtggaaaatggctttgctttcattgggggcctaaaagtcaaaatccaagacaatctttatgtatgcccgcgcgaagattgcgccaagacctatcgcaaagaagactttctgctaatccacattcgccattatcacaaggagtttgcagaacacgtcagccactgtccaaagatgcaggaactagcggtcaaacgtacgcacccctcatccatcgatcaagttgaggcggtgccaaaaaaccaaatacccaaccagcaattctttgccaaaatgcaccagcaggatttgcagcagtcacgatcgtttaaacgacagagtgtatcagctacggccacatcttcaacgccatctgacataacgcctactaaggccctgttatctcctaagatggagccaccaagtgtgtcgccaactgttgaaagtggcattaaacaagaagatgtttctctggatgctggtccaactcagtcgtttaatccttcattgagtcgttcctgcaagcgtgcacgcttgtcgccgtcgaagcggccatctggctcgcgaaagagtaaccgccagcgctctcagcgtcgtcccattttgtcagataacccggctggtcatggcttaaccgaacaagatgttgaggagacacggcaatcttttaacacccccactccggatacgcgcatcgactcgaaaaaacgccgcagtggtgcggcaacaactcccatcagttccattgactcaccagccatgggagattcggtgtccacgccatcatctaatgaccagaccgacataaatgcagcccttgccccaccaccagctgaaacgttaagcaaagcaccacagtacatcaaggaaaatggtgaactaattcgaattgtgcgcatgcggcaggaggagatcattaactgcatctgcgagtatggcgaagaggacggcctaatgatccaatgtgaattgtgcctatgctggcaacacggtgcatgcaacggaattgtcaaagaggcagatgtaccggacaagtatgtgtgctacatttgtcgcaatccgcagaggggtcgggattctatgagatttaagcacgaccaggactggctattcgaaggcaagttgccggtggccgcgtatcacactgcaaatccacaggccaccaaacaattcgagctcttgaagcgctcgcacacgctgaccggcaatttgctagatgccaagcgatcgatgcactcgctgctggtgaagattaacatcgcacgcaaccgctgtcatccgaagctttatctatgggccaaaaagtgggacgaagacaatctggactctactgcgttgacaccggttaagcgtgcaaaattggaggcccccgaccttccgaacgttccgcaaccggaagctgccatcgatccggaggagtgccagtaccgtttgatcgagcatatcaaggtgcagcaatccttggttctcgatcggctgaatgacatagaagccgaaatggacgaacttgaaaaggaggacacgttggatgacttaaaggacgctgacatctcgaccacaaaagaggcgctggccacgtttattaaggagctcgaaaccatgaagcgccttgccaagctcaaccaggtggccaatatgaagcagaccctcagagattctgccactagcaagtag

SEQ ID NO: 42264 - protein, 1081 aa, DROSOPHILA; identical to SEQ ID NO: 25623

SEQ ID NO: 42265 - DNA, 3439 bp, DROSOPHILA
tcttgttcagctccaatcccagggcacgggccgtcatcaggatggaacggcaaggtgccgagtagagcatatagtagaagtccaacatgattactcgctgagctgtaaaatcatactgaattagtttacgtcaaattgtccttatatactgttgttcccttcaacgatggctagattagacttaacgagacagctttcattggaatgtttgtttgtttgtataattgtatcaaattgcattggatatttttcttagaatttcgtgatatatcgactctacccgctcagatgtttacatttcagatcatattttgtttttaaaactaaagttaaagttattggtggcgcaagacacaaaaaaaaattattgagaaaacatggtcgttaatgcaccttggaatgcacataatgcacccattttgataaaagcttattgagacagttaaacattctctcagaaaaataacataaatatctacaaactgtgtttttattaaaaatggtgcccataatatataaaatatgtcgagatttgcttccttttaaatgaataatttaacttggtaattttccactttgttatctaccgttaaaagctttttgaagaacaagaaattacaagagctgcctttctgatgaaaatttcagaaccaaaacgaaattcactctaagtttctaatctatttcaccaatgaatttaagtctgataatttctcactttttccttacagattttcaagcttcttttttgaggccttcaccacataaaactaacgagcatcgcgaaaatattctatcttttattatctttttttgtttgcctctcgattcggagagatttagcaaaagaggaaagagaatcacccctggcatcaaagagaaaataacgagcatcaagagagcccacttattcaattgcagtccctatccacaatatccactatccacatacacatagtaatatatgtaaatgtacacccatctaaaaacaaactcatttgtattttgtgcattcaaaaaaaagaacacttatttattgtctttggagacaggcgaatttggaattgttgtttgtgaacgtgaatataaatactacatcatatgtacgggtataaaaacgtgaatatcaggcttattcgaagtacttcttgaactccaggcatccggcccagttctcctcccatccgggagtcaccttcttggcgttctcgtaccacctgttcacattggcgtacttgctgatctcgaatttggccacctcgaatgtggacacggttgccaccagggcaatgtcggctacggtaagggagtcaccggcggcgtagtcctgtccctccaggaaggtgttcaggaactcgaaggcggcctcgatcttcttgaaggcctctggatcggcgggcgccttggcgaacacctgtgggtagtagtagttggcgaagctctggtacagcgttcccatgtcgaagtacaggcgctgattgatcacggcgcgcttcttggggcacttagggtacagggagtcggtcttgccgtacttctccaccaaatacacctggatggcgcgggactcccacagcgcgaatccgttgtccaccagcgtgggaatggtgtgctggggattgatcttcaggaactccggcttcaggtgctcaccggcctgcaggttgagcagcttcttgttcagctcgacgcccacggccttggcggtcatgatcacggagcggcagggggaggagccgggcaggtagtagaagtcaaccattttactgtagaagttcgaagaactatcatttagttacagtgctcgcaataaataatttgtagccaacttgttaagaaatattattatcttcgctaatttctaaccaacggttatttaaaagcttagggcattcatttgtatttctaatttgggttttaaatggaagaagaatcaagttgaaaagaaactgaaaacaattgtgagtccgccatatttgattggagtgaacaaatctccaacttcttttcaaatttagatgtgagcaccaaactttttcaagcatatccacaagcgtcgcattcatatttaaattaacaatctcccccttcttgagacccaaattgcttctgtattatacacattatccatatggcatgcaaacagaatagatctggatgctagaaagatatgccacaattagacgcgctctataattacaagttcagcaaaagcggactttaattgggccgccattacagaagttcacttggctatgatgtcatatcggggctataatacgttcaaatgttggtaattttccatgctgccaatatttccttttatttttgaccaaacacaggcacacaatcacaaaacacaatatatatagaaattgctgtggggaacttacatttttttcttctgttgtgaaactcgcgatgtacactgtatcaaatgaaaagtagcactgaacggaattcgaagagcgagcccacttttataggggccggctgtggtcgccacaatgccggcaaacaagagttgtagcttgaagcgccccgcggggcgtggcaaggtggggagagaggtacagagagagagagagggggctgctagttgttgtcgtgcctgggttttttttttgtcttctattatattctgacttgcccacacatacccactaatggcgggcaaaaatgtgacgttagcggcgtgattaatacactgttgtgtggccatgggtgtgtggagacgattgatagtgtgtgtgtgcgtgctctggaggaggttgcactctatccgttccctcatacacctccaccatacccccgcaaaagaaagctgcaactttctaatgatcctccattggaacgaagccttttactcgcttaagaacaaattttgttacatttctttataatttctgattttaacaaacagataacaaagaagatacaatcctgccatacaggtattattaatcgtagggtatttacacatcgacttgctaagattagcaaacacataagcatgcaatcgattagcttgaaacacaattttgcatttctaatgaacatctgtgcgcctgaaaaaacataaattcttttaaaatgcaaaaaaaaataagtacaaacaaataagcaggcaaacagaaaccagataagaattcaagccggccggcaaacattgatatcaggcaaacatatatgtatgtatgtacatatgtacatatatagcaacagttgtcgagtatttccaacacacaagcaaatcgcgaaaggctcataccgtactaataagaccataaaaatataaccgtttttcgaattattcaatatactttgactcatagtaataattttaatgggtaagcccaagctatggtagacaaatagtagtagattaaatgatgagtcaaaggcacatgcaaattcgaaattactggtacacattttc

SEQ ID NO: 42266 - DNA, 808 bp, DROSOPHILA
atttgatacagtgtacatcgcgagtttcacaacagaagaaaaaaatatggttgacttctactacctgcccggctcctccccctgccgctccgtgatcatgaccgccaaggccgtgggcgtcgagctgaacaagaagctgctcaacctgcaggccggtgagcacctgaagccggagttcctgaagatcaatccccagcacaccattcccacgctggtggacaacggattcgcgctgtgggagtcccgcgccatccaggtgtatttggtggagaagtacggcaagaccgactccctgtaccctaagtgccccaagaagcgcgccgtgatcaatcagcgcctgtacttcgacatgggaacgctgtaccagagcttcgccaactactactacccacaggtgttcgccaaggcgcccgccgatccagaggccttcaagaagatcgaggccgccttcgagttcctgaacaccttcctggagggacaggactacgccgccggtgactcccttaccgtagccgacattgccctggtggcaaccgtgtccacattcgaggtggccaaattcgagatcagcaagtacgccaatgtgaacaggtggtacgagaacgccaagaaggtgactcccggatgggaggagaactgggccggatgcctggagttcaagaagtacttcgaataagcctgatattcacgtttttatacccgtacatatgatgtagtatttatattcacgttcacaaacaacaattccaaattcgcctgtctccaaagacaataaataagtgttcttttttttgaatgcacaaaatac

SEQ ID NO: 42267 - protein, 209 aa, DROSOPHILA
MVDFYYLPGSSPCRSVIMTAKAVGVELNKKLLNLQAGEHLKPEFLKINPQHTIPTLVDNGFALWESRAIQVYLVEKYGKTDSLYPKCPKKRAVINQRLYFDMGTLYQSFANYYYPQVFAKAPADPEAFKKIEAAFEFLNTFLEGQDYAAGDSLTVADIALVATVSTFEVAKFEISKYANVNRWYENAKKVTPGWEENWAGCLEFKKYFE

SEQ ID NO: 42268 - DNA, 3385 bp, DROSOPHILA
gggcttctttaggaaaatctgcggataatagtactcggagaagctcttatacagcgtacccatgtcgaagtacaggcgctgattgatcaacgcctgcttttgcacatccttggggaagagcttgtcgtccttgccgtacttctccaccagataaaccataatcgcccgcgactcccacaaagcaaatccatggtcgtgcagcgtggggatcgtgtgctgcggattgattttcaggtattccggcgtgaattgctccctagctcgggtgttgataatggtcttcttatcgaactccacacccagtgccttggctgtcatcagaacagagcggcagggagcagatccgggtctatagtataaatccatcttacgctatctcactttctgaagggatctctggaaactgaataaaaaaaaaaacgaacagctaatcactttctcatttcgttcgctgaacctggttacgcaatctctataataaattcatcaaaaacaacaaaagtatacatacctacgtggtaatcaaatatactcggctgctctgctggagtcaaaacgcgacaaacgactgaaaaattctctgcggtttagtcgtgttttataagaaatagaagataaccacaaaaaatactcgtagaatgtttcggggctgatggatcaattaggtataggtgataatagtcagcaatttttgggctagcactggacacaagagaaacttctggaagagcagagtgcagctgtattaccaatttcatttcgtttagcttcccgttgaactaaactttacgtaaatcatgaattagtacaggtgtttgtccaaaattaccatttgaatttaattgttttggctatcgctaaaatcacggcaggtggcatttcagcaaaccgacacgtagcaatatcttatcgctatcagaatgtttggagcagaggatcctctgccttatcgctgtacaaaagccaacaactcttcgtttattatactcattgtcatttcacaatgtctcactctttattcaaacaggtcgatacagattagattatttattacagacccgtcattgtttgttcaaaatcgcacccagatacaatttcttgtagtactcgcagccctcccagttctcctcccagccgggtatcactttcttggcattgtcgtaccacctaaccacttccggatatttaccaaaatcatattccgatatttcaaaagtggaaacggtggccagaagcgcaaaatcggccagagtcaacttgttgagggcggcgtactgctgacccttcaacagagtattgaacatagcgaaagcatcatcgatcttcttgaggttatcgggatcagctggcttcttcacatcctcgaacaactggggatagtagtagtacacgtagctctggtacagagtactcagatcgaaaaacaggcgctgattgatcacggctctctgctggggatccttgggataaagggagccatctttatcgtacttctcggccagataaatcagtatagccctcgactcccagatggcgaaaccatcgtcaaccagcgtgggaatcgtatgctgaggattgatctttacaaattccggcttaagatgctcgccggcatccagatccacctgcttcttgttcagctccaatcccagggcacgggccgtcatcaggatggaacggcaaggtgccgagtagagcatatagtagaagtccaacatgattactcgctgagctgtaaaatcatactgaattagtttacgtcaaattgtccttatatactgttgttcccttcaacgatggctagattagacttaacgagacagctttcattggaatgtttgtttgtttgtataattgtatcaaattgcattggatatttttcttagaatttcgtgatatatcgactctacccgctcagatgtttacatttcagatcatattttgtttttaaaactaaagttaaagttattggtggcgcaagacacaaaaaaaaattattgagaaaacatggtcgttaatgcaccttggaatgcacataatgcacccattttgataaaagcttattgagacagttaaacattctctcagaaaaataacataaatatctacaaactgtgtttttattaaaaatggtgcccataatatataaaatatgtcgagatttgcttccttttaaatgaataatttaacttggtaattttccactttgttatctaccgttaaaagctttttgaagaacaagaaattacaagagctgcctttctgatgaaaatttcagaaccaaaacgaaattcactctaagtttctaatctatttcaccaatgaatttaagtctgataatttctcactttttccttacagattttcaagcttcttttttgaggccttcaccacataaaactaacgagcatcgcgaaaatattctatcttttattatctttttttgtttgcctctcgattcggagagatttagcaaaagaggaaagagaatcacccctggcatcaaagagaaaataacgagcatcaagagagcccacttattcaattgcagtccctatccacaatatccactatccacatacacatagtaatatatgtaaatgtacacccatctaaaaacaaactcatttgtattttgtgcattcaaaaaaaagaacacttatttattgtctttggagacaggcgaatttggaattgttgtttgtgaacgtgaatataaatactacatcatatgtacgggtataaaaacgtgaatatcaggcttattcgaagtacttcttgaactccaggcatccggcccagttctcctcccatccgggagtcaccttcttggcgttctcgtaccacctgttcacattggcgtacttgctgatctcgaatttggccacctcgaatgtggacacggttgccaccagggcaatgtcggctacggtaagggagtcaccggcggcgtagtcctgtccctccaggaaggtgttcaggaactcgaaggcggcctcgatcttcttgaaggcctctggatcggcgggcgccttggcgaacacctgtgggtagtagtagttggcgaagctctggtacagcgttcccatgtcgaagtacaggcgctgattgatcacggcgcgcttcttggggcacttagggtacagggagtcggtcttgccgtacttctccaccaaatacacctggatggcgcgggactcccacagcgcgaatccgttgtccaccagcgtgggaatggtgtgctggggattgatcttcaggaactccggcttcaggtgctcaccggcctgcaggttgagcagcttcttgttcagctcgacgcccacggccttggcggtcatgatcacggagcggcagggggaggagccgggcaggtagtagaagt

SEQ ID NO: 42269 - DNA, 744 bp, DROSOPHILA
gcctcaaaaaagaagcttgaaaatctatgttggacttctactatatgctctactcggcaccttgccgttccatcctgatgacggcccgtgccctgggattggagctgaacaagaagcaggtggatctggatgccggcgagcatcttaagccggaatttgtaaagatcaatcctcagcatacgattcccacgctggttgacgatggtttcgccatctgggagtcgagggctatactgatttatctggccgagaagtacgataaagatggctccctttatcccaaggatccccagcagagagccgtgatcaatcagcgcctgtttttcgatctgagtactctgtaccagagctacgtgtactactactatccccagttgttcgaggatgtgaagaagccagctgatcccgataacctcaagaagatcgatgatgctttcgctatgttcaatactctgttgaagggtcagcagtacgccgccctcaacaagttgactctggccgattttgcgcttctggccaccgtttccacttttgaaatatcggaatatgattttggtaaatatccggaagtggttaggtggtacgacaatgccaagaaagtgatacccggctgggaggagaactgggagggctgcgagtactacaagaaattgtatctgggtgcgattttgaacaaacaatgacgggtctgtaataaataatctaatctgtatcgacctgtttgaataaagagtgagacattgt

SEQ ID NO: 42270 - protein, 218 aa, DROSOPHILA
MLDFYYMLYSAPCRSILMTARALGLELNKKQVDLDAGEHLKPEFVKINPQHTIPTLVDDGFAIWESRAILIYLAEKYDKDGSLYPKDPQQRAVINQRLFFDLSTLYQSYVYYYYPQLFEDVKKPADPDNLKKIDDAFAMFNTLLKGQQYAALNKLTLADFALLATVSTFEISEYDFGKYPEVVRWYDNAKKVIPGWEENWEGCEYYKKLYLGAILNKQ

SEQ ID NO: 42271 - DNA, 8165 bp, DROSOPHILA
tctgctcgagaatttcttggagcccatgcaacagacgcaaatgtaagttctctattctctgacataatttgaatataatctaaaagggcttcttctacagactcagtcaggatgagtacgcccagctgatgtgtaactttgtagagattgtgcgtacgcacgaggatttgcttatccagatcgaggagtgcaacgatcgagtgggaaaactatttctcaccagcgcccccttgatgaagaaggtgcaccaggcgtactgcgctgcccatccaaaggccattgtcatactggataagtacaagtatgtgctcctcgctttatatacatatattgtggtgttcaattgttaataaatataaatttttttctattccaaaagggacgagctggaaaagtatatggaacgacagggcgcagccactcctggattacttgtgctcacgacgggtctatcaaagcccttccggcgactggacaaatactcggccatgctgcaggagctggagcggcatatggagagcagtcatccggatcgcggcgacacccagcggagtgttgccgtgtacaaagacatagctgccacctgctcggccacccgtcgccaaaaggagctggagctgcaagtgctcacggggccagtgcgtggatggcagggccaagagctgagcaccctcggggacatcatccacatgggcagcgttgcagttggagctgatcatcgcgaccgatactttgtgctcttccctcaaacattgctattccttagcgttagtcagcggatgagtgcattcatctatgaggtgggaaacacaagcacaacatggcgaatttgtttgtaatctgttttcacacgcagggcaagctacccttaactgggatcatagtgaatcgcctggaggacacggatgccctgaagaacgcctttgagataagcagtcccttgatcgatcgcattgtagcagtttgtcagggtccgaatgaggccaacaagtgggtggagctgctcaatgccaataatcccagcttgccgatgggcatcaaacggcaattgagtaacttgagcaactcttcgctaggacacctaaatgccgctcatgtaagtagtatatttctcctatatattcacctttattatcgtttcgttttggcgacactttaaaccgtgagcagctgagtcaacatttggattcacggggctactgcacgcgattctcgctgtgtgcctattactccagccccccgtgccatgtgcgacctctccgtgtgactcttcccccaagcaattacccagcaacagctccgtacgccaatcttagtgctcactttgccaggcttgttaaaggcggcggactgaggagtgctatcgtaaagatgcttctgtatccgcaggctcgccagagcatcgatctcaaaaggattgcgttgcgcaaaaggcgttgtcacaaggcatctgcaaagttaaaagatctcaataccaatcaggattcggggcagtccgagttggaacgacaggatgcaattgaactaccaacggactcggagagctatgacgatgactttgaagatgattttttgcattcctgcgactcggatccgtttgaatatgtgcagttttaccaaaacaagcggaacgattccatgtgcaactccacaggcacattcgtggaccatggcacgggtgccaggaggcactgttcctctatcaacctcattaaattggattccgcggacacggacgaagttctagcgctcaacgagttaaaaaaggagtctcttgttataggatccagagcactaagagctttggctcggaagtccacgactcgaaattccagtgtgcacacatccacggcaactttggagctaggtgtgggtggcagcatcacaaactgtgttgaggaagagccaattcttaaggtcaagccatcgttctccctgcaacaacaaagttccgatgcgagttccatttttgcagctagattgggcggtgcattcaccgcctgcgagaatctggccagtatgcctgatgatctcagcagggagtcgagtatccaagagccacccactcctctgccagcttcaccgacagaacggcacagcatgccgaccatatttgtgggcaatcggttcaaccacagcaaaaatacagaggtatatgtaccgacgtggcgagatcgccaggaaatgcagaatcagagtgtggatgcgaagcaggatgaagagttgcactccagttccattgatctacccgccgcctgtctatctgctccggataaactgcaagcagaactactctacaattacgacgagatcctagaaaaacctctacagctgcatcgggagctaacgccctttccgggccataatcttaactcggataagcgagtttcccacaaaagcgacagtccgtcgacaggaaatgcaaagacagatccaaatcttgccacaagaagtagttccaccaccgaactctgcatcgataccacttcaaaaaagcgcacaaccccgtcagagagaagccgggattccattaggcgctgcattagctatcagttcctgcagatgtccaatcgaccgccccctccaccaccgccacgcagggatccggatctacacttagacaccaaatgccgctgctgcgaaaactcccagtgtcccagtccgcgatcgagtgacagcggaatggctggcagttgcactattacatcaccggatccgcccaatccggaatcatactttcccatggaggccgcaggccacgatatgctggataatgtggagccagagaggtttgatgtgtgcggaatgttcagagagaagttcctcactccggaggctactcaggatgttgttgatctatcagaggagcagcctcaactatcagatgaacccactacccctaccaatcgcaaagaggaacctacttgcatcacctctgctcaagtgcaagtgaacacaaggagtatttttctgccctccagctcgagcatggatgagactaacaggaatgtcccagccaacaatatcctatttagctcgagttccgcggatcagttggaaccgcaggccacctttcgctcggggatgtatgcgcactggtggaagaaagagcgccttccgccggaggtggtgcgtggcatagcccacgcctacaataagagcttgccctccaaggactcaaaagattcgggatcggtgtgctccagctgcttctgttccctgggagctagcggttacagcgagggcgcactctactgctcggtgtgccaaaactgtgcggactactacaacggcagtgtcaccagcacaaccaacacgacgaccaccacatcatccgccagttgcccactgtgcagtgaggacgagggcatgattgcccccacacacgactcgtcctcgctcgactgtcccatatgtaatggccgcattgcttccggcgccgaagaaggcaagcaatccgaaatggatcgacggccaggtaatctaaggattcctgtcgaatggtatccggtttacctggctggcggcgtttgttccgtgcacgtgttacgtttgattgttttgtaaattcgttttgctctcatgttcaccaaattcaaaaatcccttatgctctaccagcaaccatttggccaaatgcagcacgtccaaaaaagtcatcacacattgcttcctcatcagcacatcctttgactaacccagtgcgagttcattatttgcccaaatttccaatggaattggtaataaaacaataagtaatggcttttaaataaatttctttaaagaccagtctgaaataaacatttaaaatttcatcaagtcaacaaatttattaaatgtgtaaataagtgaaactaaagcatatgatgtttgacttcaattaatatttgaatatgatgatttctgaattttcggacttgcaaatggcattcaatgaacattggttctgtttttcctccctccgctctgggcggtaatttcatccgtcgtaaagctaaacgaattacaaaacattaatctaacgctctacaacacaaaaattcgaaatgagaatgaaaattacaaccaaaaaccaatcaaacgcattcgattcgatttgcttgctgcgcttaactcgctgcaggatttgcctgaaggattcacctgctgttgtacgttttcttgttgctattgcaccgctgatcctgttgacggcgggccacatagagattctttgattaaaactaacttacagtattttatgcgttaagattaaattagagaaacacaaacactgttaaccagaacccttcatctcttgcattgtagatgtcgccgccatcaagccacatactcctaccgcccggcggccgtccgccagccactcccagcagcatcccggccggcagcagcagcggagggagccacagccaccaggggtctccggccaccaactcgatgtcgcatcacaaacggagccagtcgttcaaccaccatctcagctacaatcagtacacgcccactcagcctccaccacatcatctgcatccaccacaaccaccaagtctgccaagtcatctgggggcatccggccccagatcaagttcagcccagacaccaaacagcaagacagcagctccactccaggcgtcatccatggacgccagtccagcaattcaggcagcggcagcagcagcggcggcagcggtgggaatgggggtgccaagcgcaaggaaaggaagcacaaagggtgagaaattgagaccttactccgggatttgtatgttttctacttactactcactccctgcctggttttctaaatttcccatcacatattaatatttaaactaagcatcaaatgtgttttgcatctgcagctaactggaccatcagctgcctgcgacccacgccgccgttgcgacccagtttattgaatgccaccagcggatcgggaagtggcagcggtggcagcggtggcggcggcagcagctccagcaatgccctggccagctactgcagcggaaggaagaaccagcccacctatgaggaggacgccctggtgctccgggttttcgaggcctactgtgccgcctatcagaacaatgccaggaacaccatccactcgggtaagtggcgaagcccatcccagatgtgcttcatatagctgtaaggatttctatgtgctcccgaaccaagtttgattataatttgctgaagaacaaaagctacaacctgttagccaagttgcttatttacacccacactcacacacattatacacagctgtataatcctcacacaaaacacagactcacttaagagttcagccgctaaacaaaccacttatcattttgttggtttggttgctctataatttcatggttttattcacttttcacaaggcgttgcactataccaagaagaattttccaaatttaatcaaaaatattgtaataggcttagttgaaccattaactttaagcttacgaattgttaaccagttaccaaattatgtttaagagaaaagattgattttttggttgaaccattggccactgatttcgttttaagatcaacaaactcaactctgcaattggtgctaagcagcgaacaaaggaatccaaagtttttgctttaaaagatgtcaattattctgtatctctatagctattatttgtattgacaaccattgaattcgaattactttgtttcttacttaaataaacattatttttgttatcccattacccgtgtaaaccttagtttaatttattcttgccgcctttcgtccgaactcccattcccaggctcacattatcctcatttcgactaatttgttaccattaacatcaagctgcacattctgtatatatgttggatttttggtttaggtttttgctaaccattttgcacactcatcccacagtcctgattcaactgcaactggtactgttgtggtcccctgctaatggtactggtactatttcgggtatcctgtaggcgatttctatcctcggtgtcgtactcatcattgtagaaaaacactatcattattctcatatccctgcttcattcaccttctccaccttcatttggttgttgtggttgtctcccttttggcgttgtgatccccttgcttttttgtttgggtctttggttctcattggtttcacccgttgtcgttgtcgttgttggtatttcgttttccgtttcttcaaatctcttcatttttctctctctctttattccactccgacctgatccaaaccgatctatatatagccttgcaaccctggaccccgtgtctgcccatccgcggtggcaagctgaaaacgagcaaaaccttctcgacctccaatccacagctgcctttcatagccaatgtcggcaactcagcctacctcaatcagcaccagcagcagcatctgcagcagcagcacctgcagcagcaacacttgcagcagcaacatcttgcccagcagcaaccaggtcgtcagcactccgccggcagtttgaactcctcatttatttggcgcgaggcgagcccgaacaacttcaacctatactccagttcggtgtcctcctcgctgaatgcgacacctgcccaacgctactccttatccggaactgcgggaggatcgacgtccatcaaggactaccagagagcgctctccgaggagagggcaaccagaaagtctctgaatcgccttaaaagtggctttggttcgggctacgacaatgtgtgtacatcacctctgctgccgaggaaaaacaaaccggcaccaaagttggtggcccagcagtcgtatcagagatccccgggaaacgccacagccaccactatagtgaagccgaatccgccaggacacccaggactttacgatcgccgcttgaaccgctcctttgagacctccacttcgcaccgctatgccgggtatggagcgggctacttgatgaattgcggcggagccttgcggaccagtacgctccagaggagcactccgcaactggccggtggtgaaagatccgatgacagcgatgtggagcgggaactgctgcggggtaatggagctgggcccacggccagtttggaacttaatcccgatggcagcaaacggcagtcgggcagctggtgttgcggtaattttgtgatgaagcagtggcgcaagatcaaccatgtttgagtctgggcttggggcaccacccaccatgccttcatcaatcatccgcatcacatcgcatccgcatatcgcatcccgccgctccagctccagatacagatacagatgctttgctttgaatgcgctctgtgtgcgaatctatattgatttttagttgatttactggctgcgcaaaagcttccaatgccacaagccttagattctagaccagcgaactatatgaagttgtaagcgaatggccgattgacttctgctcgctttgattgtcttagccttaagctgcgccttgatgtgtctgcggtgaaattcggccaactgcctgaggttatattcaatgcatatcaggcggccaagcgaatttcacggcacctagactgtaactagagtttgtgcttagcttatattgacacctacacctaacttagcttattattaatatgtaatctgtgaaaagacttggcgaaaaagcgactagtttagaagatgatgatgcttgccactgagtgcaactcctagttccgttttgaatttttatggaatttagttcggcttaataagggcagtccttaaatttccgtccacgcgctaacgaattctatttttacgtggccaatcgagtgcggatcacaattttgccataggaattgcctaatagccatagtccaaactatctactagatatactcgtacttcctaatgcatctgtgttcttggaggacgttgacctagtgagttttttattaaatgtccgttacctgcctagcaagcaattaaatcaaagagtgtgcaatgtgtaatcaaagagtgcgctttaagtgttagtcatagctagaatcagcaactaaatcaaagtaaccaactgttgtgcattattgatcgatggataaacgaacttattttgtaagtgttttgtgtaacaaccaaattaactactatatgctcttaaatactattaaccagtttatacgtttgtactgtaattgagttgatatttgtcgacgcg
